(19) United States
(12) Patent Application Publication
(10) Pub. No.: US 2024/0075084 A1
(43) Pub. Date: Mar. 7, 2024

(54) KLEBSIELLA BACTERIOPHAGE AND USES THEREOF

(71) Applicant: Biomx Ltd., Nes Ziona (IL)

(72) Inventors: Eyal WEINSTOCK, Kfar Shmaryahu (IL); Iddo Nadav WEINER, Tel Aviv (IL); Maya KAHAN-HANUM, Hod Hasharon (IL); Efrat KHABRA, Petach Tikva (IL); Noa BEN-YISHAI, Rehovot (IL); Dana INBAR, Ramat Gan (IL); Rotem EDGAR, Kfar-Saba (IL)

(73) Assignee: Biomx Ltd., Nes Ziona (IL)

(21) Appl. No.: 18/273,295

(22) PCT Filed: Jan. 20, 2022
(86) PCT No.: PCT/IL2022/050090

§ 371 Date: Jul. 20, 2023

Related U.S. Application Data
(60) Provisional application No. 63/139,872, filed on Jan. 21, 2021.
(60) Provisional application No. 63/182,941, filed on May 2, 2021.

(51) Int. Cl. A61K 35/76; A61P 31/04; C12N 7/00

(52) U.S. Cl. CPC A61K 35/76; A61P 31/04; C12N 7/00; C12N 2795/10021; C12N 2795/10032

(57) ABSTRACT

A composition comprising at least two different strains of isolated bacteriophages, each capable of infecting a bacteria of the species Klebsiella pneumoniae, wherein at least one of said at least two different strains of isolated bacteriophages has a genomic nucleic acid sequence at least 90% identical to one of the nucleic acid sequence as set forth in SEQ ID NOs: 1-30. Uses thereof are also disclosed.

### RELATED APPLICATION/S

[0001] This application claims the benefit of priority of U.S. Provisional Patent Application No. 63/139,872 filed on 21 Jan. 2021 and 63/182,941 filed on 2 May. 2021, the contents of which are incorporated herein by reference in their entirety.

### SEQUENCE LISTING STATEMENT

[0002] The ASCII file, entitled 89723SequenceListing.txt, created on 19 Jan. 2022, comprising 5,563,457 bytes, submitted concurrently with the filing of this application is incorporated herein by reference.

### FIELD AND BACKGROUND OF THE INVENTION

[0003] The present invention, in some embodiments thereof, relates to bacteriophage strains capable of infecting bacteria of the genus Klebsiella and more particularly bacteria of the species Klebsiella pneumoniae.

[0004] Gut microbiota dysbiosis is associated with the pathogenesis of inflammatory bowel disease (IBD) (Said et al., 2014). Increased stimulation from the gut microbiota can result in inflammation and alter a patient's immune response. In humans, the oral microbiota comprises over 700 species or phylotypes of bacteria (Said et al., 2014). Ingested oral bacteria do not typically colonize the healthy intestine (Chen et al., 2016; Bik et al., 2010; U.S. Provisional Application No. 62/415,759, TH1 Cell Stimulatory Bacteria Colonizing in Human Oral Cavity). However, bacteria of oral origin may be increased in the gut microbiota of patients with IBD (Gevers et al., 2014; Atarashi et al., 2017). Oral microbiota dysbiosis is observed in patients with IBD and could contribute to disease etiology (Said et al., 2014).

[0005] IBDs, such as Crohn's disease (CD) and ulcerative colitis (UC), can cause diarrhea, malabsorption of nutrients, malnutrition, anemia, and weight loss. Severe intestinal inflammation can extend beyond the mucosa of the intestines and cause ulceration, bleeding, toxic megacolon, strictures, and fistulas. In addition, chronic inflammation is associated with colon cancer. Extraintestinal complications include, but are not limited to, arthritis, skin rashes, liver disease, and eye disorders such as episcleritis and uveitis.

[0006] According to the Crohn's & Colitis Foundation of America, “there is no single ideal therapy” for IBD. Dietary restriction alone has not been shown to ameliorate IBD. For many patients, surgical intervention is necessary. Even with the currently available IBD treatments, many patients experience IBD flares between periods of remission. Thus, there is a significant unmet need for effective, reliable, and long-term treatment and/or prevention of IBD.

[0007] Background art includes WO/2019/048930 and de Sousa et al., The ISME Journal (2020) 14:2980-2996.

### SUMMARY OF THE INVENTION

[0008] Unless otherwise defined, all technical and/or scientific terms used herein have the same meaning as commonly understood by one of ordinary skill in the art to which the invention pertains. Although methods and materials similar or equivalent to those described herein can be used in the practice or testing of embodiments of the invention, exemplary methods and/or materials are described below. In case of conflict, the patent specification, including definitions, will control. In addition, the materials, methods, and examples are illustrative only and are not intended to be necessarily limiting.

[0009] According to an aspect of the present invention there is provided a composition comprising at least two different strains of isolated bacteriophages, each capable of infecting a bacteria of the species Klebsiella pneumoniae, wherein at least one of said at least two different strains of isolated bacteriophages has a genomic nucleic acid sequence at least 90% identical to one of the nucleic acid sequence as set forth in SEQ ID NOs: 1-30 and/or comprises the essential genes as set forth in Example 6.

[0010] According to embodiments of the invention, the first of said at least two different strains of isolated bacteriophages has a genomic nucleic acid sequence at least 90% identical to the nucleic acid sequence as set forth in SEQ ID NO: 1 and/or comprises the essential genes of phage KP10-11 as set forth in Example 6, and a second of said at least two different strains of isolated bacteriophages has a genomic nucleic acid sequence at least 90% identical to the nucleic acid sequence as set forth in SEQ ID NO: 2 and/or comprises the essential genes of phage KP10-48 as set forth in Example 6.

[0011] According to embodiments of the invention, the composition comprises at least three different strains of isolated bacteriophages, wherein a third of said at least three different strains of isolated bacteriophages has a genomic nucleic acid sequence at least 90% identical to the nucleic acid sequence as set forth in SEQ ID NO: 3 and/or comprises the essential genes of phage 395D2-3-2 as set forth in Example 6.

[0012] According to embodiments of the invention, the composition comprises:
[0013] (i) a bacteriophage having a genomic nucleic acid sequence at least 90% identical to SEQ ID NO: 1 and/or comprising the essential genes of phage KP10-11 as set forth in Example 6;
[0014] (ii) a bacteriophage having a genomic nucleic acid sequence at least 90% identical to SEQ ID NO: 2 and/or comprising the essential genes of phage KP10-48 as set forth in Example 6;
[0015] (iii) a bacteriophage having a genomic nucleic acid sequence at least 90% identical to SEQ ID NO: 3 and/or comprising the essential genes of phage 395D2-3-2 as set forth in Example 6;
[0016] (iv) a bacteriophage having a genomic nucleic acid sequence at least 90% identical to SEQ ID NO: 4 and/or comprising the essential genes of phage 395D2-3-1 as set forth in Example 6;
[0017] (v) a bacteriophage having a genomic nucleic acid sequence at least 90% identical to SEQ ID NO: 22 and/or comprising the essential genes of phage KP10-85 as set forth in Example 6; and
[0018] (vi) a bacteriophage having a genomic nucleic acid sequence at least 90% identical to SEQ ID NO: 25 and/or comprising the essential genes of phage KP10-91 as set forth in Example 6.

[0019] According to embodiments of the invention, the at least two different strains of isolated bacteriophages in combination target at least 100 different strains of Klebsiella pneumoniae.

[0020] According to embodiments of the invention, the at least 100 different strains of Klebsiella pneumonia are targeted by each of said at least two different strains.

[0021] According to embodiments of the invention, the composition comprises at least three different strains of isolated bacteriophages, each capable of infecting a bacteria of the species Klebsiella pneumoniae, wherein each of said at least three different strains of isolated bacteriophages (i) has a genomic nucleic acid sequence at least 90% identical to one of the nucleic acid sequence as set forth in SEQ ID NOs: 1-30 and/or (ii) comprises the essential genes of a bacteriophage as set forth in Example 6, wherein said at least three different strains of isolated bacteriophages in combination target at least 200 different strains of Klebsiella pneumoniae.

[0022] According to embodiments of the invention, the composition comprises at least three different strains of isolated bacteriophages, each capable of infecting a bacteria of the species Klebsiella pneumoniae, wherein each of said at least three different strains of isolated bacteriophages (i) has a genomic nucleic acid sequence at least 90% identical to one of the nucleic acid sequence as set forth in SEQ ID NOs: 1-30 and/or (ii) comprises the essential genes of a bacteriophage as set forth in Example 6, wherein at least 100 different strains of Klebsiella pneumonia are targeted by each of said at least three different strains.

[0023] According to embodiments of the invention, the at least one bacteriophage is genetically modified such that the genome thereof comprises a heterologous sequence.

[0024] According to embodiments of the invention, the heterologous sequence encodes a therapeutic agent or a diagnostic agent.

[0025] According to embodiments of the invention, the composition comprises no more than 10 different bacteriophage strains.

[0026] According to an aspect of the present invention there is provided a recombinant bacteriophage capable of infecting bacteria of the species Klebsiella pneumoniae, wherein said bacteriophage (i) has a genomic nucleic acid sequence at least 90% identical to one of the nucleic acid sequences as set forth in SEQ ID NOs: 1-30 and/or (ii) comprises the essential genes of a bacteriophage as set forth in Example 6, and wherein said bacteriophage is genetically modified such that the genome thereof comprises a heterologous sequence.

[0027] According to embodiments of the invention, the heterologous sequence encodes a therapeutic agent or a diagnostic agent.

[0028] According to embodiments of the invention, the therapeutic agent comprises an immune modulating agent.

[0029] According to an aspect of the present invention there is provided a pharmaceutical composition comprising the recombinant bacteriophage described herein as the active agent, and a pharmaceutical carrier.

[0030] According to embodiments of the invention, the pharmaceutical composition is formulated for oral delivery or rectal delivery.

[0031] According to embodiments of the invention, the composition is formulated for oral delivery or rectal delivery.

[0032] According to an aspect of the present invention there is provided a isolated bacteriophage capable of infecting bacteria of the species Klebsiella pneumoniae, wherein said bacteriophage has a genomic nucleic acid sequence at least 95% identical to one of the nucleic acid sequences as set forth in SEQ ID NOs: 1-30.

[0033] According to an aspect of the present invention there is provided a isolated bacteriophage capable of infecting bacteria of the species Klebsiella pneumoniae, wherein said bacteriophage comprises the essential genes of a bacteriophage listed in Table 2, wherein said essential genes are set forth in Example 6.

[0034] According to an aspect of the present invention there is provided a method of treating a disease associated with a Klebsiella pneumoniae infection in a subject in need thereof, comprising administering to the subject a therapeutically effective amount of a composition comprising at least one isolated bacteriophage strain capable of infecting bacteria of the species Klebsiella pneumonia causing the infection, wherein said at least one bacteriophage strain (i) has a genomic nucleic acid sequence at least 95% identical to one of the nucleic acid sequences set forth in SEQ ID NOs: 1-30 and/or (ii) comprises the essential genes of a bacteriophage as set forth in Example 6, thereby treating the disease associated with a Klebsiella pneumoniae infection.

[0035] According to an aspect of the present invention there is provided a method of treating a disease associated with a Klebsiella pneumoniae infection in a subject in need thereof, comprising administering to the subject a therapeutically effective amount of the composition described herein, thereby treating the disease associated with a Klebsiella pneumoniae infection.

[0036] According to embodiments of the invention, the disease is an inflammatory bowel disease (IBD).

[0037] According to embodiments of the invention, the inflammatory bowel disease is ulcerative colitis (UC).

[0038] According to embodiments of the invention, the inflammatory bowel disease is Crohn's disease.

[0039] According to embodiments of the invention, the administering comprises orally administering or rectally administering.

[0040] According to embodiments of the invention, the composition comprises no more than 10 different bacteriophage strains.

[0041] According to embodiments of the invention, the method further comprises identifying the strain of Klebsiella pneumoniae colonizing the subject prior to the administering.

[0042] According to embodiments of the invention, the at least one bacteriophage strain is genetically modified such that the genome thereof comprises a heterologous sequence.

[0043] According to embodiments of the invention, the heterologous sequence encodes a therapeutic agent or a diagnostic agent.

### BRIEF DESCRIPTION OF THE SEVERAL VIEWS OF THE DRAWINGS

[0044] Some embodiments of the invention are herein described, by way of example only, with reference to the accompanying drawings. With specific reference now to the drawings in detail, it is stressed that the particulars shown are by way of example and for purposes of illustrative discussion of embodiments of the invention. In this regard, the description taken with the drawings makes apparent to those skilled in the art how embodiments of the invention may be practiced.

[0045] In the Drawings:

[0046] FIG. 1 is a table summarizing the % sequence homology (based on local BLAST) of the isolated phages.

[0047] FIG. 2 is a table summarizing the host range of the phage as profiled according to the capsule type of the infected bacteria.

[0048] FIG. 3 is a table summarizing the host range of the phage as profiled according to Multi-locus sequence typing (MLST) of the infected bacteria.

[0049] FIG. 4 is a Kaplan Meier survival curve of mice following treatment in K. pneumonia peritonitis infection model. The asterisk (*) indicates significant increase (p<0.05) in the survival rates of the treated animals compared to the vehicle control group at day 7 time point as determined by Fisher's exact test.

[0050] FIG. 5 is a box plot summarizing the phage redundancy effect on the time to mutant (TTM) period of the target bacteria. The average TTM is significantly higher between combination populations with different redundancy level.

### DESCRIPTION OF SPECIFIC EMBODIMENTS OF THE INVENTION

[0051] The present invention, in some embodiments thereof, relates to bacteriophage strains capable of infecting bacteria of the genus Klebsiella and more particularly bacteria of the species Klebsiella pneumoniae.

[0052] Before explaining at least one embodiment of the invention in detail, it is to be understood that the invention is not necessarily limited in its application to the details set forth in the following description or exemplified by the Examples. The invention is capable of other embodiments or of being practiced or carried out in various ways.

[0053] The present inventors have isolated novel bacteriophage strains characterized by having a high specificity to one or more Klebsiella pneumoniae strains. The disclosed bacteriophage are lytic, and as such do not have any capacity to integrate into the DNA of their bacterial host. Such bacteriophages bring about immediate target bacterial eradication through lysis after hijacking the host protein expression machinery to manufacture needed phage protein components.

[0054] The present inventors sought to combine particular phage strains and provide them as a cocktail which is capable of lysing a myriad of Klebsiella pneumoniae strains in a single dose. The cocktails can serve as an off-the-shelf therapeutic for the treatment of inflammatory bowel disease (IBD), which is known to be associated with Klebsiella pneumonia infections. Furthermore, it is envisaged that the cocktails will have high therapeutic efficacy for treating IBD at the individual level, since each individual can be infected by a wide range of Klebsiella pneumonia strains.

[0055] The combinations disclosed herein are typically synergistic with respect to their inhibitory effect on the target bacteria. This may be quantitated by measuring the time taken to mutation (TTM) i.e. the time taken for a bacteria to mutate and overcome the inhibitory effect of a phage. When two phages X and Y are known to infect a target bacteria strain H, the TTM of each phage separately as well as the TTM of their combination is measured under same growth conditions. The synergistic redundancy effect appears when the TTM of combination [X,Y] is longer than that of both X and Y. Without being bound to theory, the synergy may be derived from different mechanism of infection used by the two phages X and Y.

[0056] Thus, according to a first aspect of the present invention, there is provided an isolated bacteriophage capable of infecting bacteria of the species Klebsiella pneumoniae, wherein the bacteriophage has a genomic nucleic acid sequence at least 95% identical to one of the nucleic acid sequences as set forth in SEQ ID NOs: 1-30.

[0057] As used herein, the term “bacteriophage” and “phage” are used interchangeably and refer to an isolated virus that is capable of infecting a bacterium. Typically, a phage will be characterized by: 1) the nature of the nucleic acids that make up its genome, e.g., DNA, RNA, single-stranded or double-stranded; 2) the nature of its infectivity, e.g., lytic or temperate; and 3) the particular Klebsiella pneumonia subspecies that it infects (and in certain instances the particular strain of that FN subspecies). This aspect is known as “host range”.

[0058] As used herein, the phrases “isolated bacteriophage”, “isolate” or grammatical equivalents refer to a bacteriophage which is removed from its natural environment (e.g. removed from bacteria which it typically infects). In one embodiment, the isolated bacteriophage is removed from cellular material and/or other elements that naturally exist in the source clinical or environmental sample. The term isolated bacteriophages includes such phages isolated from human or animal patients (“clinical isolates” or “clinical variants”) and such phages isolated from the environment (“environmental isolates”).

[0059] In one embodiment, the bacteriophages are lytic.

[0060] The term “lytic bacteriophage” refers to a bacteriophage that infects a bacterial host and causes that host to lyse without incorporating the phage nucleic acids into the host genome. A lytic bacteriophage is typically not capable of reproducing using the lysogenic cycle.

[0061] As used herein, the phrase “phage strain” refers to the deposited or sequenced phage, as described herein.

[0062] The bacteriophage have been deposited at the Polish Collection of microorganisms PCM), Institute of Immunology and Experimental Therapy, Polish Academy of Sciences, Ul. Weigla 12, 53-114 Wroclaw, Poland with the deposit numbers provided in Table 2, herein below.

[0063] The term “Klebsiella pneumoniae” relates to a species of bacteria of the Klebsiella genus. Klebsiella are gram-negative, nonmotile, and rod-shaped. It will be appreciated that the term “Klebsiella pneumonia” includes bacteria that are currently classified or will be reclassified as Klebsiella pneumoniae bacteria.

[0064] Exemplary strains of Klebsiella pneumonia that are infected by the phage strains of the present invention are those that are found in human specimens (e.g. stool specimens, saliva specimens, bronchial specimens, human sewage). Additional Klebsiella pneumonia bacteria that may be infected by the disclosed phages are detailed in WO/2019/048930, the contents of which are incorporated herein by reference.

[0065] In some embodiments, the bacteriophages provided herein are capable of lysing deleterious Klebsiella pneumonia bacteria that induce immune and/or inflammatory response(s). In some embodiments, the bacteriophages provided herein are capable of lysing deleterious Klebsiella pneumonia bacteria that disrupt the balance of immune homeostasis in the intestine, e.g., by enhancing the pro-inflammatory activity, ultimately resulting in chronic intestinal inflammation. In some embodiments, the bacteriophages provided herein are capable of lysing deleterious Klebsiella pneumonia bacteria that induce a T helper 1 (TH1) cell response. In some embodiments, the Klebsiella pneumonia bacteria to be lysed by the bacteriophage provided herein are in the lumen. In some embodiments, the Klebsiella pneumonia bacteria to be lysed by the bacteriophages provided herein are associated with the mucosa or epithelium. In some embodiments, the Klebsiella pneumonia bacteria to be lysed by the bacteriophages provided herein are in between the mucosal and submucosal layer in the ileum, e.g., in Crohn's disease.

[0066] In a particular embodiment, the phages described herein are capable of infecting at least one, two, three, four, five, six, seven, eight, nine or more Klebsiella pneumonia strains that infect a subject with IBD.

[0067] In a particular embodiment, the phages described herein are capable of infecting at least one, two, three, four, five, six, seven, eight, nine or more Klebsiella pneumonia strains present in the gastrointestinal tract of the subject (e.g. stomach, colon, small intestine, and/or mouth).

[0068] In a particular embodiment, the phages described herein are capable of infecting at least one, two, three, four, five, six, seven, eight, nine or more Klebsiella pneumonia strains that are causative for IBD.

[0069] Klebsiella spp. code for an extracellular capsule that is highly variable within the species. This capsule is a high molecular weight polysaccharide made up of different repeat units of oligosaccharides. Combinations of different oligosaccharides are referred to as serotypes. In K. pneumoniae there are 77 serologically defined serotypes, and numbered from K1 to K77 and more than 130 serotypes were identified computationally. The latter are noted from KL1 to KL130, and are usually referred as capsule locus types (or CLT).

[0070] According to a particular embodiment, the phages described herein are capable of infecting Klebsiella pneumonia bacterial strains having a capsule locus type as set forth in FIG. 2.

[0071] Also contemplated are progeny of the phages that have a genomic nucleic acid as set forth in SEQ ID NOs: 1-29, wherein the progeny is capable of infecting the same subspecies (or even strain) of Klebsiella pneumoniae as that which the parent bacteriophage having one of the above set forth genomic nucleic acid sequence infects. Such progeny may have genomes having a sequence at least 85% identical, at least 90% identical, at least 91% identical, at least 92% identical, at least 93% identical, at least 94% identical, at least 95% identical, 96% identical, 97% identical 98% identical, or 99% identical to the genome of the parent bacteriophage.

[0072] As used herein, the term “or progeny of the bacteriophage” refers to bacteriophages stemming from or derived from the strains identified herein.

[0073] Also contemplated are functional homologs of those that have a genomic nucleic acid sequence as set forth in SEQ ID NOs: 1-30, wherein the functionally homologous bacteriophage is capable of infecting essentially the same subspecies (or even strain) of Klebsiella pneumoniae as that which the bacteriophage having one of the above set forth genomic nucleic acid sequence infects.

[0074] As used herein “functional homolog” or “functionally homologous” or “variant” or grammatical equivalents as used herein refer to a bacteriophage with a genomic nucleic acid sequence different than that of the sequenced bacteriophage (i.e., at least one mutation) resulting in a bacteriophage that is endowed with substantially the same ensemble of biological activities (+/−10%, 20%, 40%, 50%, 60% when tested under the same conditions) as that of the sequenced bacteriophage and can be classified as infecting essentially the same strain or subspecies of bacteria based on known methods of species/strain classifications.

[0075] A bacteriophage “infects” bacteria if it either causes the bacteria to lyse or integrates its nucleic acid sequence into the bacterial genome.

[0076] According to a particular embodiment, the bacteriophage disclosed herein lyse their target bacteria.

[0077] According to some embodiments, the genomic nucleic acid sequence of the bacteriophages described herein is at least about 85%, at least about 90%, at least about 91%, at least about 92%, at least about 93%, at least about 94%, at least about 95%, at least about 96% least about 97%, at least about 97.1%, at least about 97.2%, at least about 97.3%, at least about 97.4%, at least about 97.5%, at least about 97.6%, at least about 97.7%, at least about 97.8%, at least about 97.9%, at least about 98%, at least about 98.1%, at least about 98.2%, at least about 98.3%, at least about 98.4%, at least about 98.5%, at least about 98.6%, at least about 98.7%, at least about 98.8%, at least about 98.9%, at least about 99%, at least about 99.1%, at least about 99.2%, at least about 99.3%, at least about 99.4%, at least about 99.5%, at least about 99.6%, at least about 99.7%, at least about 99.8%, at least about 99.8%, at least about 99.9%, at least about 99.95% 99.95%, at least about 99.99%, or more identical to the genomic sequence of the genomic sequences as set forth in SEQ ID NOs: 1, 2, 3, 4, 5, 6, 7, 8, 9, 10, 11, 12, 13, 14, 15, 16, 17, 18, 19, 20, 21, 22, 23, 24, 25, 26, 27, 28, 29 or 30.

[0078] In particular, the bacteriophage has a genomic nucleic acid sequence at least 95% identical (% homologous) to the nucleic acid sequence as set forth in SEQ ID NOs: 1, 2, 3, 4, 5, 6, 7, 8, 9, 10, 11, 12, 13, 14, 15, 16, 17, 18, 19, 20, 21, 22, 23, 24, 25, 26, 27, 28,29 or 30.

[0079] According to a specific embodiment, the bacteriophage has a genomic nucleic acid sequence at least 95% identical (% homologous) to the full length nucleic acid sequence as set forth in SEQ ID NOs: 1, 2, 3, 4, 5, 6, 7, 8, 9, 10, 11, 12, 13, 14, 15, 16, 17, 18, 19, 20, 21, 22, 23, 24, 25, 26, 27, 28, 29 or 30.

[0080] According to a specific embodiment, the bacteriophage comprises the essential genes of a bacteriophage selected from the bacteriophages listed in Table 2, wherein the essential genes are genes as set forth for the selected bacteriophage in Example 6.

[0081] As used herein, “percent homology”, “percent identity”, “sequence identity” or “identity” or grammatical equivalents as used herein in the context of two nucleic acid or polypeptide sequences includes reference to the residues in the two sequences which are the same when aligned. When percentage of sequence identity is used in reference to proteins it is recognized that residue positions which are not identical often differ by conservative amino acid substitutions, where amino acid residues are substituted for other amino acid residues with similar chemical properties (e.g. charge or hydrophobicity) and therefore do not change the functional properties of the molecule. Where sequences differ in conservative substitutions, the percent sequence identity may be adjusted upwards to correct for the conservative nature of the substitution. Sequences which differ by such conservative substitutions are considered to have “sequence similarity” or “similarity”. Means for making this adjustment are well-known to those of skill in the art. Typically this involves scoring a conservative substitution as a partial rather than a full mismatch, thereby increasing the percentage sequence identity. Thus, for example, where an identical amino acid is given a score of 1 and a non-conservative substitution is given a score of zero, a conservative substitution is given a score between zero and 1. The scoring of conservative substitutions is calculated, e.g., according to the algorithm of Henikoff S and Henikoff J G. [Amino acid substitution matrices from protein blocks. Proc. Natl. Acad. Sci. U.S.A. 1992, 89(22): 10915-9].

[0082] Percent identity can be determined using any homology comparison software, including for example, the BlastN software of the National Center of Biotechnology Information (NCBI) such as by using default parameters.

[0083] Other exemplary sequence alignment programs that may be used to determine % homology or identity between two sequences include, but are not limited to, the FASTA package (including rigorous (SSEARCH, LALIGN, GGSEARCH and GLSEARCH) and heuristic (FASTA, FASTX/Y, TFASTX/Y and FASTS/M/F) algorithms, the EMBOSS package (Needle, stretcher, water and matcher), the BLAST programs (including, but not limited to BLASTN, BLASTX, TBLASTX, BLASTP, TBLASTN), megablast and BLAT. In some embodiments, the sequence alignment program is BLASTN. For example, 95% homology refers to 95% sequence identity determined by BLASTN, by combining all non-overlapping alignment segments (BLAST HSPs), summing their numbers of identical matches and dividing this sum with the length of the shorter sequence.

[0084] In some embodiments, the sequence alignment program is a basic local alignment program, e.g., BLAST. In some embodiments, the sequence alignment program is a pairwise global alignment program. In some embodiments, the pairwise global alignment program is used for protein-protein alignments. In some embodiments, the pairwise global alignment program is Needle. In some embodiments, the sequence alignment program is a multiple alignment program. In some embodiments, the multiple alignment program is MAFFT. In some embodiments, the sequence alignment program is a whole genome alignment program. In some embodiments, the whole genome alignment is performed using BLASTN. In some embodiments, BLASTN is utilized without any changes to the default parameters.

[0085] According to some embodiments of the invention, the identity is a global identity, i.e., an identity over the entire nucleic acid sequences of the invention and not over portions thereof.

[0086] According to an additional or alternative embodiment, a functional homolog is determined as the average nucleotide identity (ANI), which detects the DNA conservation of the core genome (Konstantinidis K and Tiedje J M, 2005, Proc. Natl. Acad. Sci. USA 102: 2567-2592). In some embodiments, the ANI between the functional homolog and the deposited bacteriophage (or that having a genome as set forth in any one of SEQ ID NO: 1, 2, 3, 4, 5, 6, 7, 8, 9, 10, 11, 12, 13, 14, 15, 16, 17, 18, 19, 20, 21, 22, 23, 24, 25, 26, 27, 28, 29 or 30 is of at least about 95%, at least about, 96%, at least about 97%, at least about 98%, at least about 99%, at least about 99.1%, at least about 99.5%, at least about 99.6%, at least about 99.7%, at least about 99.8%, at least about 99.9% or more.

[0087] According to an additional or alternative embodiment, a functional homolog is determined by the degree of relatedness between the functional homolog and the bacteriophage having a genome as set forth in any one of SEQ ID NO: 1, 2, 3, 4, 5, 6, 7, 8, 9, 10, 11, 12, 13, 14, 15, 16, 17, 18, 19, 20, 21, 22, 23, 24, 25, 26, 27, 28, 29 or 30 determined as the Tetranucleotide Signature Frequency Correlation Coefficient, which is based on oligonucleotide frequencies (Bohlin J. et al. 2008, BMC Genomics, 9:104). In some embodiments, the Tetranucleotide Signature Frequency Correlation coefficient between the variant and the bacteriophage having a genome as set forth in any one of SEQ ID NO: 1, 2, 3, 4, 5, 6, 7, 8, 9, 10, 11, 12, 13, 14, 15, 16, 17, 18, 19, 20, 21, 22, 23, 24, 25, 26, 27, 28 or 29 is of about 0.99, 0.999 or more.

[0088] According to an additional or alternative embodiment, the degree of relatedness between the functional homolog and the bacteriophage having a genome as set forth in any one of SEQ ID NO: 1, 2, 3, 4, 5, 6, 7, 8, 9, 10, 11, 12, 13, 14, 15, 16, 17, 18, 19, 20, 21, 22, 23, 24, 25, 26, 27, 28, 29 or 30, is determined as the degree of similarity obtained when analyzing the genomes of the parent and of the variant bacteriophage by Pulsed-field gel electrophoresis (PFGE) using one or more restriction endonucleases. The degree of similarity obtained by PFGE can be measured by the Dice similarity coefficient. In some embodiments, the Dice similarity coefficient between the variant and the bacteriophage having a genome as set forth in any one of SEQ ID NO: 1, 2, 3, 4, 5, 6, 7, 8, 9, 10, 11, 12, 13, 14, 15, 16, 17, 18, 19, 20, 21, 22, 23, 24, 25, 26, 27, 28, 29 or 30 is of at least about 96%, at least about 97%, at least about 98%, at least about 99%, at least about 99.1%, at least about 99.5%, at least about 99.6%, at least about 99.7%, at least about 99.8%, at least about 99.9% or more.

[0089] According to an additional or alternative embodiment, the degree of relatedness between the functional homolog and the bacteriophage having a genome as set forth in any one of SEQ ID NO: 11, 2, 3, 4, 5, 6, 7, 8, 9, 10, 11, 12, 13, 14, 15, 16, 17, 18, 19, 20, 21, 22, 23, 24, 25, 26, 27, 28, 29 or 30 is determined by the Pearson correlation coefficient obtained by comparing the genetic profiles of both phages obtained by repetitive extragenic palindromic element-based PCR (REP-PCR) (see e.g. Chou and Wang, Int J Food Microbiol. 2006, 110:135-48). In some embodiments, the Pearson correlation coefficient obtained by comparing the REP-PCR profiles of the variant and the above described (e.g. deposited phage) is of at least about 0.99, at least about 0.999 or more—see for example bmcmicrobioldotbiomedcentraldotcom/articles/10.1186/s12866-020-01770-2.

[0090] According to an additional or alternative embodiment, the degree of relatedness between the functional homolog and the bacteriophage having a genome as set forth in any one of SEQ ID NO: 11, 2, 3, 4, 5, 6, 7, 8, 9, 10, 11, 12, 13, 14, 15, 16, 17, 18, 19, 20, 21, 22, 23, 24, 25, 26, 27, 28, 29 or 30 is defined by the linkage distance obtained by comparing the genetic profiles of both phages obtained by Multi-locus sequence typing (MLST) (see e.g. Maiden, M. C., 1998, Proc. Natl. Acad. Sci. USA 95:3140-3145). In some embodiments, the linkage distance obtained by MLST of the functional homolog and the phage having a genome as set forth in any one of SEQ ID NO: 11, 2, 3, 4, 5, 6, 7, 8, 9, 10, 11, 12, 13, 14, 15, 16, 17, 18, 19, 20, 21, 22, 23, 24, 25, 26, 27, 28, 29 or 30, is of at least about 0.99, at least about 0.999 or more.

[0091] According to an additional or alternative embodiment, the functional homolog comprises a functionally conserved gene or a fragment thereof (i.e. an essential gene) e.g., an integrase gene, a polymerase gene, a capsid protein assembly gene, a DNA terminase, a tail fiber gene, or a repressor gene that is at least about 97%, at least about 98%, at least about 99%, at least about 99.1%, at least about 99.5%, at least about 99.6%, at least about 99.7%, at least about 99.8%, at least about 99.9%, or more identical to that of the bacteriophage having a genome as set forth in any one of SEQ ID NO: 11, 2, 3, 4, 5, 6, 7, 8, 9, 10, 11, 12, 13, 14, 15, 16, 17, 18, 19, 20, 21, 22, 23, 24, 25, 26, 27, 28, 29 or 30.

[0092] For each of the disclosed bacteriophages, Example 6 provides the gene name of their essential genes.

[0093] According to an additional or alternative embodiment, the functional homolog is defined by a comparison of the coding sequence (gene) order.

[0094] According to an additional or alternative embodiment, the functional homolog is defined by a comparison of order of non-coding sequences.

[0095] According to an additional or alternative embodiment, the functional homolog is defined by a comparison of order of coding and non-coding sequences.

[0096] According to some embodiments of the invention, the combined coding region of the functional homolog is such that it maintains the original order of the coding regions as within the genomic sequence of the bacteriophage having a genome as set forth in any one of SEQ ID NO: 11, 2, 3, 4, 5, 6, 7, 8, 9, 10, 11, 12, 13, 14, 15, 16, 17, 18, 19, 20, 21, 22, 23, 24, 25, 26, 27, 28, 29 or 30, yet without the non-coding regions.

[0097] For example, in case the genomic sequence has the following coding regions, A, B, C, D, E, F, G, each flanked by non-coding sequences (e.g., regulatory elements, and the like), the combined coding region will include a single nucleic acid sequence having the A+B+C+D+E+F+G coding regions combined together while maintaining the original order of their genome, yet without the non-coding sequences.

[0098] According to some embodiments of the invention, the combined non-coding region of the functional homolog is such that it maintains the original order of the non-coding regions as within the genomic sequence of the bacteriophage having a genome as set forth in any one of SEQ ID NO: 11, 2, 3, 4, 5, 6, 7, 8, 9, 10, 11, 12, 13, 14, 15, 16, 17, 18, 19, 20, 21, 22, 23, 24, 25, 26, 27, 28, 29 or 30, yet without the coding regions as originally present in the original bacteriophage.

[0099] According to some embodiments of the invention, the combined non-coding region and coding region (i.e., the genome) of the functional homolog is such that it maintains the original order of the coding and non-coding regions as within the genomic sequence of the bacteriophage having a genome as set forth in any one of SEQ ID NO: 11, 2, 3, 4, 5, 6, 7, 8, 9, 10, 11, 12, 13, 14, 15, 16, 17, 18, 19, 20, 21, 22, 23, 24, 25, 26, 27, 28, 29 or 30.

[0100] As used herein “maintains” relate to at least about 90%, 91%, 92%, 93%, 94%, 95%, 96%, 97%, 98%, 99% or 100% of the coding and/or non-coding regions of the functional homolog compared to the bacteriophage having a genome as set forth in any one of SEQ ID NO: 11, 2, 3, 4, 5, 6, 7, 8, 9, 10, 11, 12, 13, 14, 15, 16, 17, 18, 19, 20, 21, 22, 23, 24, 25, 26, 27, 28, 29 or 30.

[0101] According to an additional or alternative embodiment, the functional homolog is defined by a comparison of gene content.

[0102] According to a specific embodiment, the functional homolog comprises a combined coding region at least about 90%, at least about 91%, at least about 92%, at least about 93%, at least about 94%, at least about 95%, at least about 96%, at least about 97%, at least about 98%, at least about 99%, or more (e.g., 100%) identical to the combined coding region existing in genome of the bacteriophage having a genome as set forth in any one of SEQ ID NO: 11, 2, 3, 4, 5, 6, 7, 8, 9, 10, 11, 12, 13, 14, 15, 16, 17, 18, 19, 20, 21, 22, 23, 24, 25, 26, 27, 28, 29 or 30.

[0103] As used herein “combined coding region” refers to a nucleic acid sequence including all of the coding regions of the original bacteriophage yet without the non-coding regions of the original bacteriophage.

[0104] In one embodiment, the bacteriophages show up to 85%, 86%, 87%, 88%, 89%, 90%, 91%, 92%, 93%, 94%, 95%, 96%, 97%, 98%, 99% sequence identity with the bacteriophages disclosed herein and share at least one of the following characteristics—similar host range; similar type of infectivity (i.e. lytic or temperate).

[0105] In another embodiment, the bacteriophages show up to 85%, 86%, 87%, 88%, 89%, 90%, 91%, 92%, 93%, 94%, 95%, 96%, 97%, 98%, 99% sequence identity with the bacteriophages disclosed herein and share both of the following characteristics—similar host range; similar type of infectivity.

[0106] Additional bioinformatics methods that may be used to determine relatedness between two phage genomes include Nucmer and Minimap, both of which are alignment based tools; Win-zip, Jacard distance and MinHash, each of which are information based tools; and Codon usage similarity, pathway similarity and protein motif similarity.

[0107] As used herein, “host range” refers to the bacteria that are susceptible to infection by a particular phage. The host range of a phage may include, but is not limited to, a strain, a subspecies, a species, a genus, or multiple genera of bacteria.

[0108] Phage isolates may be prepared and phenotyped using methods known in the art, e.g., a plaque assay, liquid media assay, solid media assay. In some embodiments, the solid media assays to quantify and isolate phage are based on plaque assays (S. T. Abedon et al., Methods in Molecular Biology 2009 (Clifton, N.J.), 501, 161-74), ranging from efficiency of plating (EOP) (E. Kutter, Methods in Molecular Biology 2009 (Clifton, N.J.), 501, 141-9) to spot testing (P. Hyman et al., Advances in Applied Microbiology (1st ed., Vol. 70, pp. 217-48) 2010. Elsevier Inc.). In some embodiments, the plate format used for the plaque assay can be modified, e.g., from a petri dish to a 48-well plate.

[0109] In some embodiments, a double-layer plaque assay is used to phenotype bacteriophage isolates. For example, a starter culture of 4 mL BHIS may be inoculated with 50-100 colonies from a plate. This culture may be incubated at 37° C. for 16 hours in an anaerobic environment. A volume of 200 μL of this culture may be mixed with 100 μL of a phage-containing sample (or medium only control) and incubated for 15 minutes. 5 mL of BHIS top agar (pre-molten 0.4% agar BHIS supplemented with 1 mM Ca²⁺, Mn²⁺ and Mg²⁺ ions may be added), and the mixture may be poured over a BHIS bottom agar plate (1.5% agar BHIS). The plates may be allowed to gel at room temperature, and then incubated for 16 hours at 37° C. in anaerobic environment until plaques are identified.

[0110] In some embodiments, a modified spot drop assay is used to phenotype bacteriophage isolates. For example, a starter culture of 4 mL BHIS may be inoculated with 50-100 colonies from a plate. This culture may be incubated at 37° C. for 16 hours in an anaerobic environment. A volume of 200 μL of this culture may be mixed with 5 mL of BHIS top agar (pre-molten 0.4% agar BHIS supplemented with 1 mM Ca²⁺, Mn²⁺ and Mg²⁺ ions may be added), and the mixture may be poured over a BHIS bottom agar plate (1.5% agar BHIS). The plates may be allowed to gel at room temperature, and then incubated for 30 min at 37 C in anaerobic environment. At this stage, 5 μL of samples containing phage or media only as control may be dropped on the plate, left to absorb, and then may be incubated for 16 hours until plaques are visible for counting.

[0111] In some embodiments, a liquid media assay is used to phenotype the bacteriophage. In some embodiments, liquid-based phage infection assays follow the time-course of infection and can provide more than quantitative end-points of infection as compared to the solid-phase plaque assays. In some embodiments, by mixing phage with bacteria in liquid medium, then following the turbidity of the culture over time, one can discern finer differences (e.g., a delay in the time of cell lysis) between how different bacterial strains interact with the phage.

[0112] In some embodiments, a liquid-based phage infection assays is used to measure the time duration from the beginning of the experiment, when the bacteria and phages are mixed together until the host bacteria develops resistance to the phages (presumably by mutation). This period is also known as time-to-mutant (TTM). Such TTM assay was used to produce the results presented in FIG. 5.

[0113] In some embodiments, the TTM is declared synergistic when the OD reading reaches a predetermined threshold (e.g. 0.1 OD600). Then synergistic redundancy effect is concluded if the TTM of a combination (e.g. X,Y) is for example 50% longer than the longer TTM of the individual member phages (e.g. the TTM of X by itself and TTM of Y by itself).

[0114] In one embodiment, the synergistic effect is defined as above 10%, 20%, 30%, 40%, 50%, 60%, 70%, 80% above the longer individual phage member TTM.

[0115] In some embodiments, the liquid media assay allows for high-throughput measurements by using 96-well plates and reading optical density in a plate reader.

[0116] For example, a bacterial strain may be grown for 16 hours until an OD₆₀₀ of about 1.5-2. This culture may then be diluted using BHIS medium (which may be supplemented with 0.1% g/w L-cysteine) to a starting optical density, typically between 0.03 and 0.05 OD₆₀₀ and kept for grow for 6 additional hours. A volume of 200 μL of culture may then be dispensed into the wells of a Nunclon flat-bottomed 96-well plate. 10 μL of a sample containing phage or 10 μL of medium as control may be added to each well. The wells may be covered with 50 μL of mineral oil to limit evaporation, and a thin sterile optically transparent polyester film may be added to keep the culture sterile and anaerobic. Optical density measurements may be carried out every 15 minutes, e.g., in a Tecan Infinite M200 plate reader connected to a Tecan EV075 robot. Between measurements, the plate may be incubated while shaking at 37° C., e.g., inside the EV075 incubator.

[0117] In some embodiments, infectivity is determined by the plaque presence in a solid assay only. In some embodiments, infectivity is determined by a slower bacterial growth (e.g. compared to a control with bacteria only and no phage) in a liquid assay only. In some embodiments, infectivity is determined by both the liquid assay and the solid assay.

[0118] The bacteriophages described herein are typically present in a preparation in which their prevalence (i.e., concentration) is enriched over that (exceeds that) found in nature.

[0119] The term “preparation” refers to a composition in which the prevalence of bacteriophage is enriched over that found in nature. Since bacteriophages infect bacterial cells, they may be found in specimens or samples which are rich in bacteria—e.g. environmental samples such as sewage, wastewater and biological samples including feces. According to some embodiments of the invention, the preparation comprises less than 50 microbial species, e.g., bacteria and fungi—e.g. less than 40 bacterial species, less than 30 bacterial species, less than 20 bacterial species, less than 10 bacterial species, less than 5 bacterial species, less than 4 bacterial species, less than 3 bacterial species, less than 2 bacterial species or even devoid completely of bacteria.

[0120] According to a particular embodiment, the preparation comprises a single strain of bacteriophage (or a functional homolog thereof), no more than two different bacteriophage strains (or functional homologs thereof), no more than three different bacteriophage strains (or functional homologs thereof), no more than four different bacteriophage strains (or functional homologs thereof), no more than five different bacteriophage strains (or functional homologs thereof), no more than six different bacteriophage strains (or functional homologs thereof), no more than seven different bacteriophage strains (or functional homologs thereof), no more than eight different bacteriophage strains (or functional homologs thereof), no more than nine different bacteriophage strains (or functional homologs thereof), or no more than ten different bacteriophage strains (or functional homologs thereof).

[0121] In one embodiment, the preparation comprises a plurality of phage strains when at least one of the phage strains is KP10-11 (having the genome sequence at least 90% identical to the sequence as set forth in SEQ ID NO: 1).

[0122] In another embodiment, the preparation comprises a plurality of phage strains when at least one of the phage strains is KP10-48 (having the genome sequence at least 90% identical to the sequence as set forth in SEQ ID NO: 2).

[0123] In another embodiment, the preparation comprises a plurality of phage strains when at least one of the phage strains is 395-D2-3-2 (having the genome sequence at least 90% identical to the sequence as set forth in SEQ ID NO: 3).

[0124] In one embodiment, the preparation comprises at least two different phage strains when at least one of the phage strains is KP10-11 (having the genome sequence at least 90% identical to the sequence as set forth in SEQ ID NO: 1) and the other of the phage strains is KP10-48 (having the genome sequence at least 90% identical to the sequence as set forth in SEQ ID NO: 2).

[0125] In one embodiment, the preparation comprises at least three different phage strains when at least one of the phage strains is KP10-11 (having the genome sequence at least 90% identical to the sequence as set forth in SEQ ID NO: 1), the second of the phage strains is KP10-48 (having the genome sequence at least 90% identical to the sequence as set forth in SEQ ID NO: 2) and the third of the phage strains is 395-D2-3-2 (having the genome sequence at least 90% identical to the sequence as set forth in SEQ ID NO: 3).

[0126] Exemplary combinations of core phages in a single composition are provided in Table 1 herein below.

[0127] Additional contemplated combinations are provided in Example 2, Example 3 and Example 4 herein below.

TABLE 1

| Phage 1 | Phage 2 | Phage 3 |
|---|---|---|
| KP10-11 | KP10-48 | 395-D2-3-2 |
| KP10-11 | KP10-48 | KP10-85 |
| KP10-11 | KP10-48 | 395-D2-3-1 |
| KP10-11 | KP10-85 | 395-D2-3-1 |
| KP10-48 | KP10-85 | 395-D2-3-2 |
| KP10-11 | KP10-85 | KP10-91 |
| KP10-11 | 395-D2-3-1 | KP10-91 |
| KP10-11 | 395-D2-3-2 | KP10-91 |

[0128] One exemplary cocktail contemplated by the present inventors is one which comprises the following phages: KP10-11, KP10-48, KP10-85, 395-D2-3-1, 395-D2-3-2 and KP10-91.

[0129] Another exemplary cocktail contemplated by the present inventors is one which comprises the following phages: CT-227-KP4M1-20, CT-227-KP4M1-11, KP10-89 and KPL6a-30.

[0130] Another exemplary cocktail contemplated by the present inventors is one which comprises the following phages: KP10-11, KP10-85 and 395-D2-3-1 Another exemplary cocktail contemplated by the present inventors is one which comprises the following phages: KP10-11, KP10-85 and 395-D2-3-2.

[0131] Another exemplary cocktail contemplated by the present inventors is one which comprises the following phages: KP10-11, 395-D2-3-1 and KP10-91.

[0132] In one embodiment, the combination is selected such that more than 20% of the different strains of bacteria of a mixed population of Klebsiella pneumonia (e.g. comprising more than 100 different Klebsiella pneumonia strains, more than 200 different Klebsiella pneumonia strains and preferably more than 300 different Klebsiella pneumonia strains) are targeted (and lysed). In one embodiment, the combination is selected such that more than 20% of all the strains of Klebsiella pneumonia which infect humans are targeted and lysed.

[0133] In another embodiment, the combination is selected such that at least 100, 200, 300, 400, 500, 600, 700, 800, 900 or 1000 different Klebsiella pneumonia strains are targeted.

[0134] In one embodiment, the combination is selected such that more than 30% of the different strains of bacteria of a mixed population of Klebsiella pneumonia (e.g. comprising more than 100 different Klebsiella pneumonia strains, more than 200 different Klebsiella pneumonia strains and preferably more than 300 different Klebsiella pneumonia strains) are targeted (and lysed). In one embodiment, the combination is selected such that more than 30% of all the strains of Klebsiella pneumonia which infect humans are targeted and lysed.

[0135] In one embodiment, the combination is selected such that more than 40% of the different strains of bacteria of a mixed population of Klebsiella pneumonia (e.g. comprising more than 100 different Klebsiella pneumonia strains, more than 200 different Klebsiella pneumonia strains and preferably more than 300 different Klebsiella pneumonia strains) are targeted (and lysed). In one embodiment, the combination is selected such that more than 40% of all the strains of Klebsiella pneumonia which infect humans are targeted and lysed.

[0136] In one embodiment, the combination is selected such that more than 45% of the different strains of bacteria of a mixed population of Klebsiella pneumonia (e.g. comprising more than 100 different Klebsiella pneumonia strains, more than 200 different Klebsiella pneumonia strains and preferably more than 300 different Klebsiella pneumonia strains) are targeted (and lysed). In one embodiment, the combination is selected such that more than 45% of all the strains of Klebsiella pneumonia which infect humans are targeted and lysed.

[0137] In one embodiment, the combination is selected such that more than 50% of the different strains of bacteria of a mixed population of Klebsiella pneumonia (e.g. comprising more than 100 different Klebsiella pneumonia strains, more than 200 different Klebsiella pneumonia strains and preferably more than 300 different Klebsiella pneumonia strains) are targeted (and lysed). In one embodiment, the combination is selected such that more than 50% of all the strains of Klebsiella pneumonia which infect humans are targeted and lysed.

[0138] In one embodiment, the combination is selected such that more than 55% of the different strains of bacteria of a mixed population of Klebsiella pneumonia (e.g. comprising more than 100 different Klebsiella pneumonia strains, more than 200 different Klebsiella pneumonia strains and preferably more than 300 different Klebsiella pneumonia strains) are targeted (and lysed). In one embodiment, the combination is selected such that more than 55% of all the strains of Klebsiella pneumonia which infect humans are targeted and lysed.

[0139] In one embodiment, the combination is selected such that more than 60% of the different strains of bacteria of a mixed population of Klebsiella pneumonia (e.g. comprising more than 100 different Klebsiella pneumonia strains, more than 200 different Klebsiella pneumonia strains and preferably more than 300 different Klebsiella pneumonia strains) are targeted (and lysed). In one embodiment, the combination is selected such that more than 60% of all the strains of Klebsiella pneumonia which infect humans are targeted and lysed.

[0140] In one embodiment, the combination is selected such that more than 65% of the different strains of bacteria of a mixed population of Klebsiella pneumonia (e.g. comprising more than 100 different Klebsiella pneumonia strains, more than 200 different Klebsiella pneumonia strains and preferably more than 300 different Klebsiella pneumonia strains) are targeted (and lysed). In one embodiment, the combination is selected such that more than 65% of all the strains of Klebsiella pneumonia which infect humans are targeted and lysed.

[0141] In one embodiment, the combination is selected such that more than 70% of the different strains of bacteria of a mixed population of Klebsiella pneumonia (e.g. comprising more than 100 different Klebsiella pneumonia strains, more than 200 different Klebsiella pneumonia strains and preferably more than 300 different Klebsiella pneumonia strains) are targeted (and lysed). In one embodiment, the combination is selected such that more than 70% of all the strains of Klebsiella pneumonia which infect humans are targeted and lysed.

[0142] In one embodiment, the combination is selected such that more than 75% of the different strains of bacteria of a mixed population of Klebsiella pneumonia (e.g. comprising more than 100 different Klebsiella pneumonia strains, more than 200 different Klebsiella pneumonia strains and preferably more than 300 different Klebsiella pneumonia strains) are targeted (and lysed). In one embodiment, the combination is selected such that more than 75% of all the strains of Klebsiella pneumonia which infect humans are targeted and lysed.

[0143] In one embodiment, the combination is selected such that more than 80% of the different strains of bacteria of a mixed population of Klebsiella pneumonia (e.g. comprising more than 100 different Klebsiella pneumonia strains, more than 200 different Klebsiella pneumonia strains and preferably more than 300 different Klebsiella pneumonia strains) are targeted (and lysed). In one embodiment, the combination is selected such that more than 80% of all the strains of Klebsiella pneumonia which infect humans are targeted and lysed.

[0144] In one embodiment, the combination is selected such that more than 85% of the different strains of bacteria of a mixed population of Klebsiella pneumonia (e.g. comprising more than 100 different Klebsiella pneumonia strains, more than 200 different Klebsiella pneumonia strains and preferably more than 300 different Klebsiella pneumonia strains) are targeted (and lysed). In one embodiment, the combination is selected such that more than 85% of all the strains of Klebsiella pneumonia which infect humans are targeted and lysed.

[0145] In one embodiment, the combination is selected such that more than 90% of the different strains of bacteria of a mixed population of Klebsiella pneumonia (e.g. comprising more than 100 different Klebsiella pneumonia strains, more than 200 different Klebsiella pneumonia strains and preferably more than 300 different Klebsiella pneumonia strains) are targeted (and lysed). In one embodiment, the combination is selected such that more than 90% of all the strains of Klebsiella pneumonia which infect humans are targeted and lysed.

[0146] The combinations described herein can be selected to include phages which have overlapping host coverages. The host coverages can be defined in terms of bacterial strain classification, bacterial capsule type and/or Multi-locus sequence typing (MLST)—see (github(dot)com/katholt/Kleborate).

[0147] In one embodiment, the combination is selected such that more than 10% of the different strains of bacteria of a mixed population of Klebsiella pneumonia (e.g. comprising more than 100 different Klebsiella pneumonia strains, more than 200 different Klebsiella pneumonia strains and preferably more than 300 different Klebsiella pneumonia strains) are targeted by more than one phage strain (e.g. at least 2 phage strains of the combination, at least 3 phage strains of the combination, at least 4 phage strains of the combination or at least 5 phage strains of the combination). In one embodiment, the combination is selected such that more than 10% of all the strains of Klebsiella pneumonia which infect humans are targeted and lysed by more than one phage strain (e.g. at least 2 phage strains of the combination, at least 3 phage strains of the combination, at least 4 phage strains of the combination or at least 5 phage strains of the combination).

[0148] In another embodiment, the combination is selected such that at least 50, 100, 150, 200, 250, 300 specific Klebsiella pneumonia strains are targeted by more than 1 (e.g. 2, 3, 4 or 5) phage strain of the combination.

[0149] In another embodiment, the combination is selected such that more than 15% of the different strains of bacteria of a mixed population of Klebsiella pneumonia (e.g. comprising more than 100 different Klebsiella pneumonia strains, more than 200 different Klebsiella pneumonia strains and preferably more than 300 different Klebsiella pneumonia strains) are targeted by more than one phage strain (e.g. at least 2 phage strains of the combination, at least 3 phage strains of the combination, at least 4 phage strains of the combination or at least 5 phage strains of the combination). In one embodiment, the combination is selected such that more than 15% of all the strains of Klebsiella pneumonia which infect humans are targeted and lysed by more than one phage strain (e.g. at least 2 phage strains of the combination, at least 3 phage strains of the combination, at least 4 phage strains of the combination or at least 5 phage strains of the combination).

[0150] In another embodiment, the combination is selected such that more than 20% of the different strains of bacteria of a mixed population of Klebsiella pneumonia (e.g. comprising more than 100 different Klebsiella pneumonia strains, more than 200 different Klebsiella pneumonia strains and preferably more than 300 different Klebsiella pneumonia strains) are targeted by more than one phage strain (e.g. at least 2 phage strains of the combination, at least 3 phage strains of the combination, at least 4 phage strains of the combination or at least 5 phage strains of the combination). In one embodiment, the combination is selected such that more than 20% of all the strains of Klebsiella pneumonia which infect humans are targeted and lysed by more than one phage strain (e.g. at least 2 phage strains of the combination, at least 3 phage strains of the combination, at least 4 phage strains of the combination or at least 5 phage strains of the combination).

[0151] In another embodiment, the combination is selected such that more than 25% of the different strains of bacteria of a mixed population of Klebsiella pneumonia (e.g. comprising more than 100 different Klebsiella pneumonia strains, more than 200 different Klebsiella pneumonia strains and preferably more than 300 different Klebsiella pneumonia strains) are targeted by more than one phage strain (e.g. at least 2 phage strains of the combination, at least 3 phage strains of the combination, at least 4 phage strains of the combination or at least 5 phage strains of the combination). In one embodiment, the combination is selected such that more than 25% of all the strains of Klebsiella pneumonia which infect humans are targeted and lysed by more than one phage strain (e.g. at least 2 phage strains of the combination, at least 3 phage strains of the combination, at least 4 phage strains of the combination or at least 5 phage strains of the combination).

[0152] In another embodiment, the combination is selected such that more than 30% of the different strains of bacteria of a mixed population of Klebsiella pneumonia (e.g. comprising more than 100 different Klebsiella pneumonia strains, more than 200 different Klebsiella pneumonia strains and preferably more than 300 different Klebsiella pneumonia strains) are targeted by more than one phage strain (e.g. at least 2 phage strains of the combination, at least 3 phage strains of the combination, at least 4 phage strains of the combination or at least 5 phage strains of the combination). In one embodiment, the combination is selected such that more than 30% of all the strains of Klebsiella pneumonia which infect humans are targeted and lysed by more than one phage strain (e.g. at least 2 phage strains of the combination, at least 3 phage strains of the combination, at least 4 phage strains of the combination or at least 5 phage strains of the combination).

[0153] In another embodiment, the combination is selected such that more than 35% of the different strains of bacteria of a mixed population of Klebsiella pneumonia (e.g. comprising more than 100 different Klebsiella pneumonia strains, more than 200 different Klebsiella pneumonia strains and preferably more than 300 different Klebsiella pneumonia strains) are targeted by more than one phage strain (e.g. at least 2 phage strains of the combination, at least 3 phage strains of the combination, at least 4 phage strains of the combination or at least 5 phage strains of the combination). In one embodiment, the combination is selected such that more than 35% of all the strains of Klebsiella pneumonia which infect humans are targeted and lysed by more than one phage strain (e.g. at least 2 phage strains of the combination, at least 3 phage strains of the combination, at least 4 phage strains of the combination or at least 5 phage strains of the combination).

[0154] In another embodiment, the combination is selected such that more than 40% of the different strains of bacteria of a mixed population of Klebsiella pneumonia (e.g. comprising more than 100 different Klebsiella pneumonia strains, more than 200 different Klebsiella pneumonia strains and preferably more than 300 different Klebsiella pneumonia strains) are targeted by more than one phage strain (e.g. at least 2 phage strains of the combination, at least 3 phage strains of the combination, at least 4 phage strains of the combination or at least 5 phage strains of the combination). In one embodiment, the combination is selected such that more than 40% of all the strains of Klebsiella pneumonia which infect humans are targeted and lysed by more than one phage strain (e.g. at least 2 phage strains of the combination, at least 3 phage strains of the combination, at least 4 phage strains of the combination or at least 5 phage strains of the combination).

[0155] In another embodiment, the combination is selected such that more than 45% of the different strains of bacteria of a mixed population of Klebsiella pneumonia (e.g. comprising more than 100 different Klebsiella pneumonia strains, more than 200 different Klebsiella pneumonia strains and preferably more than 300 different Klebsiella pneumonia strains) are targeted by more than one phage strain (e.g. at least 2 phage strains of the combination, at least 3 phage strains of the combination, at least 4 phage strains of the combination or at least 5 phage strains of the combination). In one embodiment, the combination is selected such that more than 45% of all the strains of Klebsiella pneumonia which infect humans are targeted and lysed by more than one phage strain (e.g. at least 2 phage strains of the combination, at least 3 phage strains of the combination, at least 4 phage strains of the combination or at least 5 phage strains of the combination).

[0156] In another embodiment, the combination is selected such that more than 50% of the different strains of bacteria of a mixed population of Klebsiella pneumonia (e.g. comprising more than 100 different Klebsiella pneumonia strains, more than 200 different Klebsiella pneumonia strains and preferably more than 300 different Klebsiella pneumonia strains) are targeted by more than one phage strain (e.g. at least 2 phage strains of the combination, at least 3 phage strains of the combination, at least 4 phage strains of the combination or at least 5 phage strains of the combination). In one embodiment, the combination is selected such that more than 50% of all the strains of Klebsiella pneumonia which infect humans are targeted and lysed by more than one phage strain (e.g. at least 2 phage strains of the combination, at least 3 phage strains of the combination, at least 4 phage strains of the combination or at least 5 phage strains of the combination).

[0157] It will be appreciated that, throughout the specification, when a phage is specifically named, the present invention also considers those phage that have at least 90% identity to the sequence of their genome, wherein the phage has a similar host range.

[0158] According to a specific embodiment, the preparation comprises at least about 10⁶ PFU, 10⁷ PFU, 10⁸ PFU, 10⁹ PFU, or even 10¹⁰ PFU or more of the above described (e.g. deposited) bacteriophages or functional homolog of same or progeny of same.

[0159] The bacteriophages described herein may be genetically modified such that their genomes include a heterologous sequence.

[0160] In one embodiment, the heterologous sequence serves as a marker signifying whether transformation is successful—e.g. a barcode sequence.

[0161] In another embodiment, the heterologous sequence encodes a therapeutic or diagnostic agent (also referred to herein as a payload). The therapeutic or diagnostic agent may be a nucleic acid (e.g. RNA silencing agent), a peptide or a protein. The therapeutic agent is typically selected according to the disease which is to be treated. Thus, for example if the bacteriophage is to be used for treating diseases associated with Klebsiella pneumoniae infection, the therapeutic agent is typically one that is known to be useful for treating that disease.

[0162] As used herein, the term “RNA silencing agent” refers to an RNA which is capable of specifically inhibiting or “silencing” the expression of a target gene. In certain embodiments, the RNA silencing agent is capable of preventing complete processing (e.g., the full translation and/or expression) of an mRNA molecule through a post-transcriptional silencing mechanism. RNA silencing agents include noncoding RNA molecules, for example RNA duplexes comprising paired strands, as well as precursor RNAs from which such small non-coding RNAs can be generated. Exemplary RNA silencing agents include dsRNAs such as siRNAs, miRNAs and shRNAs. In one embodiment, the RNA silencing agent is capable of inducing RNA interference. In another embodiment, the RNA silencing agent is capable of mediating translational repression. According to an embodiment of the invention, the RNA silencing agent is specific to the target RNA and does not cross inhibit or silence a gene or a splice variant which exhibits 99% or less global homology to the target gene, e.g., less than 98%, 97%, 96%, 95%, 94%, 93%, 92%, 91%, 90%, 89%, 88%, 87%, 86%, 85%, 84%, 83%, 82%, 81% global homology to the target gene.

[0163] Exemplary RNA silencing agents include but are not limited to siRNA, shRNA, miRNA and guide RNA (gRNA).

[0164] The therapeutic agent may be a bacterial protein or peptide (e.g., a small bacterial peptide that could act as a vaccine in the subject treated with the bacteriophage), a therapeutic protein or peptide (e.g., a cytokine, e.g., IL-15), a soluble peptide or protein ligand (e.g., a STING agonist or TRAIL), an antibody or an antibody fragment that recognizes a virulent or disease-causing antigen or is useful in an immunotherapy (e.g., a checkpoint inhibitor), an enzyme that when expressed produces a therapeutic useful product (e.g., a bacterial enzyme or metabolic cassette that produces a therapeutically useful bacterial metabolite or other bacterial antigen; a bacterial enzyme that produces LPS or causes cleavage of LPS from the outer membrane of gram negative bacteria), a shared tumor antigen or an enzyme that when expressed produces a shared tumor antigen, a unique tumor antigen or neoantigen or an enzyme that when expressed produces a unique tumor antigen or neoantigen,

[0165] In another embodiment, the therapeutic agent is an agent that is therapeutic in the treatment of inflammatory bowel disease.

[0166] According to another embodiment, the therapeutic agent is an immune modulating agent.

[0167] Examples of immune modulating agents include immunomodulatory cytokines, including but not limited to, IL-2, IL-15, IL-7, IL-21, GM-CSF as well as any other cytokines that are capable of further enhancing immune responses; immunomodulatory antibodies, including but not limited to, anti-CTLA4, anti-CD40, anti-41BB, anti-OX40, anti-PD1 and anti-PDL1.

[0168] Examples of diagnostic agents include fluorescent proteins or enzymes producing a colorimetric reaction. Exemplary proteins that generate a detectable signal include, but are not limited to green fluorescent protein (Genbank Accession No. AAL33912), alkaline phosphatase (Genbank Accession No. AAK73766), peroxidase (Genbank Accession No. NP_568674), histidine tag (Genbank Accession No. AAK09208), Myc tag (Genbank Accession No. AF329457), biotin ligase tag (Genbank Accession No. NP_561589), orange fluorescent protein (Genbank Accession No. AAL33917), beta galactosidase (Genbank Accession No. NM_125776), Fluorescein isothiocyanate (Genbank Accession No. AAF22695) and strepavidin (Genbank Accession No. S11540).

[0169] In another example, the diagnostic agent is a luminescent protein such as products of bacterial luciferase genes, e.g., the luciferase genes encoded by Vibrio harveyi, Vibrio fischeri, and Xenorhabdus luminescens, the firefly luciferase gene FFlux, and the like.

[0170] Recombinant methods for inserting heterologous sequences into a phage genome are well-known in the art. The appropriate coding sequence is inserted in one or more of several locations in the phage genome. In one embodiment, the nucleic acid insert that is introduced into the phage genome is approximately no more than 10% of the phage genome length.

[0171] The payload coding sequence is inserted either after early, middle or late expressing phage genes and it can be expressed as part of a phage operon, relying on either an existing phage operon, promoter and terminator, or as a distinct operon. In the latter case, a relevant promoter and terminator from the phage is inserted as part of the newly formed operon.

[0172] For example, if strong expression of a payload is required, the payload coding sequence is added after the stop codon of the major capsid protein and expressed as part of the major capsid operon. Alternatively, it can be expressed by addition of a major capsid protein promoter and terminator as an individual newly formed operon which can be inserted anywhere in the phage genome that would not damage the functionality of the phage. If low expression of a payload is desired, the payload coding sequence can be added after the terminase gene (or other low expressing gene), which usually has low expression. Moreover, payload levels are tuned by adding a ribosome binding site with a desired strength.

[0173] In order to avoid negatively affecting phage infectivity and specificity, the payload coding sequence is typically not inserted inside an existing phage open reading frame. An exception to this is the case when the payload is intended to be expressed as a fusion protein of the phage outer coat. In that latter case of payload display, the payload coding sequence is added in frame to sequence encoding the phage coat protein.

[0174] The bacteriophages described herein may be used to treat subjects having diseases associated with Klebsiella pneumoniae infection.

[0175] Diseases associated with Klebsiella pneumoniae infection include inflammatory bowel diseases, urinary tract infections, acute liver abscesses, pneumonia, infectious wounds, and dental infections.

[0176] Inflammatory bowel diseases (IBDs) are severe gastrointestinal disorders characterized by intestinal inflammation and tissue remodeling, that increase in frequency and may prove disabling for patients. The major forms of IBD, ulcerative colitis (UC) and Crohn's disease are chronic, relapsing conditions that are clinically characterized by abdominal pain, diarrhea, rectal bleeding, and fever

[0177] As used herein, the term “subject” includes mammals, preferably human beings at any age which suffer from the pathology. Those in need of treatment may include individuals already having IBD, as well as those at risk of having, or who may ultimately acquire the disease. The need for treatment is assessed, e.g., by the presence of one or more risk factors associated with the development of IBD, the presence or progression of IBD, or likely receptiveness to treatment of a subject having IBD. For example, “treating” IBD may encompass reducing or eliminating associated symptoms, and does not necessarily encompass the elimination of the underlying disease etiology, e.g., a genetic instability locus.

[0178] In some embodiments, a subject with IBD is in remission and/or presently asymptomatic, and the bacteriophage described herein may be administered during the remission period to reduce the potential for a flare-up. In some embodiments, the subject in remission and/or presently asymptomatic for IBD is undergoing treatment, e.g., antibiotics and/or steroids, and the bacteriophage described herein may be co-administered with such treatment to reduce the potential for a flare-up.

[0179] The term “treating” refers to inhibiting, preventing or arresting the development of a pathology (disease, disorder or condition) and/or causing the reduction, remission, or regression of a pathology. Those of skill in the art will understand that various methodologies and assays can be used to assess the development of a pathology, and similarly, various methodologies and assays may be used to assess the reduction, remission or regression of a pathology.

[0180] The bacteriophage may be used per se or as part of a pharmaceutical composition, where it is mixed with suitable carriers or excipients.

[0181] As used herein a “pharmaceutical composition” refers to a preparation of one or more of the active ingredients described herein with other chemical components such as physiologically suitable carriers and excipients. The purpose of a pharmaceutical composition is to facilitate administration of a compound to an organism.

[0182] Herein the term “active ingredient” refers to the bacteriophage accountable for the biological effect.

[0183] Hereinafter, the phrases “physiologically acceptable carrier” and “pharmaceutically acceptable carrier” which may be interchangeably used refer to a carrier or a diluent that does not cause significant irritation to an organism and does not abrogate the biological activity and properties of the administered compound.

[0184] Herein the term “excipient” refers to an inert substance added to a pharmaceutical composition to further facilitate administration of an active ingredient. Examples, without limitation, of excipients include calcium carbonate, calcium phosphate, various sugars and types of starch, cellulose derivatives, gelatin, vegetable oils and polyethylene glycols.

[0185] Techniques for formulation and administration of drugs may be found in “Remington's Pharmaceutical Sciences,” Mack Publishing Co., Easton, PA, latest edition, which is incorporated herein by reference.

[0186] Suitable routes of administration may, for example, include topical, oral, rectal, transmucosal, especially transnasal, intestinal or parenteral delivery, including intramuscular, subcutaneous and intramedullary injections as well as intrathecal, direct intraventricular, intracardiac, e.g., into the right or left ventricular cavity, into the common coronary artery, intravenous, intraperitoneal, intranasal, or intraocular injections.

[0187] Alternately, one may administer the pharmaceutical composition in a local rather than systemic manner, for example, via injection of the pharmaceutical composition directly into a tissue region of a patient. In one embodiment, the bacteriophage may be administered directly into the tumor of the subject.

[0188] Pharmaceutical compositions of some embodiments of the invention may be manufactured by processes well known in the art, e.g., by means of conventional mixing, dissolving, granulating, dragee-making, levigating, emulsifying, encapsulating, entrapping, spray drying, coating or lyophilizing processes.

[0189] Pharmaceutical compositions for use in accordance with some embodiments of the invention thus may be formulated in conventional manner using one or more physiologically acceptable carriers comprising excipients and auxiliaries, which facilitate processing of the active ingredients into preparations which, can be used pharmaceutically. Proper formulation is dependent upon the route of administration chosen.

[0190] For injection, the active ingredients of the pharmaceutical composition may be formulated in aqueous solutions, preferably in physiologically compatible buffers such as Hank's solution, Ringer's solution, or physiological salt buffer. For transmucosal administration, penetrants appropriate to the barrier to be permeated are used in the formulation. Such penetrants are generally known in the art.

[0191] For oral administration, the pharmaceutical composition can be formulated readily by combining the active compounds with pharmaceutically acceptable carriers well known in the art. Such carriers enable the pharmaceutical composition to be formulated as tablets, pills, dragees, capsules, liquids, gels, syrups, slurries, suspensions, and the like, for oral ingestion by a patient. Pharmacological preparations for oral use can be made using a solid excipient, optionally grinding the resulting mixture, and processing the mixture of granules, after adding suitable auxiliaries if desired, to obtain tablets or dragee cores. Suitable excipients are, in particular, fillers such as sugars, including lactose, sucrose, mannitol, or sorbitol; cellulose preparations such as, for example, maize starch, wheat starch, rice starch, potato starch, gelatin, gum tragacanth, methyl cellulose, hydroxypropylmethyl-cellulose, sodium carbomethylcellulose; and/or physiologically acceptable polymers such as polyvinylpyrrolidone (PVP). If desired, disintegrating agents may be added, such as cross-linked polyvinyl pyrrolidone, agar, or alginic acid or a salt thereof such as sodium alginate.

[0192] Dragee cores are provided with suitable coatings. For this purpose, concentrated sugar solutions may be used which may optionally contain gum arabic, talc, polyvinyl pyrrolidone, carbopol gel, polyethylene glycol, titanium dioxide, lacquer solutions and suitable organic solvents or solvent mixtures. Dyestuffs or pigments may be added to the tablets or dragee coatings for identification or to characterize different combinations of active compound doses.

[0193] Pharmaceutical compositions which can be used orally, include push-fit capsules made of gelatin as well as soft, sealed capsules made of gelatin and a plasticizer, such as glycerol or sorbitol. The push-fit capsules may contain the active ingredients in admixture with filler such as lactose, binders such as starches, lubricants such as talc or magnesium stearate and, optionally, stabilizers. In soft capsules, the active ingredients may be dissolved or suspended in suitable liquids, such as fatty oils, liquid paraffin, or liquid polyethylene glycols. In addition, stabilizers may be added. All formulations for oral administration should be in dosages suitable for the chosen route of administration.

[0194] For buccal administration, the compositions may take the form of tablets or lozenges formulated in conventional manner.

[0195] For administration by nasal inhalation, the active ingredients for use according to some embodiments of the invention are conveniently delivered in the form of an aerosol spray presentation from a pressurized pack or a nebulizer with the use of a suitable propellant, e.g., dichlorodifluoromethane, trichlorofluoromethane, dichloro-tetrafluoroethane or carbon dioxide. In the case of a pressurized aerosol, the dosage unit may be determined by providing a valve to deliver a metered amount. Capsules and cartridges of, e.g., gelatin for use in a dispenser may be formulated containing a powder mix of the compound and a suitable powder base such as lactose or starch.

[0196] The pharmaceutical composition described herein may be formulated for parenteral administration, e.g., by bolus injection or continuos infusion. Formulations for injection may be presented in unit dosage form, e.g., in ampoules or in multidose containers with optionally, an added preservative. The compositions may be suspensions, solutions or emulsions in oily or aqueous vehicles, and may contain formulatory agents such as suspending, stabilizing and/or dispersing agents.

[0197] Pharmaceutical compositions for parenteral administration include aqueous solutions of the active preparation in water-soluble form. Additionally, suspensions of the active ingredients may be prepared as appropriate oily or water based injection suspensions. Suitable lipophilic solvents or vehicles include fatty oils such as sesame oil, or synthetic fatty acids esters such as ethyl oleate, triglycerides or liposomes. Aqueous injection suspensions may contain substances, which increase the viscosity of the suspension, such as sodium carboxymethyl cellulose, sorbitol or dextran. Optionally, the suspension may also contain suitable stabilizers or agents which increase the solubility of the active ingredients to allow for the preparation of highly concentrated solutions.

[0198] Alternatively, the active ingredient may be in powder form for constitution with a suitable vehicle, e.g., sterile, pyrogen-free water based solution, before use.

[0199] The pharmaceutical composition of some embodiments of the invention may also be formulated in rectal compositions such as suppositories or retention enemas, using, e.g., conventional suppository bases such as cocoa butter or other glycerides.

[0200] Pharmaceutical compositions suitable for use in context of some embodiments of the invention include compositions wherein the active ingredients are contained in an amount effective to achieve the intended purpose. More specifically, a therapeutically effective amount means an amount of active ingredients (bacteriophage) effective to prevent, alleviate or ameliorate symptoms of a disorder (e.g., inflammatory bowel disease) or prolong the survival of the subject being treated.

[0201] Determination of a therapeutically effective amount is well within the capability of those skilled in the art, especially in light of the detailed disclosure provided herein.

[0202] For any preparation used in the methods of the invention, the therapeutically effective amount or dose can be estimated initially from in vitro and cell culture assays. For example, a dose can be formulated in animal models to achieve a desired concentration or titer. Such information can be used to more accurately determine useful doses in humans.

[0203] In some embodiments, the composition is delivered to a subject in need thereof so as to provide one or more bacteriophage in an amount corresponding to a multiplicity of infection (MOI) of about 1 to about 10. MOT is determined by assessing the approximate bacterial load in the site of infection, or using an estimate for a given type of disease and then providing phage in an amount calculated to give the desired MOI.

[0204] In some embodiments, MOI may be selected based on the “multiplicity of 10 rule”, which states that where there are on average in order of 10 phages adsorbed per bacterium, bacterial density reduces significantly (Abedon S T, 2009, Foodborne Pathog Dis 6:807-815; and Kasman L M, et al., 2002, J Virol 76:5557-5564); whereas lower-titer phage administration (e.g., using a MOI lower than 10) is unlikely to be successful (Goode D, et al., 2003, App Environ Microbiol 69:5032-5036; Kumari S, et al., 2010, J Infect Dev Ctries 4:367-377).

[0205] In other embodiments, the amount of phage (or combination of phages) is provided so as to reduce the amount of bacteria (e.g. Klebsiella pneumoniae) present in the gastrointestinal tract (e.g. mouth, small intestine, colon, stomach) by at least 10%, 20%, 30%, 40%, 50%, 60%, 70%, 80%, 90% or even 100%.

[0206] In certain embodiments, the bacteriophage described herein is administered to ameliorate an IBD in a subject and results in one or more symptoms or physical parameters of the condition or disorder to improve by at least about 10%, 20%, 30%, 40%, 50%, 60%, 70%, 80%, 90%, 95%, or more as compared to levels in an untreated or control subject. In some embodiments, the improvement is measured by comparing the symptom or physical parameter in a subject prior to and following administration of the bacteriophage. In some embodiments, the measurable physical parameter is a reduction in bacterial CFU in the stool.

[0207] The measurable physical parameter may be any suitable clinical parameter known in the art, e.g., for Crohn's disease (Sandborn et al., 2013; Best et al., 1976; Warrel—Oxford Textbook of Medicine, 5th edition) or for ulcerative colitis (Tursi et al., 2010; Warrel—Oxford Textbook of Medicine, 5th edition). Crohn's disease parameters include but are not limited to assessment of clinical remission using Crohn's Disease Activity Index (CDAI) (CDAI score of ≤150 points) and CDAI-100 response (≥100-point decrease in the CDAI score from the baseline); inflammation reduction as measured by decrease in serum levels of C-reactive protein (CRP), differential blood count and serum albumin levels; reduced levels of fecal calprotectin and improvement in the appearance of the mucosal layer in terminal ileum and rectum as evaluated by microscopic examination of the biopsies collected during endoscopic procedures (e.g., reduction in neutrophil, macrophage and other immune cell infiltration, granuloma size and number, reduction in the number and size of ulcers, edematous mucosa). In addition the improvement of the disease may be evaluated based on the assessment of the clinical symptoms including diarrhea, abdominal pain, weight loss, fever, vomiting, colic, rectal bleeding, anemia, extraintestinal manifestations (hypersensitivity rash to sulphasalazine, erythema nodosum, pyoderma gangrenosum, oral aphthous ulcers, sore tongue, angular stomatitis, episcleritis or an anterior uveitis, arthritis, acute arthropathy, low back pain, sacroiliitis, ankylosing spondylitis, liver diseases: minor elevations of alkaline phosphatase or transaminases, primary sclerosing cholangitis, chronic liver disease ranging from an autoimmune hepatitis to the classic picture of concentric periductular fibrosis with obliteration of bile ducts, pericarditis with or without an effusion, autoimmune hemolytic anaemia, amyloid, rapidly progressing bronchiectasis).

[0208] Ulcerative colitis disease parameters include but not limited to improvement in the ulcerative colitis disease activity index (UCDAI) (UCDAI decrease of 50% or more from the baseline), activity of relapsing UC; remission, considered as UCDAI ≤2; improvement in hemoglobin levels, serum albumin levels, decrease in C-reactive protein levels; improvement in neutrophil leukocytosis (blood differential count); improvement in endoscopic scores (reduction in the edematous mucosa area, reduction in neutrophil, macrophage and other immune cell infiltration, reduction in the number and size of ulcers, edematous mucosa; improvement in the clinical symptoms: rectal bleeding, fever, stool frequency, diarrhea, the passage of mucus, abdominal pain, constipation, anorexia, nausea, weight loss, malaise, lassitude, symptoms of chronic iron deficiency, minor perianal disease, such as a fissure, extraintestinal manifestations described above, and additionally oral candidiasis, finger clubbing.

[0209] Toxicity and therapeutic efficacy of the active ingredients described herein can be determined by standard pharmaceutical procedures in vitro, in cell cultures or experimental animals. The data obtained from these in vitro and cell culture assays and animal studies can be used in formulating a range of dosage for use in human. The dosage may vary depending upon the dosage form employed and the route of administration utilized. The exact formulation, route of administration and dosage can be chosen by the individual physician in view of the patient's condition. (See e.g., Fingl, et al., 1975, in “The Pharmacological Basis of Therapeutics”, Ch. 1 p.1).

[0210] Dosage amount and interval may be adjusted individually to provide levels of the active ingredient are sufficient to induce or suppress the biological effect (minimal effective concentration, MEC). The MEC will vary for each preparation, but can be estimated from in vitro data. Dosages necessary to achieve the MEC will depend on individual characteristics and route of administration. Detection assays can be used to determine plasma concentrations.

[0211] Depending on the severity and responsiveness of the condition to be treated, dosing can be of a single or a plurality of administrations, with course of treatment lasting from several days to several weeks or until cure is effected or diminution of the disease state is achieved.

[0212] The amount of a composition to be administered will, of course, be dependent on the subject being treated, the severity of the affliction, the manner of administration, the judgment of the prescribing physician, etc.

[0213] Compositions of some embodiments of the invention may, if desired, be presented in a pack or dispenser device, such as an FDA approved kit, which may contain one or more unit dosage forms containing the active ingredient. The pack may, for example, comprise metal or plastic foil, such as a blister pack. The pack or dispenser device may be accompanied by instructions for administration. The pack or dispenser may also be accommodated by a notice associated with the container in a form prescribed by a governmental agency regulating the manufacture, use or sale of pharmaceuticals, which notice is reflective of approval by the agency of the form of the compositions or human or veterinary administration. Such notice, for example, may be of labeling approved by the U.S. Food and Drug Administration for prescription drugs or of an approved product insert. Compositions comprising a preparation of the invention formulated in a compatible pharmaceutical carrier may also be prepared, placed in an appropriate container, and labeled for treatment of an indicated condition, as is further detailed above.

[0214] Compositions described herein may comprise more than one phage strain. In one embodiment, the composition comprises 2 phage strains, 3 phage strains, 4 phage strains, 5 phage strains or more.

[0215] In one embodiment, the bacteriophage cocktails comprise a plurality of phages that target a single Klebsiella pneumoniae strain.

[0216] In one embodiment, the bacteriophage cocktails comprise a plurality of phages that target more than one Klebsiella pneumonia strains.

[0217] Examples of particular combinations of phages are provided herein above.

[0218] The pharmaceutical compositions of the present invention also may be combined with one or more non-phage therapeutic and/or prophylactic agents, useful for the treatment and/or prevention of bacterial infections, as described herein and/or known in the art (e.g. one or more traditional antibiotic agents). Other therapeutic and/or prophylactic agents that may be used in combination with the phage(s) or phage product(s) of the invention include, but are not limited to, antibiotic agents, anti-inflammatory agents, antiviral agents, antifungal agents, or local anesthetic agents.

[0219] Standard or traditional antibiotic agents that can be administered with the bacteriophages described herein include, but are not limited to, amikacin, gentamicin, kanamycin, neomycin, netilmicin, paromomycin, rhodostreptomycin, streptomycin, tobramycin, apramycin, rifamycin, naphthomycin, mupirocin, geldanamycin, ansamitocin, carbacephems, imipenem, meropenem, ertapenem, faropenem, doripenem, panipenem/betamipron, biapenem, PZ-601, cephalosporins, cefacetrile, cefadroxil, cefalexin, cefaloglycin, cefalonium, cefaloridine, cefalotin, cefapirin, cefatrizine, cefazaflur, cefazedone, cefazolin, cefradine, cefroxadine, ceftezole, cefaclor, cefonicid, cefprozil, cefuroxime, cefuzonam, cefmetazole, cefotetan, cefoxitin, cefcapene, cefdaloxime, cefdinir, cefditoren, cefetamet, cefixime, cefmenoxime, cefteram, ceftibuten, ceftiofur, ceftiolene, ceftizoxime, ceftriaxone, cefoperazone, ceftazidime latamoxef, cefclidine, cefepime, cefluprenam, cefoselis, cefozopran, cefpirome, cefquinome, flomoxef. ceftobiprole, azithromycin, clarithromycin, dirithromycin, erythromycin, roxithromycin, aztreonam, pencillin and penicillin derivatives, actinomycin, bacitracin, colistin, polymyxin B, cinoxacin, flumequine, nalidixic acid, oxolinic acid, piromidic acid, pipemidic acid, rosoxacin, ciprofloxacin, enoxacin, fleroxacin, lomefloxacin, nadifloxacin, norfloxacin, ofloxacin, pefloxacin, rufloxacin, balofloxacin, gatifloxacin, grepafloxacin, levofloxacin, moxifloxacin, pazufloxacin, sparfloxacin, temafloxacin, tosufloxacin, clinafloxacin, garenoxacin, gemifloxacin, stifloxacin, trovalfloxacin, prulifloxacin, acetazolamide, benzolamide, bumetanide, celecoxib, chlorthalidone, clopamide, dichlorphenamide, dorzolamide, ethoxyzolamide, furosemide, hydrochlorothiazide, indapamide, mafendide, mefruside, metolazone, probenecid, sulfacetamide, sulfadimethoxine, sulfadoxine, sulfanilamides, sulfamethoxazole, sulfasalazine, sultiame, sumatriptan, xipamide, tetracycline, chlortetracycline, oxytetracycline, doxycycline, lymecycline, meclocycline, methacycline, minocycline, rolitetracycline, methicillin, nafcillin, oxacilin, cloxacillin, vancomycin, teicoplanin, clindamycin, co-trimoxazole, flucloxacillin, dicloxacillin, ampicillin, amoxicillin and any combination thereof.

[0220] Standard antifungal agents include amphotericin B such as liposomal amphotericin B and non-liposomal amphotericin B.

[0221] The present inventors further contemplate administering to the subject a probiotic which comprises “good” bacteria to occupy the niche left by the reduced “negative” bacteria. Such probiotic bacteria may comprise lactobacillus, saccharoinyces boulardii, and/or Bifidobacteriun.

[0222] In some embodiments, the bacteriophages and bacteriophage combinations (cocktails) are capable of modulating IBD associated with proton pump inhibitor (PPI) therapy by lysing the one or more Klebsiella bacteria. In some embodiments, the bacteriophage and bacteriophage cocktails are capable of modulating IBD associated with primary sclerosing cholangitis by lysing the one or more Klebsiella bacteria.

[0223] The bacteiophages and bacteriophage cocktails of the invention can be used in anti-infective compositions for controlling the growth of bacteria, in particular Klebsiella pneumoniae, in order to prevent or reduce the incidence of nosocomial infections. The anti-infective compositions find use in reducing or inhibiting colonization or growth of bacterial on a surface contacted therewith.

[0224] The bacteriophages of the invention may be incorporated into compositions that are formulated for application to biological surfaces, such as the skin and mucus membranes, as well as for application to non-biological surfaces.

[0225] Anti-infective formulations for use on biological surfaces include, but are not limited to, gels, creams, ointments, sprays, and the like. In particular embodiments, the anti-infective formulation is used to sterilize a surgical field, or the hands and/or exposed skin of healthcare workers and/or patients.

[0226] Anti-infective formulations for use on non-biological surfaces include sprays, solutions, suspensions, wipes impregnated with a solution or suspension and the like. In particular embodiments, the anti-infective formulation is used on solid surfaces in hospitals, nursing homes, ambulances, etc., including, e.g., appliances, countertops, and medical devices, hospital equipment.

[0227] In preferred embodiments, the non-biological surface is a surface of a hospital apparatus or piece of hospital equipment. In particularly preferred embodiments, the non-biological surface is a surgical apparatus or piece of surgical equipment.

[0228] The present invention also encompasses diagnostic methods for determining the causative agent at the site of the bacterial infection. In certain embodiments, the diagnosis of the causative agent of a bacterial infection is performed by (i) culturing a sample from a patient, e.g., a tumor biopsy, stool sample or other sample appropriate for culturing the bacteria causing the infection; (ii) contacting the culture with one or more bacteriophages of the invention; and (iii) monitoring for evidence of cell growth and/or lysis of the culture. Because the activity of phages tends to be species or strain specific, susceptibility, or lack of susceptibility, to one or more phages of the invention can indicate the species or strain of bacteria causing the infection.

[0229] The sample may be a tissue biopsy or swab collected from the patient, or a fluid sample, such as blood, tears, or urine.

[0230] As used herein the term “about” refers to ±10%

[0231] The terms “comprises”, “comprising”, “includes”, “including”, “having” and their conjugates mean “including but not limited to”.

[0232] The term “consisting of” means “including and limited to”.

[0233] The term “consisting essentially of” means that the composition, method or structure may include additional ingredients, steps and/or parts, but only if the additional ingredients, steps and/or parts do not materially alter the basic and novel characteristics of the claimed composition, method or structure.

[0234] As used herein, the singular form “a”, “an” and “the” include plural references unless the context clearly dictates otherwise. For example, the term “a compound” or “at least one compound” may include a plurality of compounds, including mixtures thereof.

[0235] Throughout this application, various embodiments of this invention may be presented in a range format. It should be understood that the description in range format is merely for convenience and brevity and should not be construed as an inflexible limitation on the scope of the invention. Accordingly, the description of a range should be considered to have specifically disclosed all the possible subranges as well as individual numerical values within that range. For example, description of a range such as from 1 to 6 should be considered to have specifically disclosed subranges such as from 1 to 3, from 1 to 4, from 1 to 5, from 2 to 4, from 2 to 6, from 3 to 6 etc., as well as individual numbers within that range, for example, 1, 2, 3, 4, 5, and 6. This applies regardless of the breadth of the range.

[0236] Whenever a numerical range is indicated herein, it is meant to include any cited numeral (fractional or integral) within the indicated range. The phrases “ranging/ranges between” a first indicate number and a second indicate number and “ranging/ranges from” a first indicate number “to” a second indicate number are used herein interchangeably and are meant to include the first and second indicated numbers and all the fractional and integral numerals therebetween.

[0237] As used herein the term “method” refers to manners, means, techniques and procedures for accomplishing a given task including, but not limited to, those manners, means, techniques and procedures either known to, or readily developed from known manners, means, techniques and procedures by practitioners of the chemical, pharmacological, biological, biochemical and medical arts.

[0238] When reference is made to particular sequence listings, such reference is to be understood to also encompass sequences that substantially correspond to its complementary sequence as including minor sequence variations, resulting from, e.g., sequencing errors, cloning errors, or other alterations resulting in base substitution, base deletion or base addition, provided that the frequency of such variations is less than 1 in 50 nucleotides, alternatively, less than 1 in 100 nucleotides, alternatively, less than 1 in 200 nucleotides, alternatively, less than 1 in 500 nucleotides, alternatively, less than 1 in 1000 nucleotides, alternatively, less than 1 in 5,000 nucleotides, alternatively, less than 1 in 10,000 nucleotides.

[0239] It is understood that any Sequence Identification Number (SEQ ID NO) disclosed in the instant application can refer to either a DNA sequence or a RNA sequence, depending on the context where that SEQ ID NO is mentioned, even if that SEQ ID NO is expressed only in a DNA sequence format or a RNA sequence format. Similarly, though some sequences are expressed in a RNA sequence format (e.g., reciting U for uracil), depending on the actual type of molecule being described, it can refer to either the sequence of a RNA molecule comprising a dsRNA, or the sequence of a DNA molecule that corresponds to the RNA sequence shown. In any event, both DNA and RNA molecules having the sequences disclosed with any substitutes are envisioned.

[0240] It is appreciated that certain features of the invention, which are, for clarity, described in the context of separate embodiments, may also be provided in combination in a single embodiment. Conversely, various features of the invention, which are, for brevity, described in the context of a single embodiment, may also be provided separately or in any suitable subcombination or as suitable in any other described embodiment of the invention. Certain features described in the context of various embodiments are not to be considered essential features of those embodiments, unless the embodiment is inoperative without those elements.

[0241] Various embodiments and aspects of the present invention as delineated hereinabove and as claimed in the claims section below find experimental support in the following examples.

### EXAMPLES

[0242] Reference is now made to the following examples, which together with the above descriptions illustrate some embodiments of the invention in a non-limiting fashion.

[0243] Generally, the nomenclature used herein, and the laboratory procedures utilized in the present invention include molecular, biochemical, microbiological and recombinant DNA techniques. Such techniques are thoroughly explained in the literature. See, for example, “Molecular Cloning: A laboratory Manual” Sambrook et al., (1989); “Current Protocols in Molecular Biology” Volumes I-III Ausubel, R. M., ed. (1994); Ausubel et al., “Current Protocols in Molecular Biology”, John Wiley and Sons, Baltimore, Maryland (1989); Perbal, “A Practical Guide to Molecular Cloning”, John Wiley & Sons, New York (1988); Watson et al., “Recombinant DNA”, Scientific American Books, New York; Birren et al. (eds) “Genome Analysis: A Laboratory Manual Series”, Vols. 1-4, Cold Spring Harbor Laboratory Press, New York (1998); methodologies as set forth in U.S. Pat. Nos. 4,666,828; 4,683,202; 4,801,531; 5,192,659 and 5,272,057; “Cell Biology: A Laboratory Handbook”, Volumes I-III Cellis, J. E., ed. (1994); “Culture of Animal Cells—A Manual of Basic Technique” by Freshney, Wiley-Liss, N. Y. (1994), Third Edition; “Current Protocols in Immunology” Volumes I-III Coligan J. E., ed. (1994); Stites et al. (eds), “Basic and Clinical Immunology” (8th Edition), Appleton & Lange, Norwalk, C T (1994); Mishell and Shiigi (eds), “Selected Methods in Cellular Immunology”, W. H. Freeman and Co., New York (1980); available immunoassays are extensively described in the patent and scientific literature, see, for example, U.S. Pat. Nos. 3,791,932; 3,839,153; 3,850,752; 3,850,578; 3,853,987; 3,867,517; 3,879,262; 3,901,654; 3,935,074; 3,984,533; 3,996,345; 4,034,074; 4,098,876; 4,879,219; 5,011,771 and 5,281,521; “Oligonucleotide Synthesis” Gait, M. J., ed. (1984); “Nucleic Acid Hybridization” Hames, B. D., and Higgins S. J., eds. (1985); “Transcription and Translation” Hames, B. D., and Higgins S. J., eds. (1984); “Animal Cell Culture” Freshney, R. I., ed. (1986); “Immobilized Cells and Enzymes” IRL Press, (1986); “A Practical Guide to Molecular Cloning” Perbal, B., (1984) and “Methods in Enzymology” Vol. 1-317, Academic Press; “PCR Protocols: A Guide To Methods And Applications”, Academic Press, San Diego, C A (1990); Marshak et al., “Strategies for Protein Purification and Characterization—A Laboratory Course Manual” CSHL Press (1996); all of which are incorporated by reference as if fully set forth herein. Other general references are provided throughout this document. The procedures therein are believed to be well known in the art and are provided for the convenience of the reader. All the information contained therein is incorporated herein by reference.

### Example 1

[0244] Isolating and Characterizing Phage

[0245] Materials and Methods

[0246] Bacteria Sequencing and Testing:

[0247] Each Klebsiella pneumoniae isolate was sequenced using Illumina Nextera sequencing of 150 bp paired-end reads. Adapter removal and quality trimming was done using Trimgalore (www(dot)github(dot)com/FelixKrueger/TrimGalore) and cutadapt (Martin, 2011). Positions with phred scores below 30 were deleted from a read and reads shorter than 55 bp after removing low quality nucleotides were discarded entirely. Assembly was performed using SPAdes (Bankevich et al., 2012). Validation of K. pneumoniae taxonomy was done using Kleborate (www(dot)github(dot)com/katholt/Kleborate) which genotypes assemblies and determines whether they are indeed K. pneumoniae. Results were obtained by comparing the contigs of an assembly to known klebsiella species genomes hosted at: www(dot)bigsdb(dot)pasteur(dot)fr/klebsiella/klebsiella(dot)html. Comparisons were performed using BLAST (Altschul, 1990) and the Klebsiella species was determined from a phylogenetic tree derived from identities between known Klebsiella species, where the distance metric is mash (Ondov et al., 2016).

[0248] Phage Amplification and Determination of Phage Titers:

[0249] Phage were amplified from liquid broth or from soft agar double agar overlay plaque. Amplification from liquid broth was performed by diluting 50 μL of isolated phage sample into 4 mL log phase host culture at OD=0.5, and incubating at 37° C., overnight. When amplified from a plaque a whole plaque was picked using a 1 uL loop and release the plaque into the culture OD600=0.1−0.2. Tubes were centrifuged, the supernatant was filtered by 0.45 μm filter, and 1 mM of the divalent ions Ca²⁺ and Mg²⁺ were added.

[0250] Phage titers were determined by drop plaque assay as follows: host culture was prepared by inoculating 4 mL liquid BHIS with 5-10 colonies of the host and incubating at 37° C., until OD was 1.7 (1.5-2 hrs). 150 μL of host culture were added to 4 mL of molten top agar (BHIS top agar: BHIS media, 0.4% Agarose) with divalent ions Ca²⁺ and Mg²⁺ and dispensed on BHIS agar plats (1.6% Agarose). Plate were left to solidify for 15 min at RT before incubating the plate at 37° C. for 30 minutes. Then dilutions of phage sample were dropped (5 μL). Plates were incubated for overnight before counting plaques (10-50 plaques/drop) and determination of phage titer (number of plaques×200×reciprocal of counted dilution=PFU/mL).

[0251] Amplification of phage on soft agar was performed in cases where titers of phage that were produced from liquid BHIS were lower than 1×10⁹ PFU/mL. Log phase host culture at OD=1.7, was diluted to OD=1, and aliquots of 100 μL diluted host culture were added to 100 μL of phage at a titer that was sufficient to result in production of confluent plaques, and incubated at room temperature for 15 minutes. Then, each host-phage mixture was diluted with 3 mL soft molten agar and poured on the top of BHIS bottom agar. Plates were left to harden, and then incubated at 37° C. for 2-3 hrs or until complete lysis. Plates were scraped from the top agar with a spreader and agar was transferred to sterile tubes with BHIS and 10 μL of chloroform. Tubes were left to stand for 30 minutes to enable phage to elute from the soft agar. Tubes were centrifuged, and supernatant was filtered with 0.45 μM syringe filter to eliminate residual agar. Divalent ions Ca²⁺ Mg²⁺ at concentration of 1 mM were added to tubes which were stored at 4° C.

[0252] High Throughput Liquid Host Range:

[0253] A replicator (VP408) was used to inoculate 200 μL BHIS from glycerol stock plates following incubation overnight (15-16 h) at 37° C., without shaking. The next day, a 2 μL replicator (VP407) was used to dilute the overnight starters 1:100 in a 96-well plate prefilled with 200 μL BHIS+1 mM ions. One plate served as the “no phage control” (NPC) and to the other, 10 μL phage was added, to each well (number of plates as the number of phages tested+1 (NPC)). Plates were incubated in the robot (12plate_OD_Hummus program) at 37° C. with shaking and OD₆₀₀ was measured every 30 min for 4 hours. The ration of OD₆₀₀(NPC)/OD₆₀₀ (treated well), at 4 hours, was calculated. Ratio <1.8 was defined as resistant and ratio >1.8 as sensitive.

[0254] High Throughput Solid Host Range:

[0255] Inverted Plaque Assay was used as an alternative to the Double Layer Plaque Assay. In this method, phages are incorporated into the top agar and bacteria are dropped on it. Contrary to the double layer plaque assay, no plaque is formed, but rather, sensitive bacteria appeared either as infected lawn (perforated lawn), or single colonies, or no colony at all. The growth of bacteria on the top agar with the tested phage is compared to the growth of the same bacteria on the top agar without phage (No Phage Control (NPC)).

[0256] Each phage is diluted to 10⁸ PFU/mL in BHIS, and 10 p L is transferred into 10 mL melted top agar with 1 mM ions (at 56° C.). Following a gentle mix, the tube contents are poured onto a BHIS plate. For NPC plates, only ions are added to the top agar. The plates are left for 20 min to allow the top agar to solidify. A replicator for frozen samples (VP408) is used to inoculate the bacteria into 200 μL BHIS and the plate is incubated overnight (15-16 h) at 37° C., without shaking. The following day, the cultures are diluted 1:10000 in PBS using the 2 uL replicator (VP407) into 200 μL BHIS in 96-well plates with 200 μL of PBS. 2 μL of the diluted bacteria are spotted onto the phage and NPC plate. After drops are fully absorbed on the top agar (a few minutes with cover slightly open), the plates are incubated at 30° C. overnight (15-16 hours). The growth of the bacteria on phage plate is compared to the growth on the NPC and bacteria were designated sensitive (“S”) or resistant (“R”) to the phage.

[0257] Results

[0258] Sewage (from the Israel National Virology Center and Sourasky Tel Aviv Medical Center) was used to hunt phages using KP isolated from PSC/IBD patients.

[0259] 29 phages were isolated, purified, and sequenced. Their taxonomy was deduced from the sequence based on International Committee on Taxonomy of Viruses (ICTV) classification (Table 2). Additionally, the sequence was used to determine the distance (sequence homology) between the phages (FIG. 1).

TABLE 2
Exemplary Isolated Bacteriophage against Klebsiella pneumonia species.

| Single | | | | | | | |
|---|---|---|---|---|---|---|---|
| letter | | | | | SEQ | Deposit | Date of |
| designation | Phage | Family | Subfamily | Genus | ID NO: | number | deposit |
| b | 395-D2-3-2 | Myoviridae | Tevenvirinae | Slopekvirus | 3 | F/00162 | 6 Dec. 2021 |
| a | 395-D2-3-1 | Myoviridae | Tevenvirinae | Slopekvirus | 4 | F/00161 | 6 Dec. 2021 |
| c | 395-D2-3-3 | Myoviridae | Tevenvirinae | Slopekvirus | 5 | | |
| d | 395-D2-3-4 | Myoviridae | Tevenvirinae | Slopekvirus | 6 | F/00177 | 13 Jan. 2022 |
| e | 395-D2-3-5 | Autographiviridae | Studiervirinae | Teetrevirus | 7 | F/00178 | 13 Jan. 2022 |
| f | CT-120-2-11 | Drexlerviridae | | Webervirus | 8 | | |
| g | CT-227-KP4M1-11 | Myoviridae | Tevenvirinae | Jiaodavirus | 9 | F/00163 | 6 Dec. 2021 |
| h | CT-227-KP4M1-19 | Drexlerviridae | | Webervirus | 10 | | |
| i | CT-227-KP4M1-20 | Myoviridae | Tevenvirinae | Jiaodavirus | 11 | F/00164 | 6 Dec. 2021 |
| j | CT-227-KP4M1-7 | Myoviridae | Tevenvirinae | Jiaodavirus | 12 | | |
| k | CT-227-KP4M1-8 | Myoviridae | Tevenvirinae | Slopekvirus | 13 | | |
| l | KP10-11 | Myoviridae | Tevenvirinae | Jiaodavirus | 1 | F/00165 | 6 Dec. 2021 |
| m | KP10-14 | Myoviridae | Tevenvirinae | Slopekvirus | 14 | | |
| n | KP10-2 | Myoviridae | Tevenvirinae | Jiaodavirus | 15 | | |
| o | KP10-3 | Myoviridae | Tevenvirinae | Slopekvirus | 16 | F/00179 | 13 Jan. 2022 |
| p | KP10-4 | Myoviridae | Tevenvirinae | Slopekvirus | 17 | | |
| q | KP10-48 | Demerecviridae | | Sugarlandvirus | 2 | F/00166 | 6 Dec. 2021 |
| r | KP10-61 | Myoviridae | Tevenvirinae | Slopekvirus | 18 | | |
| s | KP10-64 | Demerecviridae | | Sugarlandvirus | 19 | F/00167 | 6 Dec. 2021 |
| t | KP10-80 | Drexlerviridae | | Webervirus | 20 | F/00168 | 6 Dec. 2021 |
| u | KP10-84 | Myoviridae | Tevenvirinae | Slopekvirus | 21 | | |
| v | KP10-85 | Myoviridae | Tevenvirinae | Slopekvirus | 22 | | |
| w | KP10-87 | Myoviridae | Tevenvirinae | Slopekvirus | 23 | F/00180 | 13 Jan. 2022 |
| x | KP10-89 | Myoviridae | Tevenvirinae | Slopekvirus | 24 | | |
| y | KP10-91 | Demerecviridae | | Sugarlandvirus | 25 | F/00169 | 6 Dec. 2021 |
| z | KP10-93 | Myoviridae | Tevenvirinae | Slopekvirus | 26 | | |
| A | KP10-94 | Myoviridae | Tevenvirinae | Slopekvirus | 27 | | |
| B | KP10-95 | Myoviridae | Tevenvirinae | Jiaodavirus | 28 | | |
| C | PKP-33 | Demerecviridae | | Sugarlandvirus | 29 | F/00181 | 13 Jan. 2022 |
| | KPL6a-30 | Ackermannviridae | | | 30 | | |

[0260] The % sequence homology (based on local BLAST) of the isolated phages was compared as set forth in FIG. 1.

[0261] The host ranges (HR) of the phages was tested. HR analysis of all isolated phage was performed in both liquid and solid. HR was determined based on 352 clinical isolated KP strains from IBD/PSC patients. The 352 clinical strains were selected as being the most representative (in terms of capsule type, genomic sequence and MLST) of thousands of KP bacterial strains that were isolated from IBD and PSC patients. The percent coverage of these 352 isolated KP strains is summarized in Table 3, herein below.

TABLE 3

| Phage | % coverage |
|---|---|
| CT-227-KP4M1-19 | 1% |
| CT-227-KP4M1-8 | 1% |
| KP10-94 | 1% |
| KP10-93 | 3% |
| CT-227-KP4M1-7 | 5% |
| CT-227-KP4M1-20 | 9% |
| KP10-95 | 11% |
| KP10-80 | 12% |
| CT-227-KP4M1-11 | 13% |
| 395-D2-3-5 | 16% |
| CT-120-2-11 | 16% |
| KP10-14 | 16% |
| KP10-3 | 19% |
| KP10-64 | 20% |
| PKP-33 | 20% |
| KP10-89 | 20% |
| KP10-2 | 23% |
| 395-D2-3-3 | 23% |
| KP10-48 | 23% |
| KP10-85 | 25% |
| KP10-4 | 25% |
| KP10-61 | 25% |
| KP10-84 | 26% |
| KP10-87 | 26% |
| 395-D2-3-4 | 27% |
| PKP-39D | 27% |
| 395-D2-3-2 | 34% |
| 395-D2-3-1 | 35% |
| KP10-11 | 37% |

[0262] 20 cocktail compositions were prepared, each including a combination of 3 members at similar concentrations. The combinations were tested in a liquid assay against 79 representative bacterial strains. The % coverage is presented in Table 4 below.

TABLE 4

| member phage | % coverage in liquid |
|---|---|
| KP10-11 | 59% |
| KP10-48 | |
| 395-D2-3-2 | |
| KP10-11 | 58% |
| KP10-48 | |
| KP10-85 | |
| KP10-11 | 51% |
| KP10-48 | |
| 395-D2-3-1 | |
| KP10-11 | 62% |
| KP10-85 | |
| 395-D2-3-1 | |
| KP10-11 | 59% |
| KP10-85 | |
| 395-D2-3-2 | |
| KP10-11 | 48% |
| 395-D2-3-1 | |
| 395-D2-3-2 | |
| KP10-48 | 51% |
| KP10-85 | |
| 395-D2-3-1 | |
| KP10-48 | 43% |
| KP10-85 | |
| 395-D2-3-2 | |
| KP10-48 | 38% |
| 395-D2-3-1 | |
| 395-D2-3-2 | |
| KP10-85 | 44% |
| 395-D2-3-1 | |
| 395-D2-3-2 | |
| KP10-11 | 46% |
| KP10-48 | |
| KP10-91 | |
| KP10-11 | 59% |
| KP10-85 | |
| KP10-91 | |
| KP10-11 | 54% |
| 395-D2-3-1 | |
| KP10-91 | |
| KP10-11 | 52% |
| 395-D2-3-2 | |
| KP10-91 | |
| KP10-48 | 43% |
| KP10-85 | |
| KP10-91 | |
| KP10-48 | 25% |
| 395-D2-3-1 | |
| KP10-91 | |
| KP10-48 | 43% |
| 395-D2-3-2 | |
| KP10-91 | |
| KP10-85 | 43% |
| 395-D2-3-1 | |
| KP10-91 | |
| KP10-85 | 41% |
| 395-D2-3-2 | |
| KP10-91 | |
| 395-D2-3-1 | 43% |
| 395-D2-3-2 | |
| KP10-91 | |

[0263] The host range of the phage was also profiled according to the capsule type of the infected bacteria. The results are set forth in FIG. 2. 62 capsule types were found to be infected by the phages, as specified below per each phage. The host range of the phage was also profiled according to the MLST of the infected bacteria. The results are set forth in FIG. 3.

### Example 2

[0264] Phage Combinations Selected According to Bacterial Coverage as Defined by Strain

[0265] For this example, the particular phages are referred to by the single letter designation in Table 1, herein above.

[0266] 2 Phage Combinations

[0267] 2 phage combinations were analyzed in silico for their ability to lyse the 352 different strains of Klebsiella pneumoniae bacteria (as described for Example 1) based on the ability of the single phage to lyse the bacteria as assessed by a liquid media assay.

[0268] The combinations that lyse the highest number of bacterial strains are provided herein below (out of 406 possible combinations, the top 200 are provided). This trait is referred to as “at least 1 phage % coverage”. The number following each combination refers to the Percent trait performance—in this case the percent of the 352 strains that are targeted by the phage combination. The combinations are listed in descending performance grade.

[0269] Thus, for example in the case of [al;55], which provides the highest percent coverage of all the 2 phage combinations, 395-D2-3-1 and KP10-11 lysed 55% of all the strains of Klebsiella pneumonia analyzed.

[0270] [al;55][bl;53][ly;51][lu;50][lq;50][dl;49][lw;49][cl;49][lg;49][lv;49][by;48][lB;48][ay;48][ls;47][bq;47][lC;47][ag;47][lx;46][an;46][lr;46][bg;46][ab;46][li;45][bn;45][aB;45][aq;45][lp;45][lo;45][fl;45][bB;45][as;44][el;44][ap;44][ar;44][ao;43][lt;43][ai;43][wy;43][bC;43][uy;43][lm; 43][ln;43][av;43][vy;43][bi;42][ry;42][bu;42][lj;42][bs;42][qv;42][bd;42][py;41][dy;41][bc;41][n y;41][pq;41][qw;41][xy;41][aw;41][aC;41][bm;40][qr;40][nu;40][ds;40][bw;40][qu;40][dn;40][a d;40][ac;40][nq;40][bp;40][am;40][sy;39][nv;39][aj;39][nw;39][yg;39][bf;39][dv;39][bt;39][af;39][lz;39][qs;39][dq;39][bj;39][cy;39][nr;39][at;39][sw;39][au;39][oq;39][oy;39][br;38][bo;38][ae ;38][uv;38][lh;38][ug;38][qx;38][yB;38][lk;38][ax;38][dr;38][lA;38][pu;38][dp;38][su;38][vC;38][cq;38][dg;38][ru;38][wg;37][uB;37][ou;37][do;37][be;37][sC;37][uw;37][az;37][rg;37][cn;37][bx;37][rC;37][vg;37][pg;37][du;37][dB;37][ns;36][cs;36][rw;36][fy;36][wB;36][cu;36][cv;36][yi ;36][np;36][ah;36][bz;36][dw;36][aA;36][nx;36][uC;36][dx;36][vB;36][ak;36][pB;36][rB;36][ps; 36][qg;35][wC;35][my;35][pC;35][ey;35][nC;35][bh;35][pw;35][no;35][bv;35][pv;35][cr;35][vw ;35][ui;35][di;35][ow;35][oC;35][bA;35][rs;35][bk;35][fn;34][wi;34][Cy;34][qB;34][cp;34][sv;34][cg;34][ri;34][mv;34][ty;34][pi;34][fv;34][mu;33][vi;33][co;33][mr;33][ux;33][pr;33][xC;33][px;33][mq;33][cd;33][df;33][ms;33][rv;33][cx;33][dC;33][eq;32][cC;32][cB;32][sx;32][fq;32].

[0271] The percent of host bacterial strains that are infected by two phages of a phage combination are provided. This trait is referred to as “at least 2 phage % coverage”. The phage combinations are ordered in descending performance grade.

[0272] Thus, for example, in the case of [al;17], when 395-D2-3-1 and KP10-11 are used in a combination, 17% of the bacterial strains analyzed were targeted by both these phage.

[0273] [bv;24][ab;23][au;22][ad;21][aw;20][br;20][bw;20][cw;20][bd;19][bp;19][qy;18][bu;18][ac;18][bx;18][bl;17][ax;17][dw;17][cd;17][rv;17][pr;17][ln;17][al;17][av;17][du;16][pw;16][lp;16][uw;16][vw;16][lr;16][ap;16][ar;16][bc;16][rw;15][bo;15][wx;15][pv;15][cp;14][dC;14][aC;14][vx;14][dl;14][ay;14][dr;14][lw;14][ux;14][dp;14][ru;14][or;14][ly;14][cu;14][op;14][pu;14][by; 13][Cy;13][cr;13][lu;13][qC;13][uv;13][lv;13][rx;13][px;13][dy;12][ov;12][be;12][de;12][dv;12][aq;12][ae;12][cv;12][bs;12][cy;12][np;12][af;12][ew;12][dm;12][dx;12][lo;11][mw;11][fu;11][wC;11][eC;11][an;11][am;11][cl;11][lx;11][ow;11][uC;11][ce;11][cx;11][bn;11][cC;11][dq;11][eu;11][sv;11][bC;11][mp;11][bf;11][py;11][uy;11][lm;11][wy;11][gB;11][lC;11][ao;11][as;11][e p;11][rs;11][lq;11][fw;11][ry;10][df;10][bq;10][cm;10][pC;10][ls;10][fp;10][bm;10][nw;10][cf;10][mu;10][ps;10][qu;10][ox;9][dn;9][cn;9][vy;9][co;9][ex;9][ev;9][os;9][fr;9][cq;9][do;9][nr;9][o u;91[qw;9][nu;9][su;9][er;9][mC;9][fx;9][ny;9][el;9][rC;9][my;9][fl;8][sx;8][at;8][mn;8][mr;8][s y;8][qr;8][sw;8][nv;8][oy;8][gi;8][em;8][en;8][xC;8][tu;8][nC;8][mv;8][ey;8][nx;8][ef;8][pq;7][f C;7][fv;7][fm;7][vC;7][fy;7][no;7][dt;7][tw;7][bt;7][fq;7][pt;7][xy;7][mq;7][ft;7][cs;7][rt;7][iB;7][mx;7][ds;7][eq;7][eo;7][ns;7][qv;6][ty;6][ct;6][mo;6][fs;6][ng;6][fo;6][qx;6][lt;6][ty;6][es;5][st; 5].

[0274] 3 Phage Combinations

[0275] 3 phage combinations were analyzed in silico for their ability to lyse the 352 different strains of Klebsiella pneumoniae bacteria based on the ability of the single phage to lyse the bacteria as assessed by a liquid media assay.

[0276] The combinations with the highest “at least 1 phage % coverage” are provided herein below (out of 3654 possible combinations, the top third (1224) are provided). The number following each combination refers to the Percent trait performance. The phage combinations are ordered in descending performance grade.

[0277] For example, in the case of [alg;66], the combination that provided the highest percent coverage, 395-D2-3-1, KP10-11 and CT-227-KP4M1-11 lysed 66% of all the strains of Klebsiella pneumonia analyzed.

[alg;66][alB;65][blg;65][blB;64][ali;63][lyg;62][bli;62][lug;62][aly;62][lqg;62][alq;62][lyB;61][blq;61][luB;61][bly;61][lqB;61][abl;61][als;61][lvg;61][dlg;60][lwg;60][byg;60][ayg;60][clg;59][alj;59][luy;59][lvB;59][dlB;59][lyi;59][lwB;59][blu;59][alo;59][bqg;59][aln;59][alv;59][blC;59][ayB;59][lui;59][byB;59][lsg;57][lqv;57][lgi;57][lwy;57][lqu;57][alr;57][blj;57][bc;57][ac;57][alC;57][bls;57][clB;57][bln;57][lgs;57][lCg;57][alw;57][bdl;57][lxg;57][abg;57][lvy;57][afl;57][dly;57][bgB;57][lqw;57][adl;56][blw;56][clq;56][cly;56][alt;56][dli;56][agg;56][bfl;56][lrg;56][lsy;56][blt;56][dlq;56][lpg;56][lvi;56][alp;56][lwi;56][lsB;56][dls;56][lxy;56][lsw;56][lqx;56][alu;56][loq;56][bnq;56][flg;56][ael;56][abB;56][clu;56][alz;56][lxB;56][blm;56][lCB;56][cli;56][bny;56][any;56][aqB;56][alm;56][lrB;56][ayi;56][lsu;56][byi;56][lpq;56][alx;56][lry;56][lpB;56][lny;56][flB;56][lgr;56][bel;56][luv;56][loy;56][log;56][luw;56][blo;56][cls;56][alh;56][lpy;56][bqi;55][lyj;55][apg;55][dlv;55][lsC;55][blz;55][dlu;55][arg;55][anq;55][alA;55][blx;55][alk;55][asg;55][luj;55][abn;55][lty;55][aby;55][lnq;55][lsi;55][fly;55][lvC;55][abq;55][ltg;55][loB;55][lou;55][blr;55][elg;55][ely;55][lnu;55][bsy;55][lru;55][luC;55][aoy;55][lCi;55][avg;55][uyg;55][vyg;55][blp;55][clv;55][lgj;55][lgt;55][blh;55][arB;54][abi;54][bCg;54][blk;54][dlx;54][asB;54][lmg;54][lxi;54][blA;54][ang;54][asy;54][aog;54][ary;54][apB;54][lri;54][lwj;54][lwC;54][ap y;54][flq;54][bqs;54][aqi;54][lpi;54][wyg;54][flv;54][dlw;54][lsv;54][dlj;54][elq;54][lvw;54][cl C;54][dln;54][low;54][aoq;54][bng;54][lCy;54][elB;54][blv;54][lmy;54][qvg;54][lpu;54][dlt;54][ryg;54][ans;54][lux;54][apq;54][uyB;54][ags;54][ltB;54][bug;54][dlo;54][lxC;53][aoB;53][cdl; 531[fli;53][clj;53][lnw;53][lvj;53][loi;53][avB;53][ar;53][vyB;53][lrw;53][anr;53][loC;53][clx; 53][dlr;53][buy;53][dfl;53][lnv;53][nuy;53][flw;53][lmB;53][anB;53][flu;53][bnu;53][pyg;53][n qv;53][lsx;53][clt;53][bCB;53][clo;53][bcq;53][bcy;53][avy;53][lqy;53][bwy;53][elu;53][dlC;53][buB;53][dlp;53][wyB;53][lwx;53][clr;53][bsg;53][ltu;53][nvy;53][cln;53][ltw;53][lqC;53][bq w;53][pqg;53][fls;53][lpC;53][qvB;53][aqv;53][bnC;53][cfl;53][bdg;53][bnB;53][lyz;53][ayj;53][ltv;53][byj;53][ryB;53][bqu;53][lmq;53][lmu;53][lrC;53][ari;52][anv;52][luz;52][nry;52][lpw; 52][bpq;52][ano;52][lrs;52][awy;52][api;52][dyg;52][lns;52][asi;52][xyg;52][nwy;52][qrg;52][d ny;52][pyB;52][bdq;52][abs;52][clp;52][bpy;52][bmq;52][aoi;52][els;52][bmg;52][eli;52][elv;52][bdn;52][lyh;52][bsB;52][bdy;52][qwg;52][ltC;52][lms;52][bcg;52][lqz;52][ngr;52][bdB;52][b ns;52][ani;52][flr;52][bpg;52][elw;52][qug;52][bqj;52][aCg;52][lmv;52][bfy;52][lps;52][lvx;52][clw;52][lyA;51][lyk;51][qsw;51][lnC;51][flx;51][lCj;51][flo;51][flC;51][lti;51][acy;51][awg;51][lwz;51][bmy;51][nqu;51][pqB;51][swy;51][dyB;51][amg;51][ltx;51][dsy;51][lov;51][lmw;51][luh;51][abC;51][del;51][anp;51][vyi;51][lnx;51][clm;51][dlm;51][nqw;51][lox;51][avi;51][cel;51][dlz;51][bni;51][lxj;51][bwg;51][bfg;51][luk;51][bty;51][uyi;51][uvy;51][lsj;51][bCi;51][lrx;51][luA;51][nxy;51][boy;51][quB;51][ady;51][adg;51][lgh;51][ouy;51][bry;51][lmi;51][bqt;51][wyi;51][ngs;51][afg;51][qrB;51][bfn;51][aps;51][lrv;51][amy;51][lng;51][xyB;51][clz;51][los;51][lst;51][lnr;51][dnq;51][auy;51][bmB;51][dlh;51][ruy;51][abj;51][bxy;51][axy;51][acg;51][bo q;51][aCB;51][adn;51][bcn;51][syg;51][lpx;51][elo;51][lpv;51][lgk;51][lqA;51][ryi;51][anj;51][bpB;51][puy;51][afy;51][npq;51][lmx;51][noq;51][qwB;51][bsC;51][dqs;51][lwh;51][bfq;51][lv z;51][aey;51][ngx;51][aqj;50][dsg;50][flp;50][dlk;50][qvi;50][lwA;50][bui;50][fln;50][nsy;50][b gr;50][agy;50][aqw;50][amB;50][bcB;50][suy;50][aug;50][dlA;50][elx;50][asC;50][btg;50][afn; 50][anC;50][bqy;50][npy;50][abp;50][lno;50][lgj;50][quv;50][aos;50][elr;50][aty;50][uwy;50][1 wk;50][awB;50][lgi;50][svy;50][clh;50][dvy;50][bfB;50][ars;50][qsg;50][qsv;50][bwB;50][lrj;50][atg;50][aCy;50][adB;50][lpj;50][brg;50][dry;50][acq;50][pyi;50][bqC;50][dqv;50][psy;50][bn t;50][bnw;50][dns;50][bnj;50][noy;50][byz;50][bmn;50][dpy;50][anu;50][afB;50][clA;50][dqg;50][bCy;50][ant;50][ayz;50][dvg;50][uvg;50][bsi;50][anw;50][pqu;50][lgB;50][liB;50][bqx;50][1 gh;50][lvh;50][lrt;50][lnp;50][flj;50][pqs;50][lnB;50][bdi;50][clk;50][lot;50][lmo;49][bsu;49][lv k;49][pqv;49][bey;49][bnr;49][beq;49][qxg;49][lvA;49][dsB;49][amq;49][asw;49][dyi;49][pgi;49][ljB;49][duy;49][cqv;49][lmr;49][auB;49][elt;49][asv;49][nyg;49][nuv;49][lgz;49][oyg;49][ab o;49][adq;49][acn;49][rwy;49][ogg;49][syB;49][lpt;49][elp;49][oqu;49][lmC;49][abc;49][abm;49][aoC;49][acB;49][axg;49][abu;49][lor;49][vwy;49][ads;49][lop;49][arC;49][cvy;49][qsu;49][q rw;49][lgA;49][btB;49][cuy;49][qru;49][pug;49][rsy;49][cyg;49][dgr;49][doy;49][buC;49][dxy; 49][lgk;49][dnv;49][bqz;49][dvB;49][bci;49][dqB;49][elC;49][bog;49][ayh;49][brB;49][dpq;49][pvy;49][abw;49][byh;49][aeq;49][abf;49][owy;49][elj;49][aeg;49][bvy;49][lsz;49][nsu;49][amn ;49][rug;49][ams;49][ari;49][bds;49][efl;49][atB;49][abr;49][fny;49][abt;49][cas;49][asB;49][uv B;49][qvw;49][lCz;49][loj;49][csy;49][oqB;49][aCi;49][cny;49][abd;49][qwi;49][lpr;49][vCg;49][bno;49][bnp;49][bmi;49][eln;49][swg;49][aqx;49][oyB;49][byA;49][lhB;49][lnt;49][byk;49][cnq;49][acs;49][ayk;49][aqC;49][ayA;49][xyi;49][dwy;49][sug;49][nru;49][bpi;49][lsh;48][pwy ;48][lni;48][lmp;48][drg;48][quw;48][apj;48][ngg;48][nyB;48][uxy;48][asu;48][aqu;48][agt;48][apC;48][dpg;48][qui;48][puB;48][qxB;48][avC;48][lkB;48][oqw;48][awi;48][nug;48][lzB;48][d oq;48][asj;48][lxz;48][qrs;48][dnr;48][dnu;48][nsw;48][flt;48][bCj;48][lAB;48][bqh;48][ltj;48][bwi;48][abe;48][bxg;48][boB;48][lsA;48][bcC;48][bcs;48][lsk;48][nvC;48][bqv;48][anz;48][cqr ;48][ruB;48][anx;48][apv;48][wyj;48][agj;48][adi;48][aen;48][pqw;48][adp;48][arj;48][axB;48][ami;48][fyg;48][cry;48][pxy;48][cqg;48][uyj;48][aop;48][beg;48][muy;48][dqx;48][lCh;48][apr; 48][fvy;48][bqk;48][pqx;48][flm;48][agi;48]j[bgA;48][aeB;48][nou;48][cqu;48][suB;48][aor;48][dsi;48][cyB;48][sxy;48][lmt;48][afq;48][afs;48][abz;48][nvg;48][rxy;48][amr;48][aci;48][bfi;48][mqv;48][vCB;47][bcu;47][bnz;47][nuw;47][lCA;47][dpB;47][avj;47][bnx;47][rCg;47][amo;47][bms;47][lCk;47][afi;47][aiB;47][apt;47][ado;47][vyj;47][drB;47][wxy;47][dqu;47][lij;47][ar w;47][lxh;47][pry;47][agB;47][nuB;47][syi;47][ogs;47][afo;47][lrz;47][cxy;47][bwC;47][oug;47][agh;47][swB;47][dng;47][adr;47][aco;47][qsx;47][ast;47][aqz;47][lnj;47][rvy;47][ovy;47][bd u;47][lxA;47][oxy;47][lpz;47][oqv;47][oqi;47][lxk;47][osy;47][agz;47][bdC;47][ajB;47][aru;47][art;47][vxy;47][acp;47][apw;47][ben;47][bgj;47][anh;47][oyi;47][nsC;47][bmC;47][mvy;47][d ps;47][afp;47][dsv;47][dno;47][aov;47][aow;47][aou;47][acr;47][lmn;47][aoj;47][bpC;47][fqv;47][cpq;47][bfC;47][bpu;47][dug;47][nwg;47][bsw;47][nqB;47][uwg;47][cpy;47][dgi;47][ouB;47][aot;47][apu;47][fnq;47][ory;47][rwg;47][dgw;47][bxB;47][cnu;47][bti;47][coq;47][myg;47][m ry;47][buj;47][qsi;47][bvg;47][lrh;47][ank;47][dvi;47][btC;47][swC;47][nsv;47][npu;47][flz;47][aes;47][qrx;47][fyB;47][dnp;47][abh;47][nyi;47][aui;47][dsu;47][liz;47][afr;47][dsw;47][fnv;47][fwy;47][coy;47][bps;47][dog;47][elm;47][sCg;47][bgi;47][pqr;47][bri;47][agk;47][agA;47][q vy;47][bgh;47][amp;47][qrv;47][nrg;47][mgr;47][amv;47][lrk;47][ati;47][atv;47][lih;47][eqv;47][abk;47][abA;47][eny;47][afv;47][auv;47][ery;47][anA;47][bmu;47][qvx;47][bgB;47][boC;47][qvj;47][pvg;47][lrA;47][oqx;47][adv;47][biB;47][dnx;47][boi;47][abx;47][beB;47][bnv;47][aqh; 47][nrC;47][bnh;47][nvB;47][cqx;47][lph;47][dnB;47][cqB;47][lmj;47][nuC;47][duB;47][qwy;46][bnk;46][fry;46][twy;46][mxy;46][bgz;46][uwB;46][mny;46][qux;46][agk;46][rCB;46][brC;46][aqA;46][lpA;46][abv;46][ahB;46][cyi;46][mqs;46][suw;46][suC;46][msy;46][psg;46][uvC;46][ryj;46][dnw;46][uCg;46][lpk;46][bjB;46][tvy;46][nrw;46][bdj;46][euy;46][cvg;46][cug;46][aer ;46][svC;46][nrs;46][vCy;46][asx;46][uvi;46][elz;46][bgA;46][qtv;46][rCy;46][bgk;46][avw;46][evy;46][loz;46][akB;46][doB;46][pCg;46][bst;46][bnA;46][drs;46][csg;46][pui;46][aei;46][dos; 46][bfs;46][dsC;46][buw;46][aep;46][loh;46][pyj;46][suv;46][cns;46][mwy;46][dfy;46][nty;46][fuy;46][acv;46][flh;46][nCy;46][opy;46][eyg;46][nwB;46][fsy;46][liA;46][dyj;46][dwg;46][aeo; 46][qxi;46][azB;46][asz;46][bdp;46][dxg;46][arv;46][qvC;46][dri;46][dpi;46][flA;46][ngi;46][w Cg;46][loA;46][myB;46][cnv;46][psu;46][qwx;46][qwj;46][mqu;46][fpy;46][rui;46][lok;46][csu ;46][flk;46][rwB;46][axi;46][aAB;46][sCB;46][bou;46][tuy;46][nui;46][opq;46][bsj;46][uCy;46][nwC;46][bcj;46][nyj;46][swi;46][dfn;46][vwg;46][bvB;46][lik;46][egr;46][aox;45][aev;45][arz ;45][quy;45][apz;45][bhB;45][pgj;45][rsC;45][sui;45][pvB;45][bxC;45][pwg;45][bdf;45][bdt;45][rsg;45][sCy;45][ash;45][xyj;45][wCy;45][nvw;45][vCi;45][dni;45][fvg;45][ltz;45][epy;45][dsx ;45][dty;45][noC;45][esy;45][nrB;45][foy;45][uCB;45][ogr;45][aCj;45][ewy;45][awj;45][ask;45][bkB;45][nvi;45][qry;45][bcd;45][duv;45][now;45][asA;45][Cyg;45][wyz;45][cdy;45][elh;45][oui;45][fxy;45][bCz;45][ruC;45][bzB;45][nux;45][dxB;45][rty;45][cgi;45][brs;45][ouC;45][bru; 45][bwj;45][psB;45][arx;45][bdr;45][enq;45][cuB;45][qrC;45][dwB;45][dmy;45][crg;45][svg;45][apx;45][npC;45][bcp;45][btu;45][bcm;45][ngt;45][mvg;45][psC;45][aij;45][bdo;45][bdm;45][a ph;45][mnq;45][egs;45][cvB;45][elA;45][elk;45][bdw;45][pqy;45][pCB;45][eyB;45][arh;45][m qx;45][fnr;45][ntv;45][bct;45][quj;45][dnC;45][bei;45][nwi;45][bAB;45][cds;45][dpu;45][dvC;45][doi;45][pCy;45][pty;45][rsu;45][fqs;45][osu;45][csC;45][uyz;45][osC;45][moq;45][tyg;45][m oy;45][ngy;45][cwy;45][awC;45][mpy;45][nuj;45][cnr;45][txy;45][mpq;45][apA;45][vyz;45][ar A;45][mug;45][adj;45][rCi;45][nrv;45][ark;45][epq;45][avz;45][mqw;45][bos;45][lnz;45][bpj;45][ngj;45][acj;45][qtw;45][puC;45][fyi;45][apk;45][aiz;45][aoz;45][bcf;45][aoh;45][qrj;45][beu; 45][beC;45][lth;45][cng;45][qsC;45][fqr;45][bco;45][vwB;45][mrg;45][acC;45][csB;45][bxi;45][wCB;45][oCg;45][fnu;45][lmz;45][oCy;44][fqg;44][dfs;44][nsx;44][amw;44].

[0278] The combinations with the highest “at least 2 phage % coverage” are provided herein below. The phage combinations are ordered in descending performance grade.

[0279] Thus, for example, in the case of [alg;17], when 395-D2-3-1, KP10-11 and CT-227-KP4M1-11 are used in a combination, 17% of the bacterial strains analyzed were targeted by at least 2 of the 3 phages.

[abl;33][aby;31][abv;31][abd;30][bdv;30][abr;30][bly;30][blp;30][alu;30][alp;30][blv;30][adl;28][alw;28][bdl;28][buv;28][adw;28][abp;28][aly;28][auw;28][abw;28][abc;28][alv;28][abo;28][ad v;28][blw;28][abq;28][adu;28][abu;28][bdw;28][adx;28][lpv;28][blr;28][abs;28][alr;28][ady;28][abm;28][acl;28][bfv;28][auy;28][bru;28][bdp;28][brw;28][bpv;28][bqv;28][aqu;28][brv;28][bdr ;28][bdy;28][blu;28][bvy;28][bcv;27][blq;27][abC;27][bpw;27][bvw;27][acu;27][abx;27][bcl;27][lpr;27][bev;27][buw;27][arv;27][bvx;27][awy;27][dlp;27][acd;27][bvC;27][abn;27][acw;27][a wC;27][adr;27][avy;27][auC;27][lwy;27][bnv;27][dlw;27][lry;26][bdx;26][buy;26][anw;26][aq w;26][apu;26][bmv;26][bcw;26][ads;26][acv;26][bsw;26][bdo;26][aux;26][alq;26][bry;26][bls;26][lvy;26][bqy;26][bov;26][awx;26][lpy;26][lqy;26][dly;26][abf;26][dlv;26][dlr;26][lpu;26][bdu ;26][auv;26][blC;26][alx;26][avw;26][bds;26][alC;26][acx;26][bcr;26][arw;26][bCy;26][abt;26][brx;26][adq;26][bow;26][ado;26][btv;26][bn;26][aln;26][bpr;26][dlu;26][blx;26][aru;26][bou;26][adp;26][bpu;26][bwy;26][brC;26][luv;26][anu;26][ber;25][bwx;25][afu;25][bcd;25][cwx;25][bpy;25][lpw;25][lrv;25][lnr;25][amu;25][alo;25][adC;25][apv;25][cvw;25][pvw;25][ary;25][du w;25][bgr;25][als;25][adn;25][lvw;25][cuw;25][bcp;25][luy;25][apw;25][apr;25][blo;25][luw;25][bnw;25][axy;25][clw;25][bsv;25][axC;25][ruv;25][aew;25][lrw;25][asw;25][pqy;25][agy;25][p rw;25][lps;25][aqv;25][bpx;25][cqy;25][crw;25][bmw;25][abe;25][lqw;25][bor;25][bux;25][aou; 25][adf;25][aeu;24][lnw;24][rvw;24][bfr;24][alm;24][lgr;24][aow;24][dqy;24][brs;24][lnv;24][1 np;24][dvw;24][apy;24][lru;24][acr;24][clp;24][bcu;24][aqx;24][bcx;24][atu;24][avC;24][quy;24][bnp;24][drv;24][asu;24][qry;24][bop;24][cdl;24][adt;24][cpw;24][clv;24][dln;24][cdw;24][bp C;24][bxy;24][apx;24][bwC;24][lxy;24][acC;24][clr;24][prv;24][dpr;24][dlq;24][bqu;24][ade;24][lrC;24][bfu;24][acn;24][bdn;24][bew;24][adm;24][crv;24][lCy;24][uvw;24][dlo;24][bvi;24][by z;24][drw;24][qsy;24][lqv;24][cdu;24][bnr;24][cpv;24][bvk;24][acs;24][bvh;24][bdq;24][bvg;24][ngy;24][anv;24][acy;24][cpr;24][bvA;24][bps;24][lqu;24][bvB;24][arx;24][bvj;24][bfw;24][in u;24][lpq;24][uwx;24][acp;24][dpv;24][qwy;24][cly;23][luC;23][bdC;23][bpq;23][duv;23][aov; 23][bcs;23][opr;23][lpx;23][anp;23][anx;23][bdm;23][bmr;23][bco;23][blm;23][amw;23][brt;23][avx;23][csw;23][box;23][dux;23][qvy;23][dwy;23][dru;23][dls;23][afl;23][afw;23][asy;23][dv y;23][cow;23][rvy;23][bel;23][acq;23][dC;23][lor;23][apC;23][bmp;23][ogy;23][pwy;23][bqw; 23][ruw;23][pru;23][ael;23][lsy;23][lrs;23][dpw;23][puv;23][lmr;23][rwy;23][boC;23][rvx;23][a ui;23][abh;23][arC;23][bsu;23][pwx;23][ars;23][npr;23][amv;23][abz;23][npv;23][aug;23][fqy;23][cdv;23][btw;23][abk;23][aex;23][abA;23][qxy;23][abj;23][lop;23][bnx;23][loy;23][dlx;23][n vw;23][bfl;23][lwC;23][vwx;23][bdf;23][apq;23][abB;23][abi;23][aqr;23][abg;23][qCy;23][lsu; 23][beo;23][cdy;22][dCy;22][lvC;22][auk;22][adg;22][auA;22][lvx;22][ace;22][vwy;22][lny;22][opw;22][dop;22][dpu;22][dnw;22][auB;22][bmu;22][bfp;22][bep;22][cln;22][aCy;22][boq;22][buC;22][lou;22][auj;22][npw;22][auh;22][aop;22][auz;22][cnw;22][puw;22][aor;22][any;22][dw x;22][rvC;22][lpC;22][mqy;22][ovw;22][boy;22][lux;22][duy;22][asv;22][atw;22][rwx;22][lov; 22][cCy;22][bsx;22][bex;22][bqx;22][bcn;22][adB;22][lmp;22][uwy;22][lnq;22][dow;22][lnx;22][frv;22][lrx;22][cwy;22][clu;22][orw;22][cfw;22][mvw;22][lno;22][amx;22][lwx;22][adi;22][cu v;22][prx;22][aco;22][egy;22][prs;22][pvx;22][ouv;22][dgw;22][mpr;22][bmx;22][erv;22][lmn; 22][bxC;22][alt;22][lsv;22][ctw;22][asx;22][uvx;22][aps;22][dou;22][cdr;22][prC;22][dor;22][af v;22][blt;22][nrw;22][cdq;22][vCy;22][bnu;22][cdp;22][adj;22][bde;22][qrv;22][orv;22][lsw;22][mrv;22][nrv;22][cvx;22][anr;22][cpx;22][pux;22][low;22][cwC;22][afy;22][rsw;22][bes;22][ce w;22][oru;22][wCy;22][adz;22][pry;22][bdt;22][lqC;22][lnC;22][btu;22][epr;22][awB;22][lns;22][awg;22][lmv;21][bfx;21][dvx;21][nuw;21][pwC;21][adk;21][dpy;21][adA;21][bcy;21][ruy;21][dry;21][cmw;21][fly;21][dlm;21][bny;21][awi;21][clq;21][uvy;21][afq;21][adh;21][amr;21][bn o;21][vwC;21][acm;21][ouw;21][cop;21][pvy;21][ovx;21][ags;21][acf;21][svw;21][mpv;21][fln; 21][anC;21][cqw;21][brj;21][puy;21][lmy;21][elr;21][bey;21][mpw;21][dsu;21][opv;21][bpt;21][quw;21][del;21][cls;21][dfu;21][amy;21][flp;21][bcf;21][pCy;21][uwC;21][aer;21][amp;21][uC y;21][lmu;21][bwg;21][dov;21][bos;21][bwB;21][qty;21][afx;21][fuw;21][psw;21][aev;21][beu; 21][dsw;21][afr;21][cux;21][cdC;21][npx;21][asC;21][clx;21][evw;21][rCy;21][brB;21][cnp;21][bce;21][euw;21][bwi;21][anq;21][drs;21][los;21][mwx;21][lnB;21][opu;21][pvC;21][dfl;21][at x;21][brg;21][bfo;21][lmw;21][muw;21][wxy;21][dqu;21][brz;21][dwC;21][bcC;21][clo;21][ao x;21][pqw;21][bcm;21][lng;21][cdn;21][elp;21][orx;21][aoy;21][epw;21][rtv;21][rux;20][suw;20][cor;20][awh;20][btx;20][brk;20][cdm;20][lqx;20][dnu;20][bri;20][crx;20][pqr;20][bmy;20][b sC;20][brA;20][awA;20][awz;20][aoC;20][cnv;20][drx;20][cdo;20][brh;20][cru;20][awk;20][bq C;20][dfw;20][fvw;20][awj;20][afC;20][cnr;20][cwB;20][flw;20][dnv;20][flu;20][duC;20][owx; 20][drC;20][cdf;20][dqC;20][rwC;20][amC;20][dew;20][fru;20][bns;20][crs;20][aoq;20][mop;20][elw;20][bmo;20][lpt;20][dmu;20][act;20][eln;20][dtw;20][rsv;20][nvx;20][fpr;20][cdt;20][rsu ;20][npu;20][ely;20][epv;20][cdx;20][uxy;20][bct;20][aep;20][swx;20][bwj;20][wxC;20][bms;20][cwg;20][ano;20][opC;20][bwh;20][erw;20][cpy;20][lmq;20][mrw;20][lgs;20][elv;20][lrt;20][elu;20][prt;20][bwz;20][dtu;20][dmw;20][aey;20][bwk;20][dpq;20][dpC;20][clC;20][dnr;20][bw A;20][cde;20][vxy;20][frw;20][lni;20][bsy;20][deu;20][cpu;20][qvw;20][cov;20][bdg;20][fuv;20][cwj;20][dnp;20][rxy;20][acB;20][cwh;20][fpu;20][dpx;20][nop;20][dqv;20][cps;20][cwA;20][lsx;20][bfy;20][suy;20][afp;20][qwC;20][nwx;20][eux;20][dmr;20][fCy;20][lsC;20][cwk;20][b qs;20][ewx;20][cry;20][nps;20][cds;20][loq;20][qru;20][uxC;20][bdB;20][nwy;20][cwi;20][cwz; 20][psu;20][ans;19][quv;19][ltw;19][lnt;19][eru;19][dvC;19][dps;19][atv;19][fpw;19][flr;19][eC y;19][bfs;19][aty;19][aqC;19][lox;19][sCy;19][mpu;19][dmv;19][opx;19][bdi;19][qrw;19][dxy;19][cuy;19][puC;19][cnu;19][cny;19][fux;19][acg;19][pqu;19][bcq;19][cfu;19][ruC;19][qwx;19][loC;19][nru;19][xCy;19][fwx;19][bpj;19][aes;19][bdz;19][dey;19][bdj;19][dsv;19][quC;19][eov; 19][fop;19][amq;19][lms;19][bpz;19][mvx;19][fpv;19][bot;19][ltu;19][nuv;19][flq;19][bpg;19][f lv;19][cqC;19][dfr;19][bpB;19][lxC;19][doC;19][amn;19][ams;19][tvw;19][bpi;19][ogr;19][afn; 19][pqv;19][lmC;19][cdg;19][cou;19][dmC;19][opq;19][bdk;19][csu;19][bpA;19][bnq;19][bpk; 19][bdA;19][bdh;19][ben;19][cmu;19][owC;19][psv;19][csv;19][bnC;19][cmv;19][bph;19][aen; 19][cep;19][der;19][cvy;19][cmp;19][doy;19][opy;19][oCy;19][dmp;19][owy;19][aci;19][clm;19][cdB;19][dgr;19][evx;19][dep;19][dny;19][mru;19][cpC;19][dfv;19][eop;19][pxy;19][ptw;19][dwg;18][lmo;18][pqC;18][qyk;18][cel;18][nCy;18][dsy;18][swy;18][fvx;18][eqC;18][atC;18][q yh;18][qux;18][cfr;18][ovC;18][uvC;18][qyg;18][orC;18][cfl;18][qyz;18][bui;18][csx;18][qyA;18][qsu;18][nrx;18][ors;18][qyj;18][muv;18][agt;18][rtw;18][ovy;18][nov;18][qyB;18][nux;18][n ow;18][tuw;18][cfv;18][ceu;18][bug;18][ayi;18][cev;18][bxB;18][cvC;18][deq;18][buj;18][buB; 18][psx;18][cuC;18][ltv;18][nwC;18][euv;18][dwi;18][nuy;18][afs;18][for;18][cpq;18][cqu;18][buz;18][acj;18][mnw;18][buh;18][mov;18][eow;18][fuy;18][bxg;18][art;18][dfq;18][cmy;18][a mo;18][cdi;18][elq;18][dfy;18][aeq;18][buA;18][rsx;18][buk;18][dfp;18][bxi;18][dwB;18][dnC; 18][dfC;18][mow;18][dxC;18][pwB;18][prj;18][mwy;18][dug;18][pxC;18][dmy;18][suv;18][rtu ;18][cer;18][nor;18][epu;18][nqw;18][bty;18][aeo;18][fgC;18][tux;18][npy;18][dnx;18][sux;18][ach;18][axi;18][nuC;18][mux;18][rsy;18][aeC;18][cox;18][doq;18][mpx;18][acz;18][oux;18][ax g;18][cfp;18][cdj;18][acA;18][ack;18][pwg;18][lmx;18][axB;18][svx;18][ewy;18][dwj;18][mpy; 18][bxj;18][qvC;18][rvj;18][bxA;18][dwz;18][bxk;18][cdz;18][nvy;18][epx;18][dsC;18][ort;18][els;18][dev;18][mqC;18][fov;18][nqu;18][mCy;18][dox;18][bxh;18][frs;18][oqv;18][nsw;18][a os;18][prB;18][fwy;18][cmr;18][bcB;18][qvx;18][bxz;18][oqw;18][prz;18][uwg;18][prg;18][fry; 18][flC;18][eor;18][apt;18][cfy;18][ory;18][crC;18][cpt;18][aef;18][dno;18][cdA;17][elC;17][bl k;17][dsx;17][dit;17][ptv;17][cdk;17][axk;17][blA;17][pwi;17][cno;17][csy;17][fpy;17][axj;17][cns;17][blh;17][flm;17][blB;17][bli;17][fpx;17][deo;17][axz;17][afo;17][fqu;17][rvB;17][lty;17][blj;17][lnA;17][esw;17][lnj;17][dwk;17][blz;17][blg;17][qrs;17][axh;17][dmn;17][beg;17][bfn; 17][uwB;17][erx;17][frx;17][suC;17][dnq;17][dwh;17][fnp;17][uwi;17][fls;17][vxC;17][esv;17][bfq;17][dui;17][nry;17][rg;17][twx;17][axA;17][ceo;17][beq;17][dwA;17][dex;17][fwC;17][nr C;17][rvz;17][bmn;17][cmx;17][duB;17][vwB;17][cdh;17][vwg;17][dmo;17][mrs;17][den;17][a fm;17][fnw;17][enw;17][enp;17][nqC;17][lnk;17][pri;17][cex;17][prk;17][rvA;17][efw;17][vwi; 17][ctu;17][rvk;17][rvh;17][prA;17][rvi;17][osv;17][fsu;17][cey;17][msw;17][prh;17][lnz;17][in h;17][mps;17][dmx;17][alg;17][cfx;17][ali;17][alj;17][psC;17][elm;17][nrs;17][qrx;17][cnq;17][evy;17][bmC;17][bfC;17][alA;17][mvy;17][alh;17][alk;17][dqs;17][alz;17][rsC;17][cxy;17][sxy ;17][dqx;17][alB;17][mor;17][qrC;17][fqw;17][qsC;17][fnu;17][mrx;17][dpt;17][duz;17][avB;17][duj;17][lrj;17][pwz;17][lpB;17][avg;17][crt;17][avz;17][cms;17][lpj;17][dtv;17][cnx;17][euy; 17][env;17][swC;17][nou;17][ers;17][elx;17][dmq;17][msu;17][avA;17][avj;17][dem;17][ouy;17][avk;17][coC;17][avi;17][cqr;17][lpz;17][cnC;17][dns;17][flo;17][pwj;17][coy;17][lpg;17][av h;17][mry;17][dtC;17][oqu;17][fvy;17][ouC;17][mnp;17][cfC;17][aem;17][fou;17][nsu;17][bci; 17][efu;17][mwC;17][def;17][emw;16][esu;16][duA;16][fow;16][cef;16][pwh;16][fpC;16][rtx;16][lpi;16][duk;16][nsy;16][ptu;16][des;16][pwk;16][opt;16][lrz;16][rwg;16][lpA;16][deC;16][ps y;16][tCy;16][cmn;16][arj;16][lph;16][pwA;16][eou;16][duh;16][ctv;16][eps;16][mnu;16][det;16][lpk;16][lrg;16][lrB;16][dfx;16].

[0280] The percent of host bacterial strains that are infected by three phages of a phage combination are provided. This trait is referred to as “at least 3 phage % coverage”. The phage combinations are ordered in descending performance grade.

[0281] The phage combinations are ordered in descending performance grade.

[0282] Thus, for example, in the case of [abu;18], when 395-D2-3-1, KP10395-D2-3-2 and KP10-84 are used in a combination, 18% of the bacterial strains analyzed were targeted by each of the 3 phage.

[abu;18][abw;17][brv;17][bvw;16][abv;16][abd;16][adu;16][acw;16][bpr;15][abx;15][ad w;15][cdw;15][auw;15][bpv;15][acd;15][abr;14][bcw;14][bvx;14][abp;14][bdw;14][brw;14][abc ;14][bpw;14][apw;14][buw;14][aux;14][bwx;14][avw;14][bdu;14][bcd;13][acu;13][aru;13][awx; 13][cpw;13][blr;13][auv;13][adp;13][buv;13][arw;13][brx;13][apu;13][bdr;13][bov;12][dpw;12][duw;12][prv;12][bpu;12][bux;12][bru;12][avx;12][bor;12][cuw;12][bpx;12][acp;12][bdv;12][ab 1;12][adr;12][blv;12][bcv;12][adC;12][apr;12][prw;12][cdu;12][bcr;12][bdp;12][bcp;12][puw;12][cdp;12][rvw;12][bcu;12][crw;12][adl;12][bop;12][drw;11][vwx;11][arv;11][acr;11][arx;11][al u;11][abe;11][blw;11][lpr;11][cvw;11][blp;11][cdr;11][alw;11][pvw;11][adv;11][adx;11][ruw;11][ade;11][qCy;11][dwC;11][apx;11][bde;11][apv;11][dvw;11][alr;11][pru;11][uwx;11][dew;11][dwx;11][uvw;11][cpu;11][bdx;11][pwx;11][dpu;11][deC;11][duC;11][bsv;11][lpw;11][orv;11][rvx;11][cdC;11][opr;11][cpr;11][lrv;11][auC;11][dpr;11][cde;11][cew;11][rwx;11][bd;11][lnp; 11][aeu;11][dru;11][prx;11][blu;11][afu;10][agy;10][aqC;10][rux;10][cwx;10][bew;10][acy;10][cru;10][adm;10][dmw;10][cwC;10][ady;10][blx;10][acx;10][lrw;10][bdC;10][abC;10][bow;10][acv;10][beu;10][bcx;10][opv;10][cdx;10][abo;10][aew;10][auy;10][pvx;10][bcy;10][clw;10][cw y;10][afw;10][bln;10][deu;10][cmw;10][aln;10][alp;10][amw;10][aeC;10][beC;10][awC;10][adq ;10][acC;10][alx;10][ruv;10][cdy;10][drv;10][abf;10][cdv;10][aCy;10][bep;10][aby;10][ewC;10][uvx;10][acl;9][aep;9][brs;9][ceC;9][box;9][duv;9][ace;9][opw;9][bvy;9][bce;9][cr;9][adf;9][lr u;9][puv;9][lop;9][cdl;9][cdm;9][pux;9][dpx;9][blo;9][dlw;9][dux;9][dqC;9][bev;9][dlr;9][bwy; 9][epw;9][lwx;9][alv;9][lor;9][awy;9][euC;9][dpC;9][drx;9][amu;9][afp;9][lvw;9][luw;9][dlu;9][euw;9][bwC;9][rsv;9][acf;9][acm;9][lrx;9][abn;9][dep;9][dlp;9][bfw;9][cux;9][cfw;9][bry;9][ab s;9][dfw;9][duy;9][clp;9][dqy;9][dpv;9][bpy;9][dmp;9][dmu;9][mpw;9][bc1;9][cpv;9][buC;9][fp w;9][cuC;9][aor;9][asu;9][aow;9][ovw;9][dCy;9][aop;9][bnp;9][uwC;9][orw;9][adn;9][cdf;9][cu y;9][lpx;9][bcC;9][lpu;9][afx;9][lny;9][cuv;9][ceu;9][aou;9][lnr;9][cpy;9][dvx;9][bfp;9][amp;9][fuw;9][abq;9][cep;9][bdy;9][epu;9][bex;9][aev;9][apC;9][clr;9][dwy;9][bnr;9][bco;9][dfu;9][crx ;9][aqu;9][anu;9][bps;9][bdm;9][cow;9][bdf;9][psv;8][pwC;8][abm;8][acq;8][bfu;8][cqw;8][evw ;8][ewx;8][dev;8][cmp;8][bsu;8][bmp;8][cnw;8][lpv;8][opx;8][bmw;8][aov;8][dqu;8][aox;8][pry ;8][muw;8][der;8][bdo;8][ber;8][bou;8][drC;8][cpC;8][apy;8][cpx;8][lqy;8][bdq;8][dln;8][lnw;8][bnu;8][afr;8][bnv;8][cdq;8][lux;8][bsx;8][cop;8][alC;8][asv;8][bfx;8][fpr;8][dfp;8][dlC;8][bfr; 8][arC;8][npw;8][anp;8][aco;8][dmC;8][lvx;8][cor;8][cfp;8][buy;8][dpy;8][lmp;8][aly;8][bcq;8][cvx;8][epC;8][bnw;8][erw;8][ops;8][cry;8][dex;8][aer;8][bqw;8][aex;8][bqy;8][clu;8][npr;8][orx ;8][ado;8][opu;8][dow;8][anw;8][be;8][osv;8][dry;8][cln;81 [aaw;8][bcm;81[dem;81[prs;8][owx; 8][ary;8][cer;8][dnp;8][bmu;8][lnu;8][uwy;8][crC;8][dgw;8][fwx;8][fpu;8][bpC;8][bos;8][dlm;8][bcf;8][bdn;8][bmr;8][cdn;8][cfu;8][lmw;8][svx;8][puC;8][cdo;8][dxC;8][quy;7][bmv;7][oru;7][euv;7][cvy;7][mpu;7][cmu;7][ael;7][cqy;7][anr;7][lpC;7][blm;7][fux;7][lov;7][pwy;7][mwC;7][alm;7][rwC;7][aem;7][mrw;7][cnp;7][suv;7][lpy;7][dmy;7][low;7][epx;7][exC;7][dor;7][emw;7][bvC;7][ovx;7][quC;7][ouw;7][elp;7][epr;7][frw;7][acn;7][ors;7][evC;7][bef;7][dvC;7][dop;7][mpr;7][lmn;7][eru;7][dnu;7][epv;7][muC;7][dgr;7][dlx;7][cCy;7][fpx;7][avC;7][brC;7][cqu;7][a rs;7][dfr;7][bqu;7][dfx;7][ory;7][amr;7][npu;7][afv;7][aef;7][qwy;7][oux;7][dnw;7][asw;7][bem; 7][asx;7][cmC;7][atu;7][dmr;7][eux;7][aps;7][mnp;7][bxy;7][giB;7][afl;7][boy;7][wxC;7][bcn;7][erC;7][cov;7][ruC;7][del;7][dly;7][cev;7][fru;7][cex;7][mpC;7][puy;7][axC;7][flr;7][cqC;7][ae y;7][bly;7][amC;7][cmr;7][bxC;7][uCy;7][elw;7][bfv;7][fmw;7][bsw;7][cly;7][rvy;7][apt;7][lnv; 7][bfl;7][bnx;7][qwC;7][nuw;7][afm;7][bqC;7][dey;7][vwy;7][alq;7][emu;7][def;7][prC;7][emC ;7][quw;7][alo;7][aqr;7][evx;7][pvy;7][lnC;7][cqr;7][lCy;7][atw;7][erx;7][fvw;7][dfC;7][clm;7][lnx;7][dfm;7][fuC;7][bsy;7][luv;7][cxC;7][cfr;7][axy;7][vwC;7][flp;7][npC;7][frx;7][cey;7][dlv; 7][ruy;7][rsx;7][opy;7][cem;7][npy;7][bgr;7][lry;7][wCy;7][lno;7][avy;7][amx;7][svw;7][rs;7][muy;7][epy;7][dmx;7][bls;7][efu;7][cou;7][elC;7][apq;7][dmq;7][uvC;7][fmp;7][cxy;7][mru;7][aeq;7][efp;7][eCy;7][anx;7][rxC;7][mvw;7][sux;7][erv;7][eln;7][afC;7][psw;7][bpq;7][fpv;7][ef w;7][amy;7][emp;7][nop;7][enp;7][uxC;7][dnC;7][cC;7][dov;7][fmu;7][rsu;7][art;7][rwy;7][pC y;7][lwC;7][amv;7][nwx;7][mCy;7][luy;6][mpy;6][clx;6][cfx;6][mwy;6][bmx;6][pxC;6][eqC;6][cmy;6][dnr;6][als;6][ben;6][enw;6][qry;6][dox;6][aen;6][dmv;6][ewy;6][nrv;6][coy;6][mwx;6][a dt;6][cvC;6][ouv;6][dou;6][euy;6][bqv;6][clv;6][psu;6][mux;6][blC;6][qrC;6][suw;6][cnu;6][cpq ;6][den;6][bmC;6][nrw;6][mpx;6][anv;6][qrw;6][tuw;6][bey;6][flw;6][nru;6][ce;6][psx;6][aos;6][lmu;6][cen;6][lmr;6][elu;6][flu;6][lox;6][dpq;6][elr;6][abt;6][lqC;6][mqu;6][flx;6][pqC;6][dfl; 6][cef;6][bcs;6][muv;6][drt;6][bny;6][ptu;6][eop;6][elx;6][bmn;6][fwC;6][cox;6][aoy;6][svy;6][uvy;6][equ;6][amn;6][osw;6][ads;6][wxy;6][dfy;6][pqy;6][bfm;6][aft;6][dmn;6][lsv;6][psy;6][e mv;6][afy;6][lns;6][lmy;6][pqr;6][qru;6][vxC;6][acs;6][uxy;6][bfC;6][mqy;6][bpt;6][enC;6][dny ;6][nor;6][beq;6][fuv;6][dlq;6][nux;6][rsw;6][deq;6][anC;6][npv;6][ptw;6][bfy;6][bno;6][act;6][f vx;6][any;6][pxy;6][ceq;6][dxy;6][mpv;6][pqw;6][amq;6][efC;6][bCy;6][bdt;6][dfv;6][ftu;6][fu y;6][bqx;6][enu;6][dtu;6][beo;6][csv;6][efx;6][mqw;6][cnC;6][luC;6][pvC;6][lrC;6][cmn;6][eor; 6][cfC;6][dvy;6][lps;6][prt;6][brt;6][mnw;6][lwy;6][lmC;6][npx;6][aeo;6][nCy;6][bmy;6][cnr;6][frv;6][csw;6][cfy;6][eqw;6][mrx;6][btw;6][osu;6][swx;6][cnx;6][lnq;6][bmq;6][atv;6][emr;6][c mv;6][clo;6][aqx;6][nrx;6][dpt;6][dtw;6][ovy;6][btu;6][qvw;6][cfm;6][dqx;6][mrv;6][cps;6][nv w;6][cds;6][mqC;6][bds;6][rCy;6][pqu;6][eow;6][cmq;6][cqv;6][bfo;5][vxy;5][rvC;5][bnC;5][cf v;5][fqu;5][mor;5][bfq;5][cqx;5][ouy;5][fwy;5][fpC;5][ery;5][lmx;5][osy;5][elv;5][rtu;5][nuv;5][mpq;5][dnx;5][cmx;5][lou;5][dsw;5][dsu;5][fmx;5]1[btv;5][av;5]1[afo;5][dlo;5][rtw;5][dft;5][ef m;5][fow;5][cfl;5][rxy;5][fpy;5][deo;5][owy;5][efv;5][nwC;5][csu;5][lpq;5][egy;5][bmo;5][blq; 5][cny;5][osx;5][crs;5][ftw;5][dsv;5][nry;5][emx;5][mny;5][qux;5][emy;5][fmC;5][rsy;5][ctw;5][doy;5][qvy;5][dps;5][mrC;5][eny;5][mow;5][lmv;5][fxC;5][cos;5][mnu;5][elm;5][fmv;5][bft;5][egr;5][drs;5][mxC;5][fop;5][fmr;5][lxC;5][mop;5][ctu;5][dfq;5][fqy;5][qwx;5][nuy;5][qxC;5][e fr;5][mgr;5][cdt;5][epq;5][eqx;5][lgr;5][ptv;5][for;5][cft;5][lsw;5][tuv;5][loy;5][dqv;5][mry;5][t vw;5][afs;5][elo;5][afq;5][mnC;5][ceo;5][nvx;5][now;5][dmo;5][eqv;5][enx;5][bfs;5][emn;5][qu v;5][enr;5][dty;5][fpt;5][cmo;5][qrv;5][nqC;5][lvy;5][pqv;5][lmo;5][bns;5][lqu;5][exy;5][mvx;5][nwy;5][eou;5][pqx;5][frC;5][los;5][asy;5][dnv;5][amo;5][dlt;5][flv;5][cfq;5][cpt;5][twx;5][qrx; 5][atx;5][fqw;5][mnr;5][fgC;5][csy;5][nuC;5][crt;5][ely;5][ngy;5][lsx;5][emq;5][npq;5][clq;5][mvC;5][frt;5][fox;5][eox;5][btx;5][dfo;5][cnv;5][ans;5][fou;5][fsw;5][eoC;5][qvC;5][eov;5][efl; 5][dsx;5][xCy;5][flm;5][dos;5][ano;5][bst;5][evy;5][aty;5][lsu;5][doC;5][eps;5][ast;5][fxy;5][fry ;5][dtC;5][alt;5][fps;5][lpt;5][cfo;5][nsv;5][aes;5][bfn;5][bet;5][nrs;5][ptx;5][fnp;5][opt;5][dng;5][lrt;5][npt;5][aoC;5][afn;5][mxy;5][oxy;5][fty;5][rtv;5][fsu;5][nov;5][anq;5][nxy;4][cty;4][cno; 4][moy;4][opC;4][lsy;4][qxy;4][nps;4][blt;4][pty;4][fvC;4][flC;4][dtx;4][owC;4][dsy;4][fqr;4][e mo;4][mqx;4][bty;4][fpq;4][mnv;4][atC;4][lqw;4][flo;4][bnq;4][efy;4][dfn;4][vCy;4][nox;4][lvC ;4][noy;4][dtv;4][qvx;4][ant;4][fmt;4][aot;4][lmq;4][pst;4][mou;4][mvy;4][fsv;4][fCy;4][aet;4][nvy;4][orC;4][coC;4][ngB;4][mnx;4][mqv;4][stu;4][tvx;4][cfs;4][tux;4][esu;4][rtx;4][fmy;4][bes ;4][tuy;4][fln;4][fnu;4][amt;4][nou;4][stw;4][ost;4][boC;4][fqx;4][rty;4][ers;4][ftv;4][nrt;4][dmt; 4][mov;4][ouC;4][fly;4][dfs;4][fov;4][mtu;4][nrC;4][bet;4][nxC;4][lty;4][eno;4][ftx;4][rst;4][etu ;4][suy;4][ctC;4][mtw;4][des;4][dno;4][esv;4][qty;4][bnt;4][etw;4][stv;4][env;4][bot;4][ort;4][fn w;4][fnx;4][frs;4][tuC;4][twy;4][efq;4][swy;4][lnt;4][ept;4][cfn;4][flt;4][esw;4][eoy;4][lxy;4][cs x;4][twC;4][otw;4][clt;4][ltw;4][ogy;4][efn;4][nsu;4][ctx;4][eft;4][qsy;4][oxC;4][mno;4][fnr;4][bqs;4][mnq;4][fst;4][fmo;4][fmn;4][fqt;4][elq;4][otu;4][ctv;4][ltu;4][efs;4][cls;4][fqv;4][fsy;4][f oy;4][ptC;4][tCy;4][dqt;4][otv;4][ces;4][cet;4][mps;4][oCy;4][det;4][asC;4][fsx;4][ftC;4][enq;4][mpt;4][dls;4][eos;4][dnt;4][rtC;4][mox;4][nos;4][cnq;4][fvy;4][ngr;4][fos;4][loC;4][fmq;4][niB ;3][sty;3][efo;3][nvC;3][nqw;3][ntu;3][qtC;3][nsy;3][nsw;3][nsx;3][esC;3][etv;3][agt;3][aoq;3][f lq;3][nqu;3][bmt;3][esx;3][fny;3][ert;3][dsC;3][ltx;3][ams;3][esy;3][coq;3][lqx;3][est;3][fls;3][b qt;3][boq;3][dst;3][ntv;3][ety;3][ngx;3][qsv;3][gjB;3][ntw;3][cst;3][dot;3][otx;3][ngi;3][ogr;3][s vC;3][lqv;3][dms;3][ags;3][csC;3][els;3][msw;3][ltv;3][suC;3][bsC;3][fot;3].

[0283] 4 Phage Combinations

[0284] 4 phage combinations were analyzed in silico for their ability to lyse the 352 different strains of Klebsiella pneumoniae bacteria based on the ability of the single phage to lyse the bacteria as assessed by a liquid media assay.

[0285] The combinations with the highest “at least 1 phage % coverage” are provided herein below (out of 23,751 possible combinations, the top 3.5% (828) are provided). The phage combinations are ordered in descending performance grade.

[0286] For example, in the case of [alyg;74], the 4 phage combination that provided the highest percent coverage, 395-D2-3-1, KP10-11, KP10-91 and CT-227-KP4M1-11 lysed 74% of all the strains of Klebsiella pneumonia analyzed.

[0287] [alyg;74][alqg;74][blqg;73][alyB;73][blyg;73][ablg;72][alqB;72][blqB;72][alsg;72][blyB ;72][ablB;71][luyg;71][blug;71][alvg;70][alyi;70][alsB;70][alqi;70][lqvg;70][luyB;70][lqug;70][blqi;70][alrg;70][bluB;70][blCg;70][alog;70][aflg;70][lvyg;70][bflg;69][alvB;69][blyi;69][lquB; 69][alCg;69][blsg;69][lqvB;69][lgsg;69][abli;69][lwyg;69][alrB;69][altg;69][bclg;69][alpg;69][a loB;69][lqwg;68][blCB;68][bdlg;68][alsi;68][bltg;68][aclg;68][dlyg;68][aflB;68][alwg;68][alug; 68][lvyB;68][blwg;68][blmg;68][lqxg;68][lxyg;68][bflB;68][lsyg;68][adlg;68][alCB;68][dlqg;68][lgsB;68][almg;68][clqg;68][lpqg;68][lwyB;68][clyg;68][algj;68][blsB;68][luyi;68][dlyB;68][aluB;68][aelg;68][altB;68][loqg;68][bdlB;68][alpB;68][lryg;68][alxg;68][algi;68][lpyg;67][bclB ;67][aloi;67][blui;67][luvg;67][lqwB;67][adlB;67][algh;67][algB;67][aliB;67][alwB;67][bltB;67][lgrg;67][lsyB;67][flyg;67][aljB;67][lxyB;67][dlqB;67][lsug;67][lqxB;67][aclB;67][blwB;67][a lgz;67][abyg;67][alvi;67][blmB;67][alng;67][alri;67][clug;67][lpqB;67][abqg;67][blxg;67][loqB ;67][lqvi;67][alyj;67][lswg;67][algk;67][blgj;67][almB;67][dlsg;67][alqs;67][algA;67][ablq;66][blCi;66][belg;66][luvB;66][lryB;66][ltyg;66][loyg;66][lqui;66][blrg;66][alxB;66][blgi;66][blog; 66][algj;66][aelB;66][clqB;66][clyB;66][bliB;66][blpg;66][dlvg;66][alny;66][lgrB;66][afli;66][1 uwg;66][lsuB;66][lvCg;66][blgh;66][lpyB;66][blgB;66][alhB;66][bng;66][lvyi;66][blqj;66][lwy i;66][alnq;66][flqg;66][flyB;66][bcli;66][apyg;66][alzB;66][alkB;66][abyB;66][flvg;66][blsi;66][alCi;66][blgz;66][dlsB;66][bljB;66][blnq;66][bfli;66][lgtg;66][alnB;66][lgsi;66][lrug;66][aloq;66][dlug;66][alsy;66][aryg;66][blgk;66][bclq;66][alAB;66][ably;66][bloB;66][acli;66][loyB;66][1 swB;66][lsCg;66][blqs;66][bdli;66][blyj;66][abgB;66][bsyg;66][elyg;66][blvg;66][blgA;66][blx B;66][alpi;66][dlyi;66][cluB;66][ablj;65][ltyB;65][lqwi;65][aoyg;65][dluB;65][alti;65][belB;65][adli;65][loqi;65][blqu;65][apqg;65][asyg;65][blrB;65][blny;65][luCg;65][clsg;65][luwB;65][lou g;65][alwi;65][dlvB;65][lmyg;65][lsyi;65][bngg;65][lqyg;65][blnB;65][clvg;65][clqi;65][alui;65][blhB;65][bqsg;65][clyi;65][blpB;65][avyg;65][blti;65][lvCB;65][lruB;65][lpug;65][alij;65][alo y;65][alqv;65][aqrg;65][blwi;65][lsvg;65][dlqi;65][dlxg;65][lpqi;65][lwCg;65][bcly;65][lgtB;65][blmi;65][agsg;65][blzB;65][alns;65][bluy;65][lqxi;65][blsy;65][lCyg;65][flqB;65][blqt;65][lux g;65][blqw;65][flug;65][aeli;65][elqg;65][lvwg;65][flvB;65][aryB;65][abln;65][buyg;65][louB;65][bnyg;65][blkB;65][algr;65][apyB;65][lxyi;65][lsCB;64][aoyB;64][blAB;64][abls;64][anyg;641[aoag;64][elyB;64][alsj;64][aavg;64][aliz;64][luCB;64][acly;64][blvB;64][almi;64][aclq;64][lr yi;64][alni;64][bsyB;64][dlwg;64][asyB;64][lmqg;64][lgri;64][alvy;64][alxi;64][alpq;64][lgsw;64][lxCg;64][alwy;64][lpyi;64][alry;64][bloi;64][aely;64][lnyg;64][lpuB;64][loyi;64][clCg;64][al ih;64][bflq;64][dlsi;64][lmyB;64][bqug;64][apqB;64][luyj;64][luvi;64][bdlq;64][ltvg;64][bpqg;64][algt;64][dltg;64][luxB;64][bluj;64][lmug;64][alqw;64][aelq;64][blij;64][buyB;64][ltug;64][bn qB;64][fluB;64][clxg;64][lnuy;64][lsui;64][lsvB;64][alsC;64][afly;64][flwg;64][clsB;64][bqsB;64][lrwg;64][agrB;64][lswi;64][lqyB;64][blwy;64][clui;64][alyz;64][avyB;64][dlrg;64][dflg;64][1 ygj;64][dlxB;64][alty;64][cluy;64][aliA;64][dlqs;64][lsxg;64][bcqg;64][agsB;64][ablC;64][aluy; 64][alqz;64][lCyB;64][dlog;64][clvB;64][alqy;64][lvwB;64][alpy;64][blty;64][abyi;64][lqCg;64][lwxg;64][lwCB;64][bwyg;64][bnyB;64][blni;64][bcyg;64][adlq;64][flsg;64][lygi;64][adly;64][flyi;64][angg;64][beli;64][blnu;64][bmqg;64][bfly;64][elqB;64][bpyg;64][bfyg;64][blmq;64][ao qB;64][aflq;63][anyB;63][dlwB;63][blxi;63][lrCg;63][cdlg;63][alsw;63][alnj;63][bqwg;63][lmv g;63][bquB;63][almy;63][lugj;63][bloq;63][bliz;63][alqx;63][lsuy;63][clqu;63][lngg;63][elug;63][lpCg;63][dlpg;63][blqx;63][lswy;63][blqz;63][aqvB;63][lygB;63][abng;63][alvj;63][flrg;63][bl ri;63][dlCg;63][abqi;63][lgsu;63][clqs;63][lyiB;63][alik;63][dlvi;63][alxy;63][lowg;63][belq;63][lygh;63][blCj;63][loCg;63][lgsv;63][blpi;63][abnq;63][lvxg;63][luwy;63][ltuB;63][alqu;63][lqv j;63][lygz;63][acls;63][lrsg;63][afls;63][ltyi;63][bdly;63][alos;63][lyjB;63][cltg;63][alCy;63][clr g;63][dlrB;63][lnqs;63][lqgj;63][lmqB;63][ablt;63][dflB;63][cflg;63][lquv;63][blih;63][dlui;63][bmyg;63][dlsy;63][alyh;63][absg;63][loui;63][lvCi;63][awyg;63][lmuB;63][almq;63][dltB;63][1 xCB;63][lwyj;63][luwi;63][blsu;63][lnyB;63][alqC;63][alno;63][lquj;63][aoyi;63][uvyg;63][abl u;63][dluy;63][lsCi;63][alyA;63][clCB;63][bpqB;63][alsu;63][alyk;63][ltwg;63][clsi;63][bdqg;63][luvy;63][blqC;63][alCj;63][ltvB;63][loqu;63][blnC;63][alqh;63][louy;63][lrui;63][adls;63][bl my;63][dloB;63][alsv;63][apyi;63][alnv;63][luiB;63][lpwg;63][aryi;63][lygA;63][lujB;63][lnqu; 63][elyi;63][lygk;63][blyz;63][lugh;63][blxy;63][lugi;63][lnqv;63][flwB;63][lnug;63][bclj;63][c lqv;63][blsC;63][lugB;63][lqgi;63][bclu;63][elvg;63][abfl;63][lrwB;63][flxg;63][bely;62][blqh;62][bfqg;62][abny;62][alwj;62][bpyB;62][blqy;62][lowB;62][flvi;62][eluB;62][lvyj;62][lmsg;62][ablz;62][bluC;62][algk;62][alst;62][lgsx;62][bliA;62][bfyB;62][blpq;62][lwxB;62][btyg;62][afy g;62][alrj;62][bloy;62][loCB;62][lqgB;62][auyg;62][bryg;62][aclj;62][aloj;62][bmqB;62][amyg; 62][lgti;62][lpsg;62][lqCB;62][abcl;62][lquw;62][flqi;62][bwyB;62][bnqi;62][lsxB;62][clsy;62][dlCB;62][blnj;62][anqB;62][blns;62][dlpB;62][lqgh;62][flsB;62][lqwj;62][flCg;62][aflj;62][lrvg ;62][bsyi;62][bdyg;62][clog;62][lqiB;62][alqA;62][alrs;62][alnr;62][lugz;62][clxB;62][dlqv;62][dlqu;62][bqyg;62][cdlB;62][clwg;62][aels;62][ltCg;62][lqgz;62][dlyj;62][blqk;62][blqA;62][abl o;62][clpg;62][lnsy;62][bflj;62][abel;62][elsg;62][apqi;62][flrB;62][lnqB;62][bcqB;62][lruy;62][asyi;62][agyg;62][lugk;62][bqwB;62][lugA;62][ablw;62][alsz;62][blik;62][abnB;62][blqr;62][it xg;62][batg;62][aloC;62][blwj;62][lpCB;62][blvi;62][lmvB;62][lpvg;62][abCg;62][bnyi;62][bdl j;62][elwg;62][aoqi;62][abdl;62][lnvy;62][lsvy;62][luCi;62][lyhB;62][lrCB;62][flog;62][lgjB;62][dlny;62][clvi;62][bngs;62][lovg;62][bcyB;62][lrxg;62][lnoq;62][lgsj;62][angr;62][bcls;62][lyk B;62][lyzB;62][axyg;62][uvyB;62][bdqB;62][lrsB;62][lmwg;62][quvg;62][puyg;62][elqi;62][lqr u;62][bnqu;62][ablm;62][blsj;62][lqvw;62][acyg;62][lsvi;62][absB;62][lqgA;62][lqgk;62][blyh; 62][bnsy;62][bmyB;62][abpg;62][bfln;62][awyB;62][lmyi;62][flpg;62][luhB;62][afln;62][bclC; 62][loqw;62][dlxi;62][bgrg;62][lnuB;62][bxyg;62][alps;62][clgj;62][alvC;62][adlj;62][ruyg;62][altj;62][bqsi;62][clyj;62][anry;62][lvxB;62][dlqx;62][boyg;62][agri;62][alnC;62][lvgj;62][bdln;62][angs;62][luxy;62][lpui;62][lnwy;62][alms;62][clvy;62][anyi;62][bdls;62][blry;62][apsg;62][a nsy;62][dlnq;62][lqux;62][bltj;62][blCy;62][bdlu;62][lxyj;62][alnt;62][bnuy;62][alsh;62][lqxj;62][ablh;62][lstg;62][lyAB;62][lpuy;62][dlxy;62][dlvy;62][blqv;62][avyi;62][bltC;62][aflo;62][blp y;62][ltwB;62][lnyi;62][lpqu;62][cltB;62][aelj;62][lvgi;62][alsx;62][lCyi;62][aluj;62][dlgj;62][1 gyi;62][lngx;62][elvB;62][bdyB;62][lmxg;62][bflC;62][lnxy;62][cflB;62][blyA;62][clsu;62][lw gj;62][flxB;62][alpj;62][clrB;62][aqsi;62][atyg;62][blnt;62][blyk;62][auyB;62][adyg;62][lwCi;62][flqv;62][lpwB;62][lukB;62][cloq;62][clqx;62][lvwi;62][luzB;62][eluy;62][dlmg;62][dlgj;62][dloi;62][lpxg;62][celg;61][btyB;61][delg;61][alnp;61][ltuy;61][adln;61][qswg;61][lviB;61][lgrw ;61][dlwi;61][anrg;61][lgtv;61][afyB;61][lvgB;61][bfqB;61][luyz;61][bltu;61][clxy;61][lmsB;61][floB;61][dsyg;61][dlng;61][lngw;61][loCi;61][anoq;61][buyi;61][aclo;61][swyg;61][lswC;61][dliB;61][alsk;61][alrC;61][altv;61][alsA;61][bogg;61].

[0288] The combinations with the highest “at least 2 phage % coverage” are provided herein below. The phage combinations are ordered in descending performance grade.

[0289] Thus, for example, in the case of [ably;41], when 395-D2-3-1, 395-D2-3-2, KP10-11 and KP10-91 are used in a combination, 41% of the bacterial strains analyzed were targeted by at least 2 of the 4 phage.

[ably;41][ablp;40][bqvy;39][ablq;39][bdly;39][alvy;39][abc1;38][ablr;38][abln;38][aluy;38][blqy ;38][alpy;38][blpy;38][bluy;38][blvy;38][blCy;38][ablw;38][alry;38][ablo;38][blry;38][abqy;38][blwy;38][alwy;38][ablv;38][abdl;38][abls;38][ablC;37][ablu;37][adlp;37][adly;37][abwy;37][lq ry;37][abpy;37][lpqy;37][alpv;37][blpq;37][alnu;37][adln;37][abdy;37][abdv;37][bvCy;37][lqvy ;37][ablm;37][blnv;37][blqv;36][bdlq;36][bgry;36][bdls;36][alnw;36][adlv;36][alpu;36][abvy;36][blnw;36][bdlp;36][abfl;36][alqy;36][abmy;36][alpq;36][abry;36][dlpy;36][alpr;36][alsy;36][bl sy;36][abcy;36][adlr;36][abuv;36][bloy;36][acln;36][adlo;36][alqu;36][bpqy;36][bqwy;36][dlvy; 36][lvwy;36][aloy;36][alqv;36][blqr;36][lpvy;36][abny;36][alxy;36][dlry;36][lpwy;36][bcln;36][abCy;36][bdvy;36][aquy;36][aqvy;36][aluw;36][alvw;36][aclv;36][bdlv;36][blpv;36][adls;36][b dln;36][luvy;36][alqw;36][lqwy;36][abqv;36][adlw;36][abru;35][blvC;35][acly;35][blsw;35][ab dw;35][aluv;35][alpw;35][alru;35][blpw;35][biny;35][bday;35][bquy;35][blxy;35][bcly;35][abd p;35][abuy;35][bqxy;35][blqu;35][dlwy;35][alrw;35][aclp;35][brCy;35][abxy;35][adlu;35][abvC ;35][bdlo;35][bdlw;35][abdr;35][bluw;35][bqvC;35][boqy;35][blnr;35][bdvC;35][abcn;35][ablt; 35][abcv;35][lpry;35][bdlr;35][blpC;35][aclr;35][algr;35][blps;35][dlnw;35][bduv;35][bdlC;35][adlq;35][aboy;35][abdn;35][lvCy;35][blqw;35][abdo;35][blrw;35][lrwy;35][ablx;35][alrv;35][ab pq;35][lpqv;35][aqwy;35][qrvy;35][blpu;35][alou;34][abvw;34][alnv;34][alpC;34][blnp;34][alu C;34][alps;34][alsw;34][blqs;34][alnx;34][bdlu;34][bloq;34][abdq;34][lpuy;34][bcdv;34][adqy;34][bclp;34][alpx;34][abqw;34][advy;34][lgsy;34][dlpq;34][aclu;34][lqxy;34][lrCy;34][abqr;34][alCy;34][alov;34][abel;34][blwC;34][bdvw;34][alny;34][luwy;34][abpC;34][alow;34][qvwy;34][bdxy;34][blrC;34][loqy;34][lnuw;34][bdmv;34][alsv;34][adlx;34][buvy;34][abrs;34][blmy;34][bxCy;34][dlpv;34][bluv;34][abds;34][almu;34][bdry;34][blqC;34][blsC;34][abdC;34][alwC;34][bfly;34][alvC;34][abcd;34][abpu;34][cdln;34][abdx;34][bcls;34][blnu;34][bdqv;34][abnw;34][ab fy;34][bdpy;34][abmv;34][aqxy;34][abcp;34][abwC;34][dlsy;34][adxy;34][pqvy;34][blnx;34][lq uy;34][bluC;34][abnp;34][lnwy;34][lruy;34][bcdl;34][alrC;34][dlqy;34][dloy;34][alop;34][abrw; 34][alnr;34][bdrw;34][blsv;34][lnvw;34][lpCy;34][dlps;34][aboq;34][dlpu;34][aduw;34][bloC;34][blvw;34][bdwy;34][algs;34][lwCy;34][abfv;34][arvy;34][blsu;34][afly;34][adr;34][lpqr;34][abpw;34][aquw;34][absy;34][clnw;34][blmv;34][bruy;34][lswy;34][abcr;34][bpCy;34][bvgB;34][avwy;34][aclq;34][alrs;34][adow;34][dluy;34][bwCy;34][alsu;34][blnq;34][abrC;34][abqu;34][dlnr;34][aduy;34][bquv;34][dlnu;34][adsy;34][dlpr;34][lngy;34][acls;34][lpqw;34][acuw;34][ac dl;34][lrvy;34][adlC;33][bclq;33][pqwy;33][clwy;33][blrv;33][lnrv;33][dlov;33][abdu;33][abtv; 33][adwx;33][abmq;33][abpv;33][clpy;33][blty;33][dlpw;33][abvx;33][auwC;33][boCy;33][bfu v;33][dlqv;33][aloq;33][clnv;33][bely;33][alnq;33][abnv;33][lquv;33][abcq;33][blpx;33][bpuy;33][alqx;33][abdm;33][blqx;33][bdpv;33][dlqw;33][aruv;33][almw;33][abuw;33][alor;33][lowy;33][abty;33][bdfv;33][bclv;33][advw;33][almv;33][auwy;33][lnqw;33][buCy;33][abcs;33][aclo;33][blow;33][abmr;33][dlnp;33][agsy;33][dlvw;33][bclC;33][dlqr;33][bcvw;33][absv;33][adlm;33][lnpr;33][blru;33][abco;33][abou;33][acdu;33][lovy;33][lpvw;33][clvy;33][bclr;33][dlsu;33][a dry;33][lwxy;33][dlny;33][blrs;33][apuy;33][bdlx;33][aclw;33][adpr;33][abpr;33][lnvy;33][abop ;33][lqvw;33][abqs;33][blou;33][bdpw;33][anwy;33][abfr;33][absw;33][bflv;33][abrv;33][abmC ;33][alty;33][dqvy;33][apvy;33][arwy;33][dlxy;33][blmp;33][blop;33][cdly;33][lpqu;33][auvy;33][bclu;33][abor;33][lsuy;33][abcx;33][blpr;33][bdCy;33][abnr;33][abnq;33][dlrC;33][ablB;33][lvxy;33][acdx;33][bduy;33][buvC;33][ablg;33][bclw;33][pgry;33][acvy;33][ablz;33][lnrw;33][al xC;33][anuw;33][clnr;33][qvxy;33][cdlp;33][adwy;33][abqx;33][aloC;33][lpuv;33][adov;33][ab gB;33][abcw;33][aclx;33][lnry;33][bdpu;33][alrx;33][buwy;33][bqsy;33][cqwy;33][lnpv;33][ab nC;33][aflv;33][ablA;33][almr;33][abos;33][alnp;33][alux;33][abcC;33][adqu;33][bdoy;33][lsC y;331][dlnv;33][clry;33][aboC;33][aswy;33][dlor;33][dlou;33][anuy;33][ablh;33][bduw;33][luvw ;33][ablj;33][agry;33][bdsw;33][abey;33][dluv;33][dlsv;33][apqy;33][almy;33][augB;33][almp; 33][buvw;33][ablk;33][abcu;33][absu;33][adrw;33][abli;33][bdsy;33][alnC;33][abno;32][agrv;32][lpru;32][louy;32][bdrv;32][aduC;32][qrwy;32][dgwy;32][avCy;32][clpv;32][aflp;32][dlpC;32][adsw;32][lquw;32][lnuv;32][adqv;32][abmp;32][bins;32][alwx;32][lgrv;32][bdnv;32][bdtv;32][adqx;32][abow;32][acuy;32][adpv;32][adnv;32][bflp;32][luxy;32][dCy;32][bcdr;32][auvw;32][clqy;32][abmn;32][aruy;32][bgrC;32][anvw;32][adny;32][bpuw;32][apry;32][acnv;32][opqy;32][bdlm;32][bdvx;32][adpx;32][adoy;32][quvy;32][aowy;32][abfq;32][bdsv;32][abqC;32][abrx;32][bdev;32][bdow;32][belp;32][alsC;32][blov;32][lpsy;32][lprw;32][lpvC;32][dlru;32][advC;32][anvy;32][abdf;32][blms;32][advx;32][aclC;32][acqu;32][bngy;32][aelp;32][blxC;32][almx;32][a wxy;32][bdfl;32][bdnp;32][aflu;32][anxy;32][lnpw;32][dlrs;32][bflw;32][abmu;32][acuC;32][bd ov;32][dlnq;32][blor;32][clpq;32][abov;32][clnp;32][bdny;32][lrsy;32][clnu;32][abps;32][abms; 32][abev;32][lpsv;32][adsv;32][aflw;32][lprs;32][lsvy;32][blnC;32][bcdp;32][bruw;32][apuv;32][lory;32][acdv;32][begy;32][blmr;32][lsuv;32][adrx;32][acdw;32][dlsw;32][abde;32][lpuw;32][loqv;32][absC;32][adnw;32][lxCy;32][buxy;32][bcdx;32][dlvC;32][bcdw;32][apuw;32][bmvy;32][bdrs;32][dlrw;32][bltv;32][cdlr;32][dlow;32][blrx;32][angw;32][bgru;32][arvw;32][bruv;32][btuv;32][abrt;32][abwx;32][dloq;32][dlop;32][belw;32][bcds;32][bclo;32][lpsu;32][lvwC;32][ad qw;32][abmw;32][lrvw;32][brsw;32][dlrv;32][lgru;32][aelw;32][lgrw;32][dlos;32][quwy;32][bc rw;32][abdt;32][lnpy;32][blmw;32][aruw;32][adsx;32][blwx;32][adfl;32][blux;32][adlt;32][bnvy ;32][aduv;32][ador;32][abns;32][bdru;32][abfp;32][lmpv;32][anpu;32][lpsw;32][lnvx;32][lnqr;32][qwxy;32][lnux;32][cdlv;32][apru;32][adpw;32][bdop;32][luCy;32][bcuv;32][bdnw;32][altu;32][luvC;32][bdwx;32][blno;32][rvCy;32][bfqv;32][loCy;32][blmu;32][aprC;32][brwC;32][awCy ;32][bflu;32][adgB;32][clpu;32][acqy;32][apwy;32][cluy;32][lrsu;32][abot;32][dlqs;32][adox;32][lsvw;32][apqv;32][bdel;32][avwC;32][clpr;32][clpw;32][lpqs;32][bdlt;32][adpu;32][arvC;32][clny;32][acxy;32][asuy;32][blmq;32][belv;32][bdpC;32][acrv;32][brwy;32][adpy;32][bpvy;32][dluw;32][abuC;32][lprv;32][aely;32][adru;32][ogry;32][alpt;32][bmuv;32][blvx;32][flgy;32][qu xy;32][abnu;32][lpuC;32][lnru;32][bmvw;32][apqu;32][lnCy;32][oqvy;32][lprC;32][dlqu;32][bp rw;32][cdqy;32][bpqC;32][alvx;32][aber;32][aqwx;32][amvy;32][adrs;32][qsuy;32][aquv;32][bd pr;32][abox;32][aqvw;32][abmo;32][abcm;32][lnuy;32][lgsu;32][alms;32][agrw;32][clqw;32][a opu;32][adxC;32][alqC;32][ogwy;32][bdvg;32][abdg;32][anrw;32][dloC;31][dquy;31][aouy;31][angy;31][npqy;31][buvx;31][bpry;31][lqvC;31][bnpw;31][bpqu;31][aflr;31][lmpy;31][dlwC;31][altw;31][avxy;31][apvC;31][bltw;31][bdux;31][bpuv;31][belr;31][lgsw;31][awxC;31][lruC;31][bdvB;31][bpvC;31][dfly;31][abdB;31][bdpx;31][axCy;31][pquy;31][abfo;31][flvy;31][clps;31][bcdo;31][lpxy;31][bdps;31][aprw;31][aogy;31][acnu;31][aoru;31][bels;31][acry;31][abpt;31][dl px;31][louv;31][aouw;31][apar;31][almo;31][adop;31][acwy;31][lnaC;31][lmry;31][arwC;31][a cds;31][bdpq;31][afln;31][pqxy;31][adno;31][acuv;31][lmvy;31][lmqy;31][blpt;31][lnwx;31][bo uy;31][bcqy;31][lmpr;31][bdos;31][luwC;31][dlno;31][lrvC;31][lnpu;31][auCy;31][aqux;31][ap uC;31][alos;31][qrxy;31][bnuw;31][bcsw;31][aelv;31][abxC;31]

[0290] The combinations with the highest “at least 3 phage % coverage” are provided herein below. The phage combinations are ordered in descending performance grade.

[0291] Thus, for example, in the case of [abrv:25], when 395-D2-3-1, 395-D2-3-2, KP10-61 and KP10-85 are used in a combination, 25% of the bacterial strains analyzed were targeted by at least 3 of the 4 phage.

[0292] [abrv;25][abdv;23][ablv;23][abdu;23][abdl;23][abuw;23][abpv;23][brvw;23][abdw;23][b ruv;23][bpvw;23][abcw;23][abux;22][abdr;22][bdrv;22][abrw;22][brvx;22][bdlv;22][abov;22][b crv;22][abvw;22][blpr;22][bluv;22][ablw;22][abcv;22][abdx;22][adux;22][acvw;22][aduw;22][a bwx;22][bprv;22][abpr;22][blrv;22][blpv;22][ablu;22][acrw;22][adlu;22][adlw;22][blvw;22][abp w;22][abvy;22][abdy;22][abcu;22][abcd;22][auwx;21][bcpv;21][bpvx;21][abds;21][bvwx;21][b puv;21][bovw;21][aduv;21][bdpv;21][bdlw;21][abpx;21][brvy;21][bpru;21][acdw;21][bovx;21][acwx;21][aclw;21][abow;21][abuv;21][abuy;21][buvw;21][berv;21][bcpw;21][ablx;21][bprw;21][absw;21][abdp;21][abcr;21][bouv;21][aluw;21][abfu;21][bvwy;21][bclv;21][bcvx;21][advw;21][blru;21][abnv;21][bnrv;21][bdpr;21][bdlr;21][acpw;21][bclw;21][adwy;21][abvx;21][abdo;21][bnvw;21][abuC;21][blvx;21][abrx;21][bdvw;21][ablr;21][abpu;20][lprv;20][bcuw;20][abqu;20][brvC;20][acdl;20][adru;20][abmw;20][bruw;20][acuw;20][aprv;20][bdru;20][abou;20][bfrv;20][bmrv;20][bdlp;20][abew;20][bcrw;20][ablp;20][bduw;20][abru;20][bcwx;20][abry;20][bdvx;20][auvw;20][bsvw;20][acdy;20][bprx;20][acdv;20][bgrv;20][blpw;20][abqv;20][bcvw;20][pruv;20][buvx;20][bcdw;20][acdu;20][brwx;20][abdf;20][aluv;20][bcpr;20][adwC;20][cdlw;20][bdov; 20][adpu;20][bpwx;20][borv;20][arvw;20][bduv;20][aruw;20][blpu;20][adrw;20][apvw;20][ably ;20][adlv;20][abfw;20][buwx;20][bvxy;20][absv;20][adsu;20][abeu;20][abcx;20][bdpw;20][abor ;20][auvx;20][bdlu;20][bcuv;20][abmu;20][abdq;20][bdrw;20][adqw;20][bpwy;20][adnw;20][ab mv;20][brwy;20][alrv;20][abev;20][apuw;20][abfv;20][adrv;20][blrw;20][cdvw;20][abtu;20][ab vC;20][auwy;20][adwx;20][acuv;20][bnpv;20][abwC;20][alux;20][alpu;20][abnu;20][abc1;20][a bnw;20][adou;20][dluw;20][apux;20][cdrw;20][cpvw;20][acux;20][borw;20][abdm;19][avwx;19][abxC;19][blov;19][adpw;19][alwx;19][adfu;19][bnvx;19][cdpw;19][dprv;19][lruv;19][acnw;19][abrC;19][bclr;19][cpwx;19][bdor;19][apwx;19][bdou;19][abwy;19][acdp;19][bpvy;19][cduw;19][acdC;19][alpw;19][abex;19][prvw;19][bpux;19][bepr;19][bdwx;19][aduy;19][acrv;19][bepv; 19][aprw;19][abqw;19][adlr;19][alvw;19][abps;19][adly;19][abnx;19][aber;19][bopr;19][bdlx;19][bcdu;19][bcdl;19][acsw;19][abcp;19][cprw;19][bcov;19][dlrv;19][adpv;19][arwx;19][borx;19][aclu;19][bopv;19][cuvw;19][bouw;19][cprv;19][bavw;19][bdux;19][abdt;19][bdrx;19][apvx;19 ][adlx;19][afuw;19][acew;19][bcru;19][bcnw;19][abdC;19][bnpr;19][abop;19][blvy;19][bluw;19][bvwC;19][boru;19][acdr;19][bevw;19][bclp;19][abtw;19][ablC;19][bdvy;19][bmpw;19][abqr;19][arvx;19][acow;19][bdwy;19][alvx;19][bcow;19][bdow;19][blwx;19][brtv;19][brsv;19][cvwx; 19][bpsw;19][bopw;19][bpuw;19][aeux;19][cluw;19][ruvw;19][dlrw;19][absx;19][blrx;19][lprw ;19][bmvw;19][clvw;19][crvw;19][adnu;19][adew;19][lpvw;19][absu;19][bprs;19][bcrx;19][bcp x;19][alpv;19][adtu;19][alnp;19][cruw;19][acwC;19][amvw;19][bpvC;18][abrs;18][clwx;18][acr u;18][bdsu;18][acdq;18][aruv;18][aluC;18][ablq;18][bduy;18][advx;18][adfw;18][adqu;18][alpr; 18][auwC;18][dlpr;18][acwy;18][clrv;18][admu;18][anuw;18][adlC;18][acpv;18][bcdv;18][bcsw ;18][abdn;18][pvwx;18][abxy;18][aouw;18][bfvw;18][aquw;18][lpuv;18][abls;18][bfpr;18][advy ;18][bmpv;18][asuw;18][cdwy;18][auxy;18][amuw;18][alru;18][blpx;18][alrw;18][alwy;18][bdo p;18][dpvw;18][adlp;18][afuv;18][acde;18][abcs;18][bpry;18][bmvx;18][dlvw;18][abcf;18][bcn v;18][admw;18][bdnv;18][acmw;18][apwy;18][bnuv;18][abqx;18][lopr;18][adsw;18][buvy;18][beov;18][aovw;18][blor;18][brux;18][cuwx;18][bprC;18][bnpw;18][auxC;18][aewx;18][dprw;18][alwC;18][belv;18][cpuw;18][apuv;18][bevx;18][rvwx;18][dlpv;18][abnr;18][clrw;18][bcew;18][bdsw;18][bcmw;18][afru;18][aeuw;18][abco;18][abox;18][apru;18][abde;18][brsw;18][prvx; 18][bdpu;18][cruv;18][blux;18][anpw;18][bnrw;18][bdew;18][abpy;18][auvy;18][aduC;18][bpq v;18][bdmw;18][cdwx;18][abmx;18][bcdr;18][bopu;18][alqu;18][ablo;18][buwy;18][acfw;18][b dly;18][clpw;18][blop;18][abmr;18][acdn;18][acpr;18][bmpr;18][adlq;18][brxy;18][bsuw;18][al qw;18][clpr;18][lrvx;18][bowx;18][adCy;18][orvx;18][acdm;18][adpy;18][blwy;18][aclv;18][ab mp;18][arux;18][blrs;18][uvwx;18][abnp;18][crwx;18][anwx;18][lpru;18][abfr;18][druv;18][bdn w;18][bfuw;18][bdsv;18][lrvw;18][bcop;18][duvw;18][bwxy;18][aorv;18][acvx;18][bdwC;18][a cdx;18][dpuw;18][afvw;18][bswx;18][duwx;18][bdfw;18][aopw;18][bdpx;18][nprv;18][blry;18][abuB;18][adpr;18][bcux;18][copw;18][bcor;18][prsw;18][avwy;18][bclx;18][dvwx;18][bclu;18][dluv;18][bcdp;18][abcC;18][aowx;18][aepw;18][cdow;18][auCy;18][dlpw;18][afpu;18][bdrs;18][abpC;18][lruw;18][bovC;18][adel;18][puvw;18][abcm;18][abfx;18][awxC;18][aclx;18][abqy; 18][avwC;18][beuw;18][aelu;18][abui;18][bovy;18][adeu;18][clpv;18][nprw;18][aprx;18][aeru; 18][aruC;18][bcdy;18][amwx;18][bpqr;18][afux;18][auvC;18][bcsv;18][cdtw;18][beru;18][bew C;18][blnp;18][bsvx;18][bdfu;18][abuz;18][actw;18][cdnw;18][dlru;18][bewx;18][pruw;18][acq w;18][anux;18][blsv;18][blps;18][blrC;18][bcfw;18][abuj;18][abuA;18][aluy;18][abCy;18][acpu ;18][abuh;18][deuw;18][abce;18][blqv;18][aprs;18][bpsu;18][adtw;18][bqvx;18][bpwC;18][abu g;18][blpy;18][bpsv;18][abuk;18][beuv;17][arwy;17][aouv;17][druw;17][bruy;17][bnov;17][cdf w;17][acfu;17][drvw;17][blvC;17][lprx;17][adrx;17][alsu;17][cnrw;17][bprt;17][adry;17][orvw; 17][cdmw;17][abel;17][blou;17][absy;17][aevw;17][aquv;17][bmov;17][abtx;17][aeuv;17][cdsw :17][abim;17][acip;17][arvy;17][aruy;17][awxy;17][buwC;17][apwC;17][eprv;17][awCy;17][be pw;17][adpq;17][acsu;17][bpqw;17][cepw;17][ampw;17][abeo;17][bdlo;17][belr;17][puwx;17][bwxC;17][bctw;17][bfvx;17][bdgw;17][berw;17][bfpv;17][atuw;17][abtv;17][abn;17][bdnr;17][cduv;17][abep;17][dnuw;17][bowy;17][bmwx;17][lpuw;17][cnuw;17][bcdC;17][bdry;17][bqrw; 17][aoux;17][adow;17][bnwx;17][abwj;17][aopr;17][lqCy;17][anvw;17][abwz;17][aclr;17][bcw y;17][acds;17][lnpv;17][duwy;17][bfov;17][aqvw;17][ouvw;17][bqwx;17][bpsx;17][adfl;17][bc ou;17][puvx;17][aflu;17][blqw;17][acdf;17][bdtu;17][apqw;17][abet;17][oruv;17][blow;17][dpw x;17][amrv;17][boqv;17][bcde;17][bfru;17][cpvx;17][cnvw;17][aorw;17][npvw;17][prwy;17][be ux;17][bsuv;17][acCy;17][amux;17][atux;17][adfr;17][alqy;17][bdps;17][btvw;17][adfv;17][pru x;17][cdpv;17][brsu;17][bdnu;17][ruwx;17][alrx;17][lrvy;17][brwC;17][bdrC;17][aswx;17][abw i;17][abwh;17][cdew;17][acpx;17][bduC;17][cdpr;17][lvwx;17][abwB;17][bfuv;17][mpvw;17][a lpx;17][abpq;17][adpC;17][anuv;17][abwA;17][abwk;17][bflr;17][cdlu;17][bcpu;17][aqux;17][a bwg;17][dopw;17][luvw;17][crvx;17][cdgw;17][mprv;17][adxC;17][alvy;17][bnrx;17][eprw;17][aelw;17][lpvx;17][afrw;17][dlwx;17][acmu;17][bnop;17][duwC;17][bdpy;17][acwg;17][acwB; 17][adop;17][apsw;17][adep;17][celw;17][bruC;17][abrt;17][acou;17][drvx;17][bvxC;17][couw; 17][beop;17][brvj;17][brvi;17][cdlv;17][amrw;17][dlpu;17][pvwy;17][bcsu;17][opru;17][bdeu;17][bevy;17][blmw;17][ampv;17][anpv;17][rvwy;17][adrC;17][depw;17][acdt;17][aboC;17][alou ;17][acrx;17][acdo;17][brvz;17][prsu;17][cduy;17][bfrw;17][bmuv;17][asvw;17][brvk;17][anrv; 17][brvA;17][prvC;17][brvg;17][adqy;17][oprw;17][lnpr;17][alny;17][agru;17][bcdm;17][arsw; 17][bdqu;17][blmv;17][bquw;17][aovx;17][bcps;17][apuy;17][brvB;17][anru;17][bmrw;17][bop x;17][oruw;17][blqy;17][amuv;17][apCy;17][dpwy;17][bnru;17][acnu;17][abfp;17][adqv;17][bd fr;17][brvh;17][bcdf;17][cpwy;17][adrs;17][blqr;17][asuC;17][bcev;16][adov;16][afuy;16][abcy; 16][bdmu;16][cmvw;16][prvy;16][adls;16][afwx;16][blox;16][alxy;16][bcfu;16][bquv;16][bow C;16][blmr;16][bmuw;16][advC;16][beor;16][brsx;16][fprv;16][lpux;16][dvwy;16][lopw;16][bc mp;16][amru;16][alvC;16][bqCy;16][aclC;16]

[0293] The percent of host strains that are infected by 4 phages of phage combinations is provided herein below. This trait is referred to herein as “at least 4 phage % coverage”. Thus, for example, in the case of [abvw:14], when 395-D2-3-1, 395-D2-3-2, KP10-85 and KP10-87 are used in a combination, 14% of the bacterial strains tested were targeted by each of the four phage.

[0294] [abvw;14][abdu;13][abuw;13][abdw;13][acdw;13][abcw;13][abuv;13][abvx;12][abpw;12][abru;12][abwx;12][bprv;12][abux;12][aduw;12][bcdw;12][abpu;12][abcd;12][brvw;12][abrw;12][acuw;12][acdu;12][adpw;12][abcu;12][bvwx;11][acpw;11][abrv;11][apuw;11][bprw;11][abpr ;11][bcvw;11][abdp;11][bpuw;11][abdr;11][abcp;11][abrx;11][bpvw;11][bduw;11][cdpw;11][ab pv;11][bdrw;11][auvw;11][buvw;11][acdp;11][cduw;11][bdvw;11][bcpw;11][adpu;11][brvx;11][aruw;11][abdv;11][borv;11][bdpw;11][acpu;11][adrw;11][adru;11][bcdr;11[[abpx;11[[aprw;11][aduC;11][bcrw;11][bcuw;11][auwx;11][avwx;11][abde;11][bcdu;11][abdx;11][bcdp;11][bruw; 10][acdr;10][buwx;10][cdwC;10][adwx;10][bopr;10][apru;10][bdpu;10][blrv;10][brwx;10][abcv ;10][aber;10][bprx;10][arux;10][bpwx;10][ablw;10][cdrw;10][cpuw;10][acrw;10][bcpr;10][apv w;10][brux;10][cdew;10][dpuw;10][advw;10][abeu;10][apwx;10][bcpu;10][bdwx;10][bopv;10][bpvx;10][acru;10][abdC;10][ablu;10][abcx;10][adpr;10][bdpr;10][adeu;10][arvw;10][ablr;10][bp ru;10][dewC;10][bdrv;10][cdpu;10][arwx;10][auvx;10][adeC;10][bruv;10][bdru;10][aruv;10][blr w;10][buvx;10][bcdv;10][blpr;10][acvw;10][dprw;9][bdeC;9][bduv;9][bdew;9][cdru;9][acdC;9][cdeC;9][apuv;9][adew;9][cdwx;9][prvw;9][acpr;9][bcdx;9][abew;9][cprw;9][bcrv;9][pruw;9][ac wx;9][bcwx;9][bdeu;9][druw;9][adpx;9][aduv;9][adwC;9][adux;9][bpuv;9][acdx;9][bcde;9][apu x;9][cdvw;9][brsv;9][abep;9][deuC;9][abdl;9][blvw;9][ablp;9][arvx;9][abcy;9][cdpr;9][oprv;9][b pux;9][aeuC;9][bcru;9][bdux;9][cdmw;9][acde;9][cewC;9][prwx;9][blpw;9][admw;9][abeC;9][a prx;9][drvw;9][bopw;9][adrx;9][acuC;9][cduC;9][adlu;9][acwC;9][ablx;9][duwC;9][aprv;9][acw y;9][dpru;9][bduC;9][acew;9][bcwy;9][cruw;9][acmw;9][bcpv;9][aeuw;9][alpw;9][rvwx;9][alrw ;9][bdrx;9][bovw;9][bcew;9][bdpv;9][dpwx;9][bdwC;9][blrx;9][abwC;9][abce;9][acux;9][abuC; 9][cpru;9][alru;9][bdpx;9][ablv;9][abop;9][bdep;9][borw;9][aqCy;9][bdvx;9][aceu;9][aduy;9][du wx;9][afpw;9][duvw;9][acdm;9][lprw;9][blwx;9][ruwx;9][alpr;9][abev;9][abfw;9][abwy;9][acuy ;9][prvx;9][acfw;9][auwC;9][adep;9][blor;9][adpC;9][admu;9][crvw;9][aewC;9][abor;9][apvx;9][beuC;9][puvw;9][adlw;9][beuw;9][bcuv;9][acdv;9][puwx;9][bluw;9][bepw;9][aluw;9][drwx;9][acuv;9][bcux;9][bcdC;9][cdeu;8][dpvw;8][abc1;8][blpv;8][bdlr;8][aepu;8][blru;8][acdl;8][cdwy; 8][cpvw;8][adrv;8][cuwC;8][adlp;8][cdep;8][adfw;8][pvwx;8][acdy;8][adlr;8][cdpC;8][aceC;8][bcwC;8][abox;8][abcC;8][abow;8][adfu;8][bpsv;8][acdf;8][abov;8][aclw;8][advx;8][bevw;8][de pw;8][cdrx;8][abfu;8][dpwC;8][abfp;8][afuw;8][deuw;8][bcrx;8][absu;8][adqC;8][aepw;8][ruvw ;8][uvwx;8][cdux;8][acrx;8][clpw;8][bopx;8][bepu;8][dmpw;8][adpv;8][acpx;8][bdev;8][bewC; 8][acpv;8][adqu;8][dlpw;8][blop;8][bceu;8][cuwx;8][alvw;8][abdm;8][prux;8][acep;8][adrC;8][oprw;8][cdrv;8][bder;8][bcep;8][bfpw;8][bdlw;8][abou;8][amuw;8][ruvx;8][cuvw;8][blpx;8][dm uw;8][alrx;8][alwx;8][absv;8][ceuw;8][abdf;8][ceuC;8][depC;8][blvx;8][dpux;8][bcpx;8][drux;8][blnr;8][bdlu;8][bclw;8][cmpw;8][cepw;8][ampw;8][cdlw;8][cdfw;8][bcvx;8][cdpx;8][euwC;8][dvwx;8][abln;8][cdmp;8][bcdy;8][abex;8][lrvw;8][abfx;8][abuy;8][cpwC;8][abnu;8][admp;8][b ceC;8][dprx;8][bcqw;8][buwC;8][aber;8][berw;8][bpry;8][crux;8][aclr;8][abpC;8][cdrC;8][acfu; 8][adCy;8][blnp;8][acpy;8][acfp;8][aclu;8][bdex;8][abdq;8][abdn;8][abdy;8][ader;8][orvw;8][de vw;8][bosv;8][epuw;8][acrv;8][opvw;8][lpwx;8][cder;8][borx;8][cfpw;8][alux;8][bcdl;8][adln;8][apwC;8][adev;8][abmw;8][aepC;8][apuC;8][bewx;8][cpwx;8][bdmw;8][acpC;8][abpy;8][alpu;8][blux;8][bcor;8][aopr;8][bcpy;8][lpuw;8][bowx;8][bcuy;8][aclp;8][abmu;8][crwx;8][bsvx;8][ad fp;8][aevw;8][derw;8][bcow;8][bcuC;8][blpu;8][acvx;8][afwx;81 [depu;8][lrwx;8][aopw;8][bclr; 8][dpuC;8][bdpC;8][cdlp;8][dfpw;7][acow;7][adow;7][aopu;7][dpuv;7][bcry;7][dfuw;7][bdfw;7][dewx;7][acry;7][acmp;7][cduy;7][bprs;7][bsuv;7][cprx;7][adex;7][bcfw;7][cpwy;7][dexC;7][lo pr;7][cdlr;7][bovx;7][cdmu;7][acdq;7][abcq;7][cdpy;7][bcmw;7][cdpv;7][blov;7][dprv;7][cprv;7][abcf;7][bcdm;7][adwy;7][cpuC;7][drwC;7][aorw;7][cvwx;7][lprx;7][bdmu;7][alnu;7][bevC;7][afux;7][blnw;7][bfwx;7][abnw;7][bopu;7][acmu;7][bclp;7][devC;7][afpu;7][dqCy;7][aerw;7][clr w;7][cduv;7][bepx;7][abco;7][lpru;7][auwy;7][acqw;7][cpux;7][cdgw;7][bdvC;7][epwC;7][bevy ;7][alrv;7][pruv;7][abfr;7][cepu;7][lprv;7][abnp;7][cdfp;7][asuv;7][bcer;7][aopv;7][beuv;7][lruw ;7][abqw;7][dmwC;7][aeuv;7][aoru;7][bcop;7][cuwy;7][alpx;7][bepC;7][acrC;7][bdlp;7][cepC;7][adqy;7][ampu;7][boux;7][apuy;7][adpy;7][bdxC;7][copw;7][opwx;7][aorv;7][bcfp;7][bcev;7][bops;7][dwxC;7][aruC;7][adlC;7][abdo;7][cruC;7][afpx;7][corw;7][cmuw;7][bcpC;7][abnr;7][p uvx;7][adnu;7][afpr;7][cpuv;7][bdmp;7][beux;7][bmuw;7][bpuC;7][bcdq;7][adfx;7][bdwy;7][pu wC;7][aeru;7][abrs;7][acer;7][bdow;7][lorv;7][admC;7][dquC;7][oprx;7][bpwC;7][adem;7][abc n;7][bepr;7][advC;7][bnpu;7][blnu;7][lnpr;7][dlpr;7][opsv;7][bfuw;7][abel;7][aewx;7][fprw;7][a ovw;7][acdo;7][cdmC;7][dmpu;7][bdrC;7][aouw;7][cdry;7][cdvx;7][boru;7][abvC;7][afrw;7][bl ow;7][cerw;7][bnpr;7][duvx;7][aevC;7][demw;7][adxC;7][clpr;7][dmuC;7][bfrw;7][bexC;7][drv x;7][aopx;7][copr;7][epuC;7][bcdf;7][arwC;7][cdow;7][abcm;7][cdfu;7][bcdo;7][lnpw;7][cdlu;7][abmp;7][bdor;7][bclu;7][cdln;7][bdfp;7][acqu;7][bdfu;7][bcov;7][druC;7][bfpr;7][adnp;7][der C;7][druv;7][prsv;7][bepv;7][crwC;7][clpu;7][abqu;7][cevw;7][cfuw;7][dlrw;7][aepx;7][adlx;7][ewxC;7][dprC;7][bdry;7][cdnp;7][bcln;7][abem;7][acor;7][mpuw;7][acop;7][bmpw;7][bsvw;7][amuC;7][aexC;7][afrx;7][bdop;7][cdex;7][cewx;7][abef;7][fpwx;7][bpuy;7][dfwx;7][aruy;7][bv wy;7][depr;7][lrvx;7][brvy;7][anpu;7][apry;7][aquC;7][beru;7][apwy;7][cluw;7][aepv;7][bvwC; 7][bdqu;7][bluv;7][berC;7][deru;7][aeux;7][aprC;7][aorx;7][bdem;7][clru;7][alnw;7][acln;7][cde m;7][aepr;7][clnp;7][abvy;7][lvwx;7][duCy;7][cvwy;7][adry;7][bevx;7][evwC;7][dlpu;7][cdqu;7][dlnp;7][bcrC;7][amrw;7][acqC;7][bmpu;7][abrC;7][bpvy;7][cpry;7][cdnw;7][aemw;7][bors;7][dvwC;7][adqw;7][aemu;7][opvx;7][dmrw;7][belw;7][berx;7][bfpx;7][dlmw;7][ablo;7][bdnp;7][a owx;7][bdpy;7][bduy;7][clnw;7][brsx;7][alnr;7][dpvx;7][cerC;7][lrux;7][dlru;7][alvx;7][buwy;7][bfvw;7][belp;7][acdn;7][adlm;7][bdel;7][bdfx;7][abxC;7][cmrw;7][bdgw;7][abxy;7][almw;7][dluw;7][bmpr;7][fpuw;7][bfux;7][aerC;7][bouw;7][abry;7][cdmr;7][rsvx;7][aluv;7][orsv;7][deuv ;7][opuw;7][luwx;7][bmrw;7][euvw;7][bcdn;7][erwC;7][lpvw;7][admr;7][bdln;7][bnuw;7][afru; 7][cdev;7][abqC;7][bnpw;7][cdCy;7][cpuy;7][oprs;7][lopw;7][lorw;7][bfpu;7][abfv;7][cdxC;7][brwC;7][duwy;7][demC;7][arsv;7][cruy;7][absx;7][aoux;7][cdqC;7][cmwC;7][blnv;7][cnpw;7][r uwC;7][euwx;7][asvx;7][fuwx;7][dquw;7][bpwy;7][dfpu;7][delw;7][afvw;7][dlpC;7][alpv;7][ep wx;7][alnp;7][dopw;7][admx;7][cmpu;7][lnpy;7][bemw;7][adel;7][ador;7][acvy;7][aevx;7][buy C;7][ceru;7][cdlC;7][adqr;7][adfC;7][berv;7][bdov;7][acnw;7][opry;7][acqr;7][bdef;7][dnpw;7][bcmp;7][bdfr;7][erwx;7][acou;7][abps;7][alor;7][aemC;7][aerx;7][epvw;7]

[0295] 5 Phage Combinations

[0296] 5 phage combinations were analyzed in silico for their ability to lyse the 352 different strains of Klebsiella pneumoniae bacteria based on the ability of the single phage to lyse the bacteria as assessed by a liquid media assay.

[0297] The combinations with the highest “at least 1 phage % coverage” are provided herein below (out of 118,755 possible combinations, the top 0.4% (476) are provided). The number following each combination refers to the Percent trait performance—in this case the percent of the 352 strains that are targeted by the phage combination. The phage combinations are ordered in descending performance grade.

[0298] For example, in the case of [ablqg;78], the 5 phage combination that provided the highest percent coverage, 395-D2-3-1, 395-D2-3-2, KP10-11, KP10-48 and CT-227-KP4M1-11 lysed 78% of all the strains of Klebsiella pneumonia analyzed.

[0299] [ablqg;78][algsg;78][ablyg;78][ablqB;77][alqvg;77][alsyg;77][blqug;77][alogg;77][blqsg ;77][algsB;77][ablyB;76][bluyg;76][alqrg;76][bflqg;76][blqtg;76][alvyg;76][bclqg;76][blquB;76][aflyg;76][alryg;76][alsyB;76][aloqB;76][alpqg;76][alqvB;76][aloyg;76][blsyg;76][alqyg;76][a blsg;76][bluyB;76][blqsB;76][blqwg;76][bflyg;76][bclyg;75][blmqg;75][aluyg;75][aflgg;75][aly gj;75][algtg;75][alpyg;75][altyg;75][algrB;75][alygi;75][bflqB;75][alqgj;75][bltyg;75][aclyg;75][alvyB;75][blqtB;75][aclqg;75][alwyg;75][aelyg;75][ablqi;75][almyg;75][aloyB;75][alqwg;75][blwyg;75][alqgi;75][ablCg;75][blqgj;75][alyiB;75][alqxg;75][alpqB;75][blsyB;75][alqug;75][al ygB;75][alygh;75][alqsi;75][abflg;75][alxyg;75][alryB;75][aflyB;75][lquvg;75][aelqg;75][almqg ;75][bclqB;75][blqxg;75][bdlqg;75][aluyB;74][alqgB;74][alqyB;74][blqgi;74][blmyg;74][adlqg; 74][blqyg;74][alqgh;74][blqwB;74][luvyg;74][ablug;74][bflyB;74][alqiB;74][alnyg;74][alygz;74][abltg;74][adlyg;74][ablsB;74][alyjB;74][alogi;74][aflsg;74][lsuyg;74][alngg;74][lgsvg;74][ab lyi;74][belqg;74][alpyB;74][algjB;74][alCyg;74][alsCg;74][lgsug;74][aflqB;74][alqgz;74][altyB ;74][blogg;74][blygj;74][blqiB;74][blqgB;74][blxyg;74][blmqB;74][alygk;74][alqCg;74][lgswg; 74][alygA;74][blpqg;74][blngg;74][algtB;74][blqgh;74][blqCg;74][alsyi;74][alqgA;74][bclyB;74][alquB;74][blqjB;74][bltyB;74][blygi;74][lquvB;74][bdlyg;74][aelyB;74][blsug;74][alwyB;74][almyB;74][alqgk;74][cluyg;74][alsvg;74][blqrg;74][bdlqB;74][blqgz;74][ablgj;74][alqvi;74][bl nyg;74][aloyi;74][ablmg;74][luwyg;74][alqwB;74][alyhB;74][luvyB;74][adlyB;74][blyiB;74][al qxB;74][lruyg;74][blqgA;74][aclqB;74][abluB;74][alxyB;74][blqsi;74][ablgi;74][aelqB;74][alm qB;74][blygB;74][alsug;74][blqxB;74][blqgk;74][blqui;74][blwyB;74][aclyB;74][flqvg;74][blqv g;74][ablCB;74][clqug;74][dlasg;74][adlaB;74][abflB;74][blygh;74][alyzB;73][lsuyB;73][alnyB ;73][alrsg;73][alykB;73][belyg;73][bloyg;73][louyg;73][blqyB;73][blmyB;73][bloqB;73][blyjB; 73][algri;73][lswyg;73][blygz;73][blpyg;73][alqhB;73][alswg;73][aflvg;73][dluyg;73][clqvg;73][loqug;73][abliB;73][bclqi;73][ablgB;73][ablgh;73][lgsuB;73][lgrug;73][abltB;73][bluCg;73][al stg;73][dlqvg;73][lsvyg;73][blryg;73][blqhB;73][abljB;73][luxyg;73][flvyg;73][alyAB;73][abdl g;73][fluyg;73][alnqB;73][ablrg;73][ablgz;73][clqsg;73][aflsB;73][bluyi;73][belqB;73][alqzB;73][lpuyg;73][ablwg;73][lgsvB;73][dlsyg;73][algkB;73][bclug;73][blygA;73][lpqug;73][blsuB;73][alCyB;73][ablog;73][lgsxg;73][ablng;73][lquwg;73][abclg;73][lgswB;73][blpqB;73][blygk;73][alosg;73][blvyg;73][blnqB;73][bdlyB;73][alsCB;73][alvCg;73][alqCB;73][blsCg;73][abelg;73][blxyB;73][blqkB;73][bflqi;73][ablxg;73][aclsg;73][blqrB;73][blqti;73][blqzB;73][bflCg;73][lqv wg;73][blsyi;73][altvg;73][blqCB;73][alpsg;73][blCyg;73][cluyB;73][louyB;73][ablgA;73][alm sg;73][lruyB;73][ablgk;73][aflrg;73][alsgi;73][dlqsB;73][alsuB;73][adlsg;73][dlqug;73][loquB;73][alsvB;73][luwyB;73][alryi;73][dluyB;73][lgtvg;73][lmuyg;73][lquxg;73][alpqi;73][alvyi;73][alqAB;73][alsgh;72][dlvyg;72][ablmB;72][ablvg;72][dlqvB;72][ablpg;72][alyij;72][ablsi;72][ltu yg;72][bltug;72][alsgB;72][bflug;72][aflyi;72][blyhB;72][flqvB;72][blmug;72][bloyB;72][dlqxg ;72][binyB;72][blqAB;72][lqvxg;72][alsiB;72][lgruB;72][lquyg;72][blqvB;72][blqwi;72][clvyg; 72][aflog;72][bclyi;72][alsgj;72][luygj;72][clquB;72][aluvg;72][bluCB;72][aelsg;72][alsxg;72][blpyB;72][aclqi;72][luxyB;72][aclyi;72][blykB;72][alswB;72][clsyg;72][blryB;72][ablhB;72][al rsB;72][bclCg;72][flqsg;72][bltCg;72][bflyi;72][elqvg;72][lpquB;72][fluyB;72][abdlB;72][lsvy B;72][eluyg;72][alrCg;72][lswyB;72][belyB;72][aelyi;72][abloB;72][flqug;72][lpuyB;72][alnsg; 72][lpqsg;72][alpyi;72][blugj;72][alsgz;72][blyzB;72][dlquB;72][alqij;72][alosB;72][clqxg;72][dlsyB;72][aflvB;72][aloCg;72][lquwB;72][bflsg;72][dlxyg;72][alstB;72][alqyi;72][bdlug;72][clx yg;72][flsyg;72][ablzB;72][lnuyg;72][lgrsg;72][ablkB;72][alsgk;72][ltvyg;72][ablwB;72][bloqi; 72][lsxyg;72][ablnB;72][lvwyg;72][alvgj;72][adlsB;72][altyi;72][aflqi;72][blsCB;72][blvyB;72][aelgi;72][fivyB;72][ablrB;72][blqij;72][alrtg;72][luyiB;72][luyjB;72][bcluB;72][alwyi;72][lmq vg;72][blyAB;72][aluyi;72][alyiz;72][lmuyB;72][alqti;72][absyg;72][bdlqi;72][blmqi;72][lgstg; 72][alvCB;72][alrug;72][luygB;72][luygi;72][lquxB;72][alsgA;72][luygh;72][lgsxB;72][abelB;72][lgrwg;72][clqvB;72][alnyi;72][lgtvB;72][alnqi;72][lpsyg;72][loqwg;72][dlvyB;72][lgtxg;72][alotg;72][almvg;72][lwxyg;72][alsjB;72][lrsyg;72][bltuB;72][bdlsg;72][lqvgj;72][blnqi;72][alms B;72][flxyg;72][blugh;72][blstg;72][aflpg;72][dlqxB;72][blugi;72][loqxg;72][bluiB;72][blnug;72][blugB;72][aflrB;72][lpqxg;72][afloB;72][lgrxg;72][abqsg;72][bluwg;72][alqiz;72][lqvwB;72][lqwxg;72][lqvyg;72][bclsg;72][clqsB;72][blmCg;72][abclB;72][adlyi;72][lvxyg;72][ablCi;72][bdluB;72][ablxB;72][adlqi;72][alpsB;72][bltyi;72][blwCg;72].

[0300] The combinations with the highest “at least 2 phage % coverage” are provided herein below. The phage combinations are ordered in descending performance grade.

[0301] Thus, for example, in the case of [ablqy;47], when 395-D2-3-1, 395-D2-3-2, KP10-11, KP1048 and KP10-91 are used in a combination, 47% of the bacterial strains tested were targeted by at least 2 of the 5 phage.

[0302] [ablqy;47][ablpy;46][ablpq;46][ablry;46][blpqy;45][lpqvy;45][ablwy;45][blqvy;45][ablu y;45][abfly;45][ablCy;45][ablny;45][abloy;45][alqvy;45][abcly;45][ablvy;45][alpqy;45][ablqr;44][ablsy;44][blqry;44][bdlqy;44][aluvy;44][blvCy;44][lpqry;44][blqwy;44][blquy;44][alquy;44][alpvy;44][abdly;44][alruy;44][ablpu;44][blpCy;44][lqvwy;44][blqsy;44][abcln;44][bdlpy;43][ab lnr;43][bdlsy;43][lpqwy;43][ablmy;43][adlpy;43][alpuy;43][abloq;43][algry;43][ablqw;43][blrC y;43][blwCy;43][ablqu;43][ablty;43][alpry;43][blogy;43][ablqv;43][ablqs;43][lquvy;43][bdqvy; 43][abdlp;43][abclq;43][bdlny;43][ablxy;43][alpqv;43][ablnq;43][alrwy;43][abclp;43][alqwy;43][abflq;43][bdlpq;43][ablnw;43][bquvy;43][abqwy;43][abpqy;43][ablqC;43][ablrC;43][bdlvy;43][blngy;43][bdlCy;43][abqvy;43][blnwy;43][ablpv;43][ablps;43][bdlry;43][adlvy;43][alrvy;43][dlpqy;43][alvwy;43][ablnv;43][adloy;43][blsCy;43][alouy;43][ablpC;43][bluvy;43][alogy;43][bl qxy;43][ablnp;43][ablnu;43][blnCy;43][alsuy;43][abdln;43][ablgB;43][adlry;43][lpqsy;43][aflvy ;43][alpwy;43][bdlqs;43][abdlq;43][ablpw;43][alpsy;43][lpquy;43][blqvC;42][bloCy;42][dlqvy; 42][abqry;42][blpqC;42][alowy;42][aluwy;42][loqvy;42][adlqy;42][abdqy;42][alory;42][algsy;42][alvCy;42][ablpr;42][adlsy;42][alnvy;42][lgrwy;42][adlpv;42][alnuy;42][bdloy;42][bdlwy;42][lgrvy;42][ablop;42][alsvy;42][bluwy;42][lngry;42][alswy;42][abely;42][logry;42][dlqry;42][ab cls;42][ablwC;42][blpvy;42][lnpqy;42][blxCy;42][ablmq;42][alovy;42][alpCy;42][adlnw;42][bl puy;42][alpuv;42][adlwy;42][aclvy;42][bqvCy;42][alqxy;42][ablno;42][lnqvy;42][blnvy;42][bln ry;42][bdlqv;42][abcqy;42][ablru;42][alrsy;42][abclC;42][blnuy;42][alpqr;42][alnwy;42][ablvC; 42][adlny;42][abdlr;42][abflp;42][abclr;42][alnuw;42][adlpq;42][adlnu;42][blsvy;42][lngwy;42][alnry;42][lpvCy;42][blnqv;42][ablng;42][ablns;42][abclv;42][abmqy;42][lgsvy;42][ablrw;42][a dluy;42][blrsy;42][alpxy;42][bclqy;42][blruy;42][blsuy;42][blpsy;42][ablnB;42][blrwy;42][bluC y;42][beqvy;42][ablmp;42][blnuw;42][alpru;42][loqwy;42][bgruy;42][bnqvy;42][adlnv;42][bdq xy;42][ablou;42][blswy;42][bcdly;42][abluv;42][blnrw;42][bpqvy;42][bdlqr;42][ablmr;42][abcl o;42][ablsC;42][bmqvy;42][aclpy;42][aboqy;41][clpqy;41][aclnu;41][bdluy;41][ablpt;41][bqsvy ;41][bdpqy;41][abdlo;41][abfln;41][ablyh;41][ablms;41][ablsu;41][adlps;41][ablyj;41][bluxy;41][ablor;41][abloC;41][ablyB;41][ablyz;41][lqvxy;41][blpqu;41][lgrsy;41][ablyi;41][ablsw;41][dl psy;41][bfqvy;41][lnvwy;41][blnpy;41][aflpy;41][lvwCy;41][abclu;41][abngy;41][aclry;41][bdl nq;41][lgswy;41][bdlxy;41][bdlnv;41][adlxy;41][acluy;41][blouy;41][abdlv;41][ablyk;41][ablyg ;41][adlpr;41][alnqu;41][alpqu;41][bdloq;41][lpqxy;41][abdlC;41][ablyA;41][alquv;41][alrxy;41][ablnC;41][ablpx;41][bdlnw;41][alrCy;41][bdgry;41][blpwy;41][boqvy;41][abqxy;41][alwCy;41][ablvw;41][ablos;41][bpquy;41][abnwy;41][blpnv;41][bdawy;41][dloy;41][aflry;41][alaru;41 ][abdls;41][dlpvy;41][blory;41][blrvy;41][dlqwy;41][blmvy;41][adlov;41][adlqv;41][blqsC;41][abdlw;41][aclnv;41][bquwy;41][lgruy;41][abluw;41][lquwy;41][alngw;41][adlpw;41][blqrC;41][alngy;41][abluC;41][bflvy;41][ablow;41][abquy;41][alpqs;41][algsv;41][bdlsC;41][abpuy;41][b lnsw;41][clqvy;41][ablrs;41][adlnr;41][blquv;41][bclny;41][almvy;41][adlos;41][algrw;41][blpr y;41][adlpx;41][dlpCy;41][blnqw;41][adlqr;41][bdfly;41][adlnx;41][lnrwy;41][acdln;41][bdvCy ;41][aluCy;41][blvwy;41][ablmv;41][lopqy;41][alqrv;41][abygB;41][bdlqC;41][bqrvy;41][lgsuy ;41][ablqx;41][abdlu;41][abdpy;41][dlpry;41][luvwy;41][bclnv;41][aqrvy;41][adlnq;41][loquy;41][abcny;41][adlpu;41][abdvy;41][aclny;41][bgrwy;41][alsCy;41][lqwxy;41][bdlvC;41][abflr;41][aclqy;41][blnqr;41][bclCy;41][alnxy;41][blqCy;41][bfluy;41][abclx;41][dlory;41][aqvwy;41][altvy;41][bloqC;41][clqwy;41][alnug;41][alquw;41][ablni;41][ablmo;41][alopy;41][adlng;41][bl nvw;41][abvgB;41][ablsv;41][adlnB;41][bpqwy;41][blpqw;41][dlqsy;41][alpqw;41][bdqsy;41][alqvw;41][aclnr;41][abflo;41][aloCy;41][ablqt;41][bclns;41][bcqvy;41][bquxy;41][clqry;41][bp gry;41][lprCy;41][bdlnp;41][abvCy;41][bdlps;41][alnru;41][bdvgB;41][loqsy;41][blqsw;41][abr uy;41][alnuv;41][abelp;41][adlsv;41][bcluy;41][ablnx;41][bqvwy;41][aclsy;41][alnuB;41][dlnry ;41][bqvxy;41][aluxy;41][dlpwy;41][abcfl;41][dlvCy;41][blpqs;41][abqsy;41][alvxy;41][blquw; 41][bdogy;41][blnvC;41][dlovy;41][bqtvy;41][alnrw;41][blmqy;41][acloy;41][blopy;41][blnxy; 41][afloy;41][blqwC;41][abflC;41][adlnp;41][aloqv;41][lquxy;41][alnvw;41][blpxy;41][blnuv;41][lpwCy;41][adlvw;41][bcdln;41][blnpq;41][adlns;41][abdny;41][adloq;41][bdlpC;41][adqxy;41][bdlsw;41][bdlns;41][abdgB;41][abwCy;41][dlnvy;41][abdry;41][ablmn;41][adlow;41][bdlqw ;41][adqvy;41][almry;41][ablpz;40][cdlry;40][bdlnu;40][adlsw;40][alpsv;40][dlvwy;40][alnuC;40][dlrvy;40][blqrw;40][dlpqv;40][belqy;40][alwxy;40][dlowy;40][alrwC;40][blrxy;40][alrty;40][dlrsy;40].

[0303] The combinations with the highest “at least 3 phage % coverage” are provided herein below. The phage combinations are ordered in descending performance grade.

[0304] Thus, for example, in the case of [abdly;30], when 395-D2-3-1, 395-D2-3-2, 395-D2-3-4, KP10-11 and KP10-91 are used in a combination, 30% of the bacterial strains tested were targeted by at least 3 of the 5 phage.

[0305] [abdly;30][abdlv;30][ablvy;28][abdrv;28][abdlw;28][abdls;28][abdvy;28][abdlp;28][abdl o;28][abcdl;28][abruv;28][abprw;28][ablwy;28][abdpv;28][abrvy;28][ablpy;28][ablrv;28][abqvy ;28][abdov;28][abduw;28][abcdw;28][ablvw;28][abdpr;28][abrvw;28][abluw;28][abdlr;28][abqr v;28][ablrw;27][bdlpv;27][ablqv;27][bdlvw;27][ablpv;27][bdlvy;27][abluy;27][abdsy;27][abdv w;27][abcrv;27][abdln;27][abdrw;27][abrvC;27][abluv;27][abduv;27][abdlu;27][abcuw;27][abd ow;27][abdlx;27][abdmv;27][abdlq;27][ablry;27][abclv;27][ablsv;27][abvCy;27][blpvw;27][abp vw;27][abdwy;27][ablpw;27][abinw;27][abdux;27][abdsv;27][bdlpr;27][abquy;27]1[bdlpu;27][ab dlm;27][adlvy;27][abclp;27][abuvw;27][bdlrv;27][abcdv;27][ablsw;27][abclw;27][abdxy;27][ab cwx;27][abfrv;27][bdpru;27][ablpr;27][abuvy;27][abdwx;26][bdrvw;26][ablrs;26][bdlpy;26][ab drx;26][abdry;26][abdpw;26][acduw;26][bdlov;26][bdlvx;26][ablvC;26][abdqv;26][bdpvw;26][a bouv;26][abpru;26][bcpvw;26][bcdlv;26][abcdu;26][blrvw;26][ablru;26][ablov;26][blpwy;26][b dlwy;26][abcpr;26][bdluv;26][blqvy;26][adluw;26][abduy;26][ablux;26][abdor;26][bdluy;26][bl prv;26][blruv;26][abruw;26][abrtv;26][abcpw;26][abdlC;26][blvwy;26][blprw;26][abdpx;26][ab ovw;26][abopv;26][bdruv;26][aberv;26][blpvy;26][ablmv;26][brvwy;26][absvw;26][abcdx;26][a cdlu;26][ablxy;26][bruvw;26][abcly;26][abprv;26][abdrs;26][blqry;26][ablqy;26][abmuw;26][bl puy;26][abpuv;26][aduwx;26][alvwy;26][aluwy;26][abdru;26][abclr;26][acdlv;26][bprvw;26][ac dlr;26][abnrv;26][adlvw;26][blnpr;26][ablvx;26][bdrvy;26][aborw;26][bdprw;26][bcdlw;26][blu vy;26][bcrvw;26][abdfu;26][blprs;26][blpru;26][abdqu;26][abrsw;26][abpvy;26][abdnw;26][abc nw;26][adluy;26][bdlpw;26][blpry;26][abuwx;26][bdlru;26][ablow;26][abrvx;26][ablpC;26][adl ux;26][adruw;26][ablqw;26][bclpv;26][abcvw;26][abloy;26][abdvx;26][adlwy;26][abcov;26][ab dnv;26][abdgw;26][acdvw;26][aprvw;26][bcdlp;26][abcdr;26][bpvwy;26][abdoy;26][acdlw;26][abcpv;26][abpuw;26][aluwC;26][abdwC;26][ablsy;26][aborv;26][bdlry;26][abdpy;26][abdvC;26][abrCy;26][ablCy;26][aluwx;26][bclvw;26][abflv;26][aduvw;26][abrsv;26][abdpu;26][bdluw;26][bpuvw;26][acpvw;26][abcow;26][abcwC;26][abdox;26][abcsw;26][bclpr;26][adlwx;26][aluv w;26][ablnp;26][bopvw;26][abuwy;26][ablpu;26][abosw;26][aclwx;26][abcrw;26][adlry;26][abc uv;26][blpvC;26][aduvx;26][abquw;26][bervw;26][aclvw;26][abmvw;26][adlrv;26][abmrv;26][bcdrv;26][abrwy;26][ablmw;26][abcln;26][abdmu;26][abdfv;26][ablwC;26][bcprw;26][bdrvx;26][abuxy;26][abpsw;26][bluvw;26][abcew;26][blprC;26][bdlop;26][ablqu;26][bprwy;26][abpry;26][abdmw;26][abdqy;26][bdlor;26][brvwx;26][adlpr;26][adlpu;26][abclu;26][abrux;26][bruvx;26][ablnv;26][abouw;25][abeov;25][brvwC;25][abdmr;25][bcrvx;25][bduvy;25][bdlou;25][blsvw ;25][bdouv;25][acdwy;25][abcsv;25][blovw;25][abdsx;25][adrvw;25][bclrw;25][abdtw;25][adv wy;25][abcdy;25][ablmu;25][blrwy;25][bluwy;25][bcdlr;25][abcls;25][alnvw;25][abrwx;25][blp vx;25][bcluv;25][ablmy;25][alrvw;25][bdvwy;25][aboru;25][abdel;25][bclrv;25][blpqv;25][abdq x;25][bdlsv;25][blruy;25][alqwy;25][bdlrw;25][abltv;25][aclnw;25][bcruv;25][acuwx;25][adlqw ;25][abdou;25][abruy;25][alprw;25][alnpu;25][abqwy;25][bdovw;25][bduvw;25][abmpv;25][blr su;25][abluC;25][bdlps;25][ablop;25][abprx;25][blpuv;25][abpvC;25][acdru;25][bmpvw;25][bdr uw;25][bpsvw;25][acvwx;25][aboqv;25][alpvw;25][buvwy;25][abpqv;25][ablrx;25][abvwy;25][abovC;25][acrwx;25][acdux;25][bdlow;25][bnpvw;25][abdtv;25][abdsw;25][abopw;25][lprvw;25][bprwx;25][aduwy;25][alprv;25][blvCy;25][abnrw;25][bpvwC;25][abqxy;25][ablqx;25][ablnu ;25][ablou;25][bfrvw;25][abdCy;25][bprvx;25][alpuw;25][blouv;25][acuvw;25][abopr;25][abps v;25][alpwy;25][abqux;25][blprx;25][abelv;25][acnvw;25][bdlay;25][bdpvx;25][bdlsu;25][abdp s;25][bcduw;25][abcux;25][bcdlu;25][bclpw;25][adpuw;25][alquw;25][aclpv;25][bdqrv;25][blm pr;25][abuCy;25][ablny;25][abcdp;25][blopv;25][aluvx;25][abovy;25][abuxC;25][bpvwx;25][bo prw;25][acpwx;25][adluv;25][ablnx;25][abvwx;25][blvwx;25][adlrw;25][bcnvw;25][abpvx;25][acprv;25][abmrw;25][abuwC;25][bcpwx;25][bouvw;25][abqry;25][abfpv;25][ablsu;25][abuvx;25][brvxy;25][bdopr;25][blpqr;25][alpvy;25][abdop;25][bdoru;25][abfuw;25][abnvw;25][aclwy;25][bruvy;25][bdpvy;25][abdtu;25][abprC;25][abcvy;25][ablor;25][adlwC;25][ablps;25][acduv;25][blnpv;25][bdpuv;25][bdsvw;25][bgrvw;25][adprv;25][borvw;25][adlpv;25][bcorw;25][dlprv; 25][bdprv;25][bdlsw;25][abcrx;25][abcru;25][acvwC;25][bcrvy;25][abrvh;25][aclpr;25][bdorv;25][bclpy;25][abdnp;25][blpqy;25][alwxy;25][abnuw;25][bgrvy;25][abcdn;25][abqrw;25][abdos; 25][abxCy;25][abdny;25][bervx;25][abloC;25][abpux;25][abnpv;25][ablmp;25][bdlwC;25][bcov w;25][blmvw;25][bluCy;25][adelw;25][absuv;25][abrvk;25][lpruv;25][adlpy;25][abduC;25][acr vw;25][abrvg;25][bluvx;25][boruv;25][bdlrs;25][acdwx;25][blrvy;25][bepru;25][abcds;25][abrv z;25][blrvC;25][abnov;25][alpuC;25]

[0306] The combinations with the highest “at least 4 phage % coverage” are provided herein below. The phage combinations are ordered in descending performance grade.

[0307] Thus, for example, in the case of [abprv;20], when 395-D2-3-1, 395-D2-3-2, KP10-4, KP10-61, and KP10-85 are used in a combination, 20% of the bacterial strains analyzed were targeted by at least 4 of the 5 phage.

[0308] [abprv;20][bpruv;19][abcrw;19][abrvw;19][abuwx;19][abcvw;19][bdprv;19][bprvw;19][abduw;19][abdvw;18][abrvx;18][abpvw;18][blprv;18][abdlu;18][bcprv;18][abvwx;18][abdru;18][abpvx;18][abdux;18][ablrv;18][abcrv;18][abduv;18][abpwx;18][ablwx;18][abdrv;18][abcuw;18][abuvw;18][abuvx;18][bpvwx;18][brvwx;18][bruvw;18][borvx;18][abdlw;18][abpux;18][abru w;18][abrwx;18][abluv;18][bcvwx;18][abcdw;18][blruv;18][bprvx;18][abdwx;18][bcrvw;18][ab dlv;18][abdsu;18][abcwx;18][ablpv;18][abcuv;18][abdou;18][abcvx;18][abdrw;18][abclw;18][a bcpw;18][abovw;18][acdlw;18][ablvw;18][abdvx;18][aborv;18][adluw;18][bdlrv;18][blpuv;18][abcdu;18][ablvx;18][bcruw;17][bcpvw;17][abdpv;17][acdvw;17][acruw;17][abcpv;17][acdrw;17][bclrv;17][bnprv;17][abruv;17][bcuvw;17][blrvx;17][abdpw;17][abouw;17][abluw;17][acrvw;17][buvwx;17][abpuv;17][abpuw;17][abcdv;17][ablpu;17][abduy;17][acuvw;17][abdpu;17][abeu w;17][acdpw;17][abfuw;17][abcux;17][bcruv;17][abprx;17][beprv;17][abdlr;17][absuw;17][abv wy;17][abcru;17][blpvw;17][borvw;17][acluw;17][bdruv;17][blrvw;17][abdsw;17][abovx;17][a uvwx;17][abdlx;17][bcprw;17][abeux;17][ablpr;17][bdvwx;17][abdfw;17][abprw;17][acduw;17][abcdr;17][ablux;17][aberu;17][bpuvx;17][bpruw;17][abevw;17][acuwx;17][aduwx;17][abfuv;17][bcdvw;17][adluv;17][abnvw;17][bcpvx;17][blruw;17][abuwy;17][bclvw;17][bcdpw;17][blpru :17][bdrvw;17][bdpvw;17][abvwC;17][aduvw;17][boruv;17][bcrvx;17][bpuvw;17][abavw;17][a bdwy;16][bluvw;16][bdrvx;16][bcpwx;16][abouv;16][blprw;16][ablpw;16][abuwC;16][bdlrw;16][ablpx;16][bcrwx;16][abnrv;16][bovwx;16][acpvw;16][bprux;16][aruvw;16][ablru;16][abclv;16][bdlpv;16][apuwx;16][bmprv;16][apvwx;16][abdew;16][bcdlw;16][bduvw;16][abcmw;16][adru v;16][abdnu;16][bcduw;16][blvwx;16][bouvw;16][brvwy;16][bdlvw;16][abeuv;16][acprw;16][a brvy;16][bcdrw;16][abdfu;16][abruC;16][bnrvw;16][abpru;16][acpuw;16][abewx;16][aduwy;16][bruvx;16][acvwx;16][bprvC;16][bdor;16][abfru;16][abvxy;16][bdlpr;16][arvwx;16][ablrw;16][abmvw;16][abowx;16][abfvw;16][bdluv;16][adpuw;16][abnuv;16][abopw;16][bruwx;16][abnv x;16][acdwx;16][bdluw;16][abdrx;16][bclpw;16][abevx;16][blpvx;16][acduv;16][abnpv;16][abc lx;16][abcsu;16][abclu;16][advwx;16][abrux;16][cruvw;16][abmrv;16][bpuwx;16][abdpr;16][ab cow;16][abprs;16][bclpv;16][acdwy;16][aborw;16][abwxC;16][alvwx;16][adpvw;16][abduC;16][abcfu;16][abcfw;16][boprv;16][abcsw;16][abcdp;16][aberv;16][acruv;16][acdew;16][alpuv;16][aclvw;16][boruw;16][bdprw;16][abwxy;16][abcrx;16][bvwxy;16][apruw;16][abdtu;16][abpwy;16][bprwx;16][apruv;16][absvw;16][abswx;16][bclwx;16][bdlpw;16][adlru;16][bpvwy;16][adfuw ;16][apuvw;16][abcpx;16][bprvy;16][adnuw;16][bclrw;16][abepu;16][blrvy;16][bcpuw;16][abeo u;16][brsvw;16][bduwx;16][aclpw;16][abepw;16][bdeuw;16][aclrw;16][bprsw;16][abdmw;16][a cpwx;16][abdwC;16][bprsv;16][adlrw;16][bnpvw;16][bdlru;16][abcd;16][bcluw;16][alprv;16][c dprw;16][bcdwy;16][ablrx;16][bcuwx;16][adlvw;16][abnuw;16][alruw;16][abrwy;16][abmpw;16][bcduv;16][abnwx;16][bdruw;16][bluvx;16][adruw;16][bpgrv;16][lpruv;16][abopr;16][abdow; 16][adprw;16][abcdy;16][acdwC;16][abcpu;16][abcou;16][bnruv;16][blorv;16][abdfr;16][abmuv ;16][abdqw;16][abdov;16][adpuv;16][abdnw;16][abcew;16][blpuw;16][bcopw;16][cprvw;16][bc nrv;16][bclpr;16][bdnrv;16][bdpvx;16][bluwx;16][aclwx;16][bfprv;16][alruv;16][adrvw;16][bdp uv;16][abnpw;16][brvxy;16][bopvw;16][aberw;16][acdmw;16][abquv;16][abuvy;16][acdnw;16][pruvw;16][alpuw;16][bdpwx;16][blprx;16][abmwx;16][abcde;16][abcpr;16][cdluw;16][adeuw; 16][bcdpv;16][abdrC;16][abuxC;16][abopv;16][bdpuw;16][acdpv;16][abdeu;16][cdpvw;16][blp ux;16][abpsx;16][aprvx;16][abdvy;16][adpwy;16][abctw;l6][abdlp;l6][abdqu;16][bdlwx;l6][ad lux;16][aruwx;16][bnrvx;16][abcdf;16][adlpw;16][abquw;16][abfpu;16][aprvw;16][abuvC;16][b mrvw;16][bcdrv;15][bcprx;15][blrwx;15][abpwC;15][bevwx;15][bclvx;15][abnpr;15][blopr;15][bdovw;15][bduvx;15][abpvy;15][borwx;15][abruy;15][bcdew;15][bnpvx;15][adprv;15][apuvx;15][acdrv;15][bepvw;15][abdop;15][abpsw;15][acdpr;15][aduvx;15][absvx;15][abfux;15][abdor;15][adepw;15][admpw;15][abdmu;15][abmvx;15][abcdC;15][cduvw;15][abrwC;15][acdfw;15][a bepv;15][abpsu;15][acopw;15][bcouw;15][abtuw;15][acrwx;15][aluvw;15][abvxC;15][blrux;15][bdlux;15][cdruw;15][abdpx;15][abfvx;15][abqru;15][acdlu;15][bprsu;15][adsuw;15][bcdmw;15][alrvx;15][belrv;15][bcorv;15][abnux;15][afuvw;15][abqwx;15][adlrv;15][abmuw;15][abdry;15][abrvC;15][alpru;15][dlprv;15][abmru;15][abelu;15][aduwC;15][abclr;15][blovx;15][bcovw;15][bdrwx;15][aluwx;15][abder;15][bcpuv;15][bnprw;15][acdtw;15][bnvwx;15][acouw;15][bdpwy; 15][lprvw;15][bnpuv;15][bruvy;15][bmpvw;15][bdlvx;15][acmpw;15][bdfuw;15][acdpy;15][adf vw;15][boprx;15][abctu;15][acpuv;15][bopru;15][bcluv;15][bcdru;15][abcwC;15][abrsw;15][ab oru;15][acdpu;15][acuvx;15][pruvx;15][abrsv;15][adluC;15][bdvwy;15][abmpv;15][bprsx;15][a dfpw;15].

### Example 3

### Phage Combinations Selected According to Host Coverage as Classified by Bacterial Capsule Type

[0309] For this example, the particular phages are referred to by the single letter designation in Table 1, herein above.

[0310] 2 Phage Combinations

[0311] 2 phage combinations were analyzed in silico for their ability to lyse the 352 different strains of Klebsiella pneumoniae bacteria as profiled by their capsule type, based on the ability of the single phage to lyse a bacteria of a particular capsule type as assessed by a liquid media assay.

[0312] The combinations that lyse the highest number of bacterial strains (as profiled by their capsule locus type) are provided herein below. This trait is referred to as “at least 1 phage % coverage”. The number following each combination refers to the Percent trait performance—in this case the percent of bacteria strains as profiled by their capsule type that are targeted by the phage combination. The combinations are listed in descending performance grade.

[0313] [lg;78][lB;77][li;76][lu;74][lq;74][dl;74][lw;73][lv;73][ls;73][lC;73][ly;73][lj;73][cl;72][lx;72][el;72][ln;70][lp;70][lr;70][lt;70][lz;69][fl;69][lm;69][lo;68][lh;67][lA;67][lk;67][dn;65][ds; 65][ru;64][uv;64][uw;64][vy;64][dp;64][di;64][du;64][dg;64][dB;64][nu;64][dr;64][dv;62][uy;62][dy;62][nv;62][uB;62][wy;62][qu;62][dq;62][mu;61][dm;61][qw;61][ug;61][qv;61][pu;61][cu;61][nw;61][uC;61][ri;60][dt;60][ry;60][mr;60][vC;60][rg;60][qr;60][dj;60][wi;60][su;60][do;60][d w;60][rB;60][yg;60][dx;60][df;59][yi;59][eu;59][de;59][py;59][ui;59][pq;59][rw;59][nr;59][ny;59][uj;59][vi;57][vg;57][rC;57][wg;57][cn;57][vB;57][sw;57][yB;57][nC;57][my;57][dC;57][ou;57][mp;56][nq;56][mw;56][mv;56][ms;56][cd;56][tu;56][mn;56][wB;56][ey;56][dz;56][ng;56][ns; 56][pv;56][sv;56][wC;56][pC;56][ux;56][pw;56][xy;56][sy;56][Cg;56][Ci;56][qg;56][pg;56][wj; 56][sC;56][cq;56][dk;56][dA;56][rj;56][er;56][qx;56][pB;56][cy;56][np;56][nB;56][fn;56][ni;56][cr;56][pi;56][cv;56][oy;56][vw;56][en;55][mC;55][tw;55][no;55][nx;55][yj;55][dh;55][qB;55][n j;55][rs;55][cp;55][qi;55][oq;55][fy;55][CB;55][oC;55][ps;55][pr;55][rv;55][cg;55][ci;55][qs;55][ev;55][rx;53][ei;53][fu;53][cs;53][ty;53][mx;53][ow;53][eq;53][fw;53][qt;53][tv;53][mt;53][eg; 53][ep;53][mg;53][nt;53][em;52][cC;52][fv;52][vj;52][mi;52][fq;52][vx;52][uz;52][mB;52][cm; 52][Cy;52][tC;52][mo;52][ew;52][es;52][mq;52][pj;52][xg;51][xi;51][uA;51][Cj;51][cB;51][cw; 51]

[0314] The percent of host bacterial strains (as profiled by their capsule locus type) that are infected by two phages of a phage combination are provided. This trait is referred to as “at least 2 phage % coverage”. The phage combinations are ordered in descending performance grade.

[0315] [dl;48][lu;43][lr;43][dw;42][ln;42][lw;42][du;41][lp;41][cd;40][ly;40][cw;39][lv;39][cl;38][dC;38][dr;38][dy;38][rv;36][vw;36][dv;36][qy;36][pr;36][lm;35][pw;35][dn;35][lC;35][dp;35][rw;35][wx;34][np;34][uw;34][Cy;34][ru;33][de;33][nr;33][uy;33][ew;33][pu;33][cr;33][el;33][lx;33][nw;32][ny;32][cy;32][ry;32][lq;32][dx;32][nu;32][wC;32][px;32][pv;32][cp;32][py;31][ce; 31][cv;31][ux;31][eC;31][dm;31][lo;31][rx;31][wy;31][cu;31][dq;31][uv;31][cC;31][fl;30][rC;30][qC;30][uC;30][vx;30][cn;30][lt;28][fu;28][pC;28][er;28][nC;28][mw;28][cx;28][eu;28][s;28][en;28][nx;28][ep;28][df;27][xC;27][ev;27][nq;27][fr;27][cm;27][ex;27][or;27][ov;27][nv;27][rt;27][do;26][pt;26][ey;26][ow;26][op;26][vy;26][qu;26][mn;26][mu;26][rs;26][fw;26][dt;26][xy;26][tw;25][qr;25][fp;25][my;25][fx;25][mv;25][mp;25][tu;25][co;25][qw;25][cq;25][vC;25][ps;24][ou;24][fv;24][ds;24][ct;24][cf;24][ty;24][sw;24][pq;24][mr;24][mC;24][su;24][ox;24][mq;24][nt; 24][ef;24][cs;23][em;23][tv;23][fy;23][no;23][eq;23][sy;23][gB;23][ns;23][fC;23][tx;22][os;22][qv;22][fm;22][eo;22][sv;22][mx;22][sx;22][oy;22][fn;22][tC;20][gi;20][ft;20][qx;20][st;20][dg;19][es;19][fs;19][sC;19][oC;18][ot;18][qs;18][fo;18][fq;18][wg;18][et;18][mo;17][iB;17][lg;17][n g;17][ug;17][qt;17][pg;16][dB;16][mt;16][cB;16][oq;16][wB;16][cg;16][rg;15][tg;15][fg;15][xg; 15][di;15][ms;15][nB;15][li;15][ui;15][vg;15][lB;15][ni;14][yg;14][sg;14][pB;14][xB;12][yB;12]

[0316] 3 Phage Combinations

[0317] 3 phage combinations were analyzed in silico for their ability to lyse the 352 different strains of Klebsiella pneumoniae bacteria as profiled by their capsule type, based on the ability of the single phage to lyse a bacteria of a particular capsule type as assessed by a liquid media assay.

[0318] The combinations that lyse the highest number of bacterial strains (as profiled by their capsule locus type) are provided herein below. This trait is referred to as “at least 1 phage % coverage”. The number following each combination refers to the Percent trait performance—in this case the percent of bacteria strains as profiled by their capsule type that are targeted by the phage combination. The combinations are listed in descending performance grade.

[0319] [lqg;85][lyg;84][lqB;84][lsg;83][luB;83][lqi;83][lug;83][lyB;83][lsB;82][lCg;82][lyi;82][lui;81][dlg;81][dlB;81][liB;81][lCi;81][lgj;81][dli;81][elg;81][lCB;81][ltB;81][lsi;81][lmg;81][lg i;81][lvi;81][lrB;81][lvg;81][lvB;81][lrg;81][ltg;81][flg;81][lwi;81][clg;81][lwB;80][lxB;80][lwg ;80][lxi;80][lpB;80][lng;80][lnB;80][lpg;80][eli;80][elB;80][flB;80][luj;80][lmB;80]lri;80][lgj;80][lxg:80][liB:80[[dla:80][cli:80[[lgB:80][lgz:80][lau:80[[mi:781 [1sC:78[[lti:78[[lvi:78][lni:78[[f li;78][luy;78][lgh;78][lni;78][lgk;78][lzB;78][lgA;78][lqx;78][lwj;78][dls;78][lCj;78][lvj;78][dly ;78][log;78][dlj;78][lqv;78][lqw;78][lij;78][lgs;78][c1B;78][clq;77][lhB;77][luC;77][elq;77][liz;77][lsv;77][lpq;77][loB;77][lsw;77][lkB;77][lsu;77][lAB;77][lsy;77][els;77][lgt;77][lnq;77][lxj;77][lxC;77][lqC;77][elj;77][lvy;77][lvC;77][lsj;77][lwy;77][lxy;77][ltj;76][loi;76][ely;76][liA;76][dlu;76][lCy;76][dln;76][elx;76][lns;76][luv;76][luw;76][cly;76][clu;76][lux;76][luz;76][lsx;76][1 st;76][clj;76][lrj;76][cls;76][lik;76][lgr;76][lpy;76][dlx;76][lnC;76][dlv;76][elu;76][dlt;76][dlC;76][lpj;76][lny;76][lwC;76][elv;76][lpC;76][ltC;76][lrs;76][lru;76][lqz;76][lty;76][dlr;76][flq;76][lih;76][lnj;76][lnu;76][lrC;75][lvz;75][cdl;75][elt;75][dlw;75][lyz;75][cln;75][flw;75][dfl;75][lsz ;75][lnw;75][lnv;75][flj;75][elp;75][elr;75][lry;75][eln;75][fly;75][lrw;75][lmq;75][de;75][ltv;75][dlz;75][ruB;75][vyi;75][fls;75][lpu;75][dlm;75][lwz;75][flu;75][clr;75][lps;75][loq;75][flv;75][ltu;75][clv;75][elw;75][clC;75][clx;75][dlp;75][ltw;75][lCz;75][lmu;75][clt;75][elz;74][lrx;74][1 uk;74][lgk;74][clz;74][lqA;74][lpw;74][lmw;74][lmv;74][lmx;74][clp;74][lvw;74][lgh;74][lmC; 74][cel;74][lmy;74][quv;74][lqy;74][luh;74][lmj;74][flx;74][wyi;74][uvy;74][cfl;74][loj;74][ljz;74][vyB;74][qvi;74][lwx;74][dlo;74][uvB;74][clw;74][vyg;74][lxz;74][ltx;74][lnx;74][lou;74][flC ;74][loy;74][rug;74][lvx;74][luA;74][dlh;74][lrv;74][lms;74][loC;74][dlk;74][dlA;74][lrz;73][nu v;73][dnq;73][los;73][ryg;73][uyB;73][flp;73][lvk;73][uyg;73][flt;73][lwh;73][flr;73][lnr;73][lmt ;73][lnt;73][low;73][uvg;73][quB;73][lnp;73][lov;73][dsB;73][qwi;73][lrt;73][dsi;73][qvg;73][is h;73][lnz;73][dsg;73][lvh;73][lwk;73][lmr;73][lwA;73][lpt;73][ltz;73][efl;73][elm;73][lyh;73][lp v;73][lpz;73][lCA;73][lCk;73][elC;73][lpx;73][lmn;73][elo;73][clm;73][ljA;73][lhj;73][ljk;73][fl n;73][ryi;73][lsA;73][qvB;73][lsk;73][lmp;73][lvA;73][qug;73][qri;73][lyA;73][qrg;73][lCh;73][lyk;73][clh;72][lmz;72][vyj;72][lpr;72][clA;72][clk;72][nuB;72][clo;72][qrB;72][nqu;72][qru;72][flz;72][lno;72][eiA;72][uvi;72][lox;72][uvC;72][flm;72][lor;72][lot;72][uwy;72][wyg;72][vCi; 72][svy;72][nuy;72][suB;72][nvy;72][nug;72][elh;72][nru;72][dgi;72][ixA;72][dqg;72][ryB;72][dri;72][quw;72][drg;72][dyg;72][dsv;72][drB;72][dyi;72][dqB;72][dug;72][ruy;72][rui;72][dyB; 72][dns;72][dps;72][dqs;72][dny;72][dpB;72][dpi;72][elk;72][dpg;72][dpq;72][duB;72][dvi;72][1 xh;72][lxk;72][lrh;70][dvg;70][myg;70][dui;70][lrk;70][uvj;70][lrA;70][lmo;70][mru;70][pqg;70][mrg;70][nwi;70][mri;70][ruj;70][duv;70][muy;70][loz;70][mug;70][qsw;70][qui;70][swy;70][it h;70][pyg;70][ipk;70][dms;70][sug;70][mqu;70][suv;70][pA;70][ph;70][dnr;70][qsv;70][dnu;70][rCi;70][dvB;70][mrB;70][uwB;70][pug;70][dsw;70][dpy;70][inA;70][rwi;70][qwg;70][cqu;70][lop;70][uyi;70][dqv;70][dqu;70][dgr;70][ink;70][ruw;70][itk;70][nuj;70][flo;70][muB;70][lnh;70][wyB;70][puB;70][nqv;70][tA;70][wyj;70][dsy;70][nuw;70][dng;70][dni;70][dnB;70][nvi;70][dnv;70][uwg;70][uwi;70][cru;69][muv;69][dnj;69][nvj;69][dmB;69][suw;69][dmg;69][nwy;69][cuy;69][dpu;69][pqu;69][eyi;69][puy;69][nui;69][muC;69][ouB;69][nsv;69][uCB;69][syg;69][qv j;69][dmi;69][uCg;69][uwj;69][eyg;69][svC;69][nwj;69][rCg;69][cug;69][dmu;69][nvB;69][nyg; 69][qvw;69][nyi;69][lmA;69][ryj;69][nvC;69][dnp;69][dmr;69][nvg;69][rwy;69][nuC;69][equ;69][myB;69][cuv;69][rsu;69][nsu;69][drs;69][uyj;69][dru;69][nri;69][flk;69][nrg;69][dry;69][flA; 69][qwB;69][uvw;69][ruC;69][flh;69][pgi;69][drj;69][qwj;69][pqB;69][dsx;69][euy;69][dsu;69][cqv;69][pyi;69][dsj;69][cnu;69][lmk;69][lmh;69][myi;69][quj;69][swi;69][duy;69][qrj;69][duj;69][pyB;69][vCg;69][vCB;69][lkz;69][lzA;69][lhz;69][nqw;69][dvy;69][evy;69][qrw;69][vwy;69][csu;68][pvy;68][pwy;68][eqv;68][dos;68][doq;68][uwC;68][dnC;68][dnx;68][uCj;68][cpu;68][eru;68][puv;68][qtv;68][drw;68][cuB;68][dmn;68][dgj;68][dvj;68][doi;68][dog;68][lok;68][doB; 68][dmy;68][dqx;68][cnv;68][oyg;68][dst;68][loA;68][duw;68][nou;68][dsC;68][vCj;68][mgr;68][loh;68][pqv;68][pqw;68][cvy;68][tvy;68][pwi;68][pru;68][pui;68][puj;68][uCi;68][dnw;68][dq w;68][nyB;68][xyi;68][svB;68][rCB;68][ouy;68][nrB;68][nsw;68][svi;68][oqu;68][dxy;68][dwi; 68][dyj;68][fwy;68][mvi;68][mry;68][sui;68][fvy;68][qsg;68][dwy;68][dmq;68][eri;68][dfn;68][syi;68][mwy;68][mui;68][dqt;68][cui;68][ogg;68][psu;68][puw;68][oug;68][des;68][mvy;68][su y;68][dpj;68][dxi;68][fqv;68][qsu;68][msu;68][euv;68][muw;68][rwg;68][wCi;68][nwg;68][dnt; 67][mpB;67][dnz;67][mqs;67][deB;67][suC;67][mnr;67][vwi;67][mqv;67][syB;67][mCi;67][dty; 67][tuv;67][dxB;67][npu;67][cyg;67][dno;67][cqg;67][dpr;67][dfi;67][dpt;67][svg;67][mCg;67][mpg;67][dfg;67][cqr;67][dfB;67][dfq;67][dfs;67][dmp;67][cgi;67][dmv;67][mpy;67][dmx;67][m wi;67][dwg;67][cuC;67][sCi;67][msy;67][dxg;67][dtB;67][dwB;67][msg;67][dux;67][msC;67][r vy;67][duC;67][mxy;67][sCg;67][swg;67][swC;67][vyz;67][cyi;67][mvg;67][xyg;67][mnv;67][1 hk;67][lhA;67][diB;67][tuB;67][rCj;67][cvi;67][twy;67][mnu;67][muj;67][mvB;67][lkA;67][cds; 67][rwB;67][rwj;67][mqw;67][dfy;67][cmu;67][ruv;67][pwg;67][puC;67][rsi;67][nyj;67][nrw;67][qux;67][nrv;67][nrj;67][ery;67][eug;67][emu;67][pCg;67][ngi;67][pCi;67][ngg;67][nvw;67][ov y;67][qvC;67][rux;67][dtg;67][qrv;67][pvg;67][nux;67][qvx;67][eyB;67][euB;67][egi;67][erg;67][egr;67][enu;67][pvi;67][qtw;67][egg;67][rsg;67][pvB;67][fqw;67][vxy;67][drv;67][drx;67][mq g;67][cri;67][vCy;67][deu;67][uxB;67][der;67][deq;67][den;67][uxy;67][dtv;67][mrC;67][nCi;67][mpq;67][drt;67][dei;67][euj;67][rsB;67][fyg;67][dey;67][nwB;67][fnv;67][nry;67][ngr;67][qxi; 67][mvC;67][doy;67][cni;67][deg;67][dpx;67][dpC;67][dij;66][epu;66][diz;66][epy;66][dev;66][qtu;66][djB;66][qsB;66][dmt;66][dnk;66][dgi;66][doj;66][drC;66][esu;66][dvC;66][dmw;66][dp v;66][dpw;66][owy;66][dgz;66][mrs;66][dmo;66][oCg;66][cng;66][cnr;66][cnq;66][mCB;66][m qB;66][oui;66][emy;66][pyj;66][dvw;66][dCi;66][quC;66][dgj;66][dfp;66][dfm;66][env;66][rsy; 66][dor;66][dtu;66][rxy;66][dti;66][qrx;66][dsA;66][ewy;66][rvB;66][rvi;66][riB;66][tuy;66][sw B;66][dvx;66][suj;66][oyi;66][epq;66][qrs;66][euw;66][tug;66][evi;66][dfv;66][qsi;66][rtu;66][d ou;66][dxj;66][erB;66][dfu;66][dCg;66][dCB;66][emr;66][tuw;66][dep;66][eui;66][dzB;66][dem ;66][rxi;66][qxg;66][dsz;66][mqi;66][mrw;66][fny;66][cpi;66][crg;66][psy;66][uCy;66][cuw;66][cux;66][uwz;66][ruz;66][cpg;66][mny;66][oaB;66][msw;66][oai;66][naB;66][oaw;66][wyz;66][nrC;66][cuj;66][cry;66][msB;66][pCB;66][ouC;66][uxg;66][eyj;66][psg;66][npy;66][mni;66][cs v;66][npq;66][pwB;66]i[mns;66][uvz;66][mnB;66][mnw;66][mng;66][npv;66][npw;66][msi;66][uvx;66][mtu;66][mpi;66][mrj;66][fnw;66][prg;66][pry;66][mpu;66][mpC;66][pgj;66][ujB;66][m sv;66][pqs;66][pqr;66][fnq;66][oyB;66][fnu;66][fyB;66][mqx;66][wCg;66][cpq;66][nuz;66][ntv; 66][nsC;66][nsy;66][nCj;66][nCg;66][fyi;66][nsi;66][xyj;66][ntu;66][nsg;66][mux;66][nwC;66][nvz;66][cdu;66][xyB;66][cdn;66][cdr;66][nCB;65][enr;65][dwj;65][opu;65][dyz;65][frB;65][dtw ;65][mwB;65][ogr;65][cfn;65][fuv;65][rty;65][fry;65][dvz;65][ruh;65][nwz;65][ntw;65][nvx;65][rvg;65][dgB;65][dgk;65][pri;65][ceu;65][dik;65][cdq;65][moy;65][esy;65][mou;65][qtB;65][prB ;65][dej;65][psv;65][psw;65][psC;65][qtg;65][psi;65][psB;65][det;65][fpq;65][qwz;65][dtx;65][n sB;65][nxy;65][cdp;65][oqv;65][rwC;65][rsw;65][nqx;65][oru;65][dtj;65][fqr;65][rsC;65][fqu;65][ory;65][vyA;65][fqg;65][nrs;65][wCy;65][wxy;65][ngs;65][eny;65][vyk;65][duA;65][osu;65][wCB;65][ngj;65][wCj;65][fpy;65][rxg;65][duz;65][cdv;65][cdy;65][rxB;65][wyk;65][fuB;65][cd i;65][mwC;65][dkB;65][rCy;65][Cyi;65][fuy;65][mwg;65][Cyg;65][fuw;65][cdg;65][fru;65][mn q;65][ouw;65][cmr;65][dfr;65]

[0320] The percent of host bacterial strains (as profiled by their capsule locus type) that are infected by two phages of a phage combination are provided below. This trait is referred to as “at least 2 phage % coverage”. The phage combinations are ordered in descending performance grade.

[0321] [dlu;59][luv;57][luw;57][dlp;57][dlv;56][dln;56][dlw;56][dlr;56][lru;56][lnu;56][lnv;56][1 pu;56][lmu;55][dlg;55][clu;55][lnr;55][dlm;55][del;55][lvy;55][lpv;55][lnw;55][dls;55][dlo;55][1 mr;55][lry;53][dlB;53][luC;53][dlx;53][lwy;53][lvw;53][lou;52][lgr;52][dlt;52][dfl;52][lrw;52][d ly;52][lpr;52][lmy;52][elu;52][luy;52][dlC;52][lpw;52][dru;52][lsu;52][dli;52][cdl;52][lmv;51][1 mw;51][lvC;51][lqw;51][lqv;51][lmp;51][lrC;51][lmn;51][lqu;51][ltu;51][lnp;51][dnu;51][lms;51][duw;51][dpv;51][dlq;51][lux;50][lrv;50][dpu;50][duy;50][dnw;50][dvy;50][dlj;50][clv;50][fln ;50][cdu;50][cln;50][dlz;50][lwC;50][lny;50][lwg;50][dou;50][lno;50][lpy;50][dsu;50][ely;49][ls w;49][clp;49][dwy;49][lnt;49][lnC;49][lvx;49][lpq;49][dvC;49][low;49][duv;49][dtu;49][dnv;49][lmo;49][lnx;49][dlA;49][dlk;49][duC;49][dpw;49][lmC;49][loy;49][clw;48][mnu;48][dpr;48][d wg;48][elr;48][ltw;48][lns;48][lps;48][dmp;48][dgw;48][dmu;48][clr;48][lmt;48][loC;48][dwi;48][dlh;48][cly;48][lwx;48][lrx;48][lri;48][lwi;48][dry;48][nuw;48][deu;48][drC;48][lui;48][lwB;48][lvg;48][clm;48][lrg;48][dqu;48][lop;48][lug;48][luB;48][lsy;48][mpu;48][cdn;48][lsv;48][elm ;48][lpC;48][ruv;48][lng;47][lpx;47][clC;47][dmn;47][dwB;47][ltv;47][lor;47][lrB;47][drw;47][1 uj;47][drv;47][eln;47][fly;47][lvB;47][dwj;47][npu;47][elC;47][dmv;47][dux;47][lmx;47][lpg;47][flu;47][elv;47][dmr;47][clq;47][duB;47][lnq;47][lxy;47][dvw;47][dCi;47][elw;47][lrj;47][dmw ;47][lrt;47][lqy;47][dCg;47][dnr;47][loq;47][clo;45][lmq;45][muw;45][lrs;45][uwC;45][dmy;45][dno;45][cdq;45][dui;45][cdp;45][lpi;45][puC;45][lCy;45][dtw;45][dug;45][lnj;45][dav;45][nrw; 45][lvi;45][cdv;45][cls;45][nvw;45][puv;45][flw;45][ruw;45][ouw;45][elp;45][cdg;45][puw;45][cdi;45][lpt;45][lni;45][uwy;45][cdy;45][flr;45][flp;45][dgr;45][dnp;45][nry;44][drg;44][dnC;44][lwk;44][dpy;44][dng;44][lnk;44][mru;44][lrA;44][lrk;44][lrh;44][ruC;44][uvw;44][drs;44][cnu;44][duj;44][pqu;44][puy;44][nwy;44][nuC;44][drB;44][quw;44][dri;44][lov;44][nuv;44][doy;44][dfr;44][lgs;44][flC;44][mrw;44][rwC;44][lnB;44][lpB;44][lCi;44][rvy;44][dCB;44][clx;44][elq;44][flv;44][dpC;44][cdr;44][dep;44][lty;44][lqx;44][nwC;44][uCy;44][dnt;44][lCg;44][cuw;44][d ev;44][lwj;44][der;44][den;44][lsC;44][luh;44][lyi;44][dey;44][luk;44][luA;44][dfu;44][cel;44][c 1B;43][ltC;43][flq;43][tuw;43][dor;43][dyg;43][qru;43][dvx;43][nru;43][dmt;43][flm;43][vwy;43][lgt;43][rwy;43][dns;43][lyj;43][dny;43][nrC;43][suw;43][muv;43][ruy;43][lpj;43][dxy;43][dnx; 43][drx;43][lyg;43][cfl;43][dnB;43][dni;43][enu;43][rvg;43][pru;43][pvy;43][dsy;43][suC;43][df n;43][clg;43][lCB;43][lnz;43][duz;43][mnw;43][luz;43][euw;43][suy;43][cli;43][dvg;43][npv;43][lwz;43][lrz;43][oru;43][dvB;43][elt;43][lnh;42][dms;42][rsw;42][dfv;42][mou;42][lpk;42][uwg ;42][wCy;42][deg;42][dmo;42][nsu;42][eru;42][uwB;42][rwB;42][mnv;42][dty;42][mnr;42][pwy ;42][dsC;42][dtv;42][qrv;42][uxy;42][nrv;42][dei;42][vCy;42][ngr;42][dfy;42][dqx;42][npy;42][pqr;42][qrw;42][epu;42][dfp;42][quC;42][ouC;42][cru;42][pry;42][mvy;42][nvC;42][ntu;42][mr y;42][msu;42][mny;42][npw;42][uwi;42][cuv;42][nuy;42][lyB;42][elo;42][nvy;42][lxg;42][clt;42][uvy;42][uvC;42][lox;42][lsx;42][elg;42][ltx;42][lwA;42][els;42][lqC;42][lwh;42][dyi;42][lyk; 42][flo;42][dpq;42][lnA;42][dsw;42][eli;42][fuw;41][dnj;41][cuy;41][drj;41][pqw;41][qtu;41][cu C;41][lmi;41][cds;41][efl;41][lyA;41][lyz;41][dvi;41][uCg;41][rvB;41][rvi;41][eny;41][clj;41][t uy;41][dem;41][dyB;41][lvj;41][dpg;41][duA;41][fuy;41][dsv;41][pqv;41][doq;41][nqw;41][wx y;41][nrs;41][nux;41][dxg;41][qux;41][elB;41][uvx;41][fnu;41][prB;41][lpz;41][det;41][cmu;41][pri;41][cpu;41][nxy;41][qsu;41][rwg;41][uCi;41][mwy;41][dyj;41][deq;41][nsy;41][dmx;41][lot ;41][lpA;41][lxC;41][rCy;41][lvh;41][cnr;41][muy;41][drt;41][lph;41][euv;41][wCg;40][mux;40][dqt;40][des;40][dmg;40][rtu;40][pui;40][dmq;40][lvA;40][uwj;40][esu;40][cry;40][nCg;40][mr s;40][owy;40][lvk;40][mtu;40][nsw;40][ouy;40][msw;40][los;40][qvw;40][env;40][rui;40][lCj;40][nwg;40][prg;40][lmB;40][psu;40][dps;40][dfq;40][euy;40][clk;40][vwi;40][lxi;40][nvx;40][fu v;40][ntw;40][suv;40][eug;40][deB;40][opu;40][enr;40][tuv;40][mpy;40][dpt;40][nwB;40][ceu;40][psw;40][nqv;40][uyi;40][dpx;40][lyh;40][quv;40][lmj;40][Cyg;40][lmg;40][dxB;40][npq;40][dpj;40][dpi;40][rsy;40][dpB;40][rsu;40][eui;40][lxB;40][uCB;40][ewy;40][dqg;40][nou;40][cnv; 40][rux;40][nui;40][lvz;40][nqu;40][vxy;39][mrC;39][cui;39][dnq;39][clz;39][fls;39][cvy;39][dv j;39][crg;39][psy;39][csu;39][mns;39][nsC;39][emu;39][cuB;39][elx;39][ery;39][uyg;39][euB;39][lqg;39][lxj;39][nuB;39][dtx;39][nCB;39][cug;39][dyz;39][lgi;39][cmr;39][fqu;39][nvg;39][wC B;39][dqs;39][dmi;39][mwC;39][dmB;39][Cyi;39][muC;39][mwg;39][rxy;39][elj;39][rsC;39][de j;39][puB;39][msv;39][dxi;39][fnw;39][pug;39][rwi;39][cqu;39][nas;39][nug;39][nrB;39][psv;39 ][oqu;39][cnq;39][fru;39][nrg;38][qvC;38][uyj;38][ngx;38][msy;38][pwg;38][uvg;38][clh;38][cl A;38][dvz;38][lmz;38][rug;38][wyg;38][cqr;38][ruj;38][lCk;38][psC;38][mvC;38][uvi;38][ory;38][flx;38][nsv;38][ogw;38][nyg;38][cux;38][flt;38][dqB;38][cng;38][cuj;38][log;38][lqB;38][dxj ;38][pwB;38][uyB;38][epy;38][fny;38][nvB;38][uxg;38][cpq;38][pvg;38][qrs;38][lCz;38][dgi;38][wCi;38][qrx;38][ntv;38][mqw;36][pqs;36][dfm;36][moy;36][loB;36][esy;36][mpC;36][cri;36][dtB;36][mwB;36][cyg;36][swC;36][rwj;36][uvB;36][ruB;36][twy;36][mnq;36][lst;36][dfs;36][m qv;36][emr;36][fry;36][ogr;36][loi;36][dnk;36][dnz;36][nuj;36][rCB;36][swy;36][pCg;36][equ;36][evy;36][ngg;36][wyB;36][rCg;36][vCg;36][puj;36][nCi;36][pvB;36][pwi;36][pvi;36][mgr;36][mui;36][fnv;36][nwi;36][nri;36][lCA;36][lmk;36][nyB;36][dsx;36][qtw;35][lxz;35][qug;35][oq v;35][egr;35][nyi;35][lCh;35][ryg;35][mqu;35][qui;35][mwi;35][ryB;35][pCB;35][erg;35][cyi;35][mng;35][dog;35][lxk;35][nrj;35][fpy;35][lmh;35][nvi;35][uxB;35][dti;35][uCj;35][qwg;35][py g;35][dtg;35][pyi;35][nqB;35][lgj;35][rty;35][lmA;35][muB;35][rxg;35][uwz;35][elk;35][erB;35][lxh;35][pCi;35][mug;35][qvx;35][emy;35][wyi;34][dst;34][dfB;34][csv;34][cfn;34][tvy;34][rx B;34][mxy;34][lsi;34][ryi;34][cpg;34][pyB;34][quB;34][lsB;34][uvj;34][dqj;34][fwy;34][rCi;34][cni;34][elz;34][mpq;34][lsg;34][evi;34][dfg;34][epq;34][lgk;34][lxA;34][vCB;34][nyj;34][vyg; 34][qwB;34][xyg;34][elA;34][wCj;34][svy;34][cqv;34][pyj;34][fqr;34][cvi;34][fvy;34][svC;34][mvg;34][ovy;34][ltB;33][lsj;33][xyB;33][ltg;33][flB;33][lqz;33][rxi;33][eri;33][mpi;33][osu;33][nuz;33][fnq;33][lti;33][nwj;33][elh;33][fli;33][eqv;33][qsw;33][ruz;33][mni;33][fqw;33][ngi;33][mnB;33][loh;33][lok;33][cqg;33][dfi;33][doB;33][mpg;33][msC;33][euj;33][loj;33][cpi;33][fpq; 33][mvB;33][lqA;33][mrg;33][dos;33][ruh;33][flj;33][tuB;32][qrB;32][loA;32][eyB;32][vCi;32][dsg;32][eyg;32][qtv;32][mri;32][ryj;32][pqg;32][mrB;32][vyB;32][qrg;32][uvz;32][qsv;32][wyj ;32][nCj;32][nwz;32][loz;32][lgh;32][flg;32][tug;32][doi;32][muj;32][qxg;32][fuB;32][mCg;31][nvj;31][cgi;31][ltz;31][dtj;31][swB;31][rCj;31][myi;31][nsB;31][mpB;31][eyi;31][ltk;31][vyi;31][quj;31][flA;31][myg;31][pqB;31][pgi;31][flh;31][wyk;31][swg;31][mvi;31][xyi;31][qvg;31][q wi;31][ltj;31][dsB;31][wyz;31][oug;31][nsg;31][mrj;30][fqv;30][ltA;30][lsA;30][sug;30][suj;30][myB;30][dsi;30][egg;30][ngj;30][lth;30][flk;30][flz;30][sui;30][qri;30][svg;30][lsk;30][oui;30][mCi;30][mCB;30][mqs;30][lsh;30][rsg;30][mqx;30][psB;28][dsj;28][dgB;28][mqg;28][syB;28][r sB;28][eyj;28][doj;28][psg;28][lsz;28][xyj;28][qvB;28][oCg;27][vCj;27][lgB;27][vyj;27][frB;27][nsi;27][nvz;27][pgj;27][oyB;27][mqB;27][mqi;27][sCg;27][dgi;27][oyi;27][suB;27][egi;27][vyk ;27][psi;27][qxi;27][oyg;27][rsi;27][ouB;27][syg;27][svB;26][vyz;26][fyg;26][qwj;26][fyi;26][q vi;26][fyB;26][qtg;26][swi;26][vyA;26][syi;26][dsz;26][msB;25][qtB;25][qrj;25][qwz;25][diB;25][msg;25][sCi;25][fqg;25][qsB;25][svi;25][dgj;25][lgi;25][liB;24][qsg;24][dsA;24][qsi;24][msi; 24][oqB;23][lgj;23][qvj;23][djB;23][ogg;23][ljB;22][oqi;22][ujB;20][riB;20][dgk;19][lgz;19][dg z;19][dij;19][lij;19][lgk;18][lgh;18][lgA;17][1 kB;17][lzB;17][lih;17][liz;17][dkB;17][lhB;16][dz B;16][lik;16][liA;15][lAB;15][diz;15][dik;15][ljz;12][lhj;12][ljk;11][ljA;10][lhk;8][lkz;7][lkA;7][lhz;7][lhA;6][lzA;6]

[0322] The percent of host bacterial strains (as profiled by their capsule locus type) that are infected by three phages of a phage combination are provided below. This trait is referred to as “at least 3 phage % coverage”. The phage combinations are ordered in descending performance grade.

[0323] [dlw;38][dly;36][cdl;36][dlu;36][dlr;36][clw;35][dC;34][drw;34][lrv;34][lrw;34][lpr;34][dvw;34][dln;34][duw;33][dlp;33][dlv;33][clr;33][lnp;33][cdr;33][lpw;33][lvw;32][lru;32][lCy;32][luy;32][dpw;32][lnr;32][drv;32][cdy;32][lny;32][duy;31][cdu;31][lnu;31][lpu;31][lwx;31][luw; 31][dny;31][lpy;31][lry;31][dpr;31][cdv;31][lqy;31][dwy;31][clp;31][cly;31][lnw;31][elw;31][cd p;31][dpy;30][dpx;30][dpu;30][cln;30][dlm;30][lwC;30][lrx;30][lwy;30][dnw;30][dnp;30][pru;30][duv;30][dry;30][duC;30][dru;30][cuw;30][dlx;30][dlq;30][del;30][dnr;30][npw;30][lpx;30][lp v;28][cel;28][ruw;28][clv;28][uvw;28][pry;28][dnC;28][clC;28][cdn;28][drC;28][puw;28][clu;28][elp;28][dpC;28][lux;28][cry;28][lpC;28][lnC;28][lrC;28][dux;28][drx;28][elr;28][dnu;28][eln;28][rwy;27][rCy;27][flu;27][cru;27][cuy;27][wCy;27][nuy;27][ruy;27][elx;27][npy;27][dvx;27][d er;27][deu;27][flr;27][cnr;27][lor;27][nrv;27][nrw;27][rux;27][lnx;27][lmw;27][luv;27][pwy;27][lxC;27][lqC;27][dmw;27][clx;27][lnq;27][cpu;27][nru;27][luC;27][dnq;27][lvx;26][elC;26][lmn; 26][uwy;26][clm;26][lnv;26][dfl;26][lrt;26][flw;26][rwC;26][lov;26][dep;26][elu;26][elv;26][dp v;26][cux;26][ruv;26][dnx;26][lxy;26][dev;26][nry;26][dey;26][dxy;26][den;26][npu;26][euw;26][lrs;26][dfu;26][uCy;26][puy;26][flx;25][lpt;25][nux;25][lmp;25][nvw;25][dlo;25][flp;25][low;25][cuC;25][uvx;25][npv;25][enr;25][drt;25][rvy;25][rxy;25][cdq;25][ewy;25][cuv;25][lqu;25][cv y;25][dlt;25][ely;25][vwy;25][dvy;25][dvC;25][fru;25][nuw;25][dnv;25][lop;25][dqu;25][nwy;25][dmu;25][dgw;25][wxy;25][lmu;25][puv;25][lvy;25][uwC;25][ceu;25][epu;24][lmy;24][lmv;24][cfl;24][nwC;24][nrC;24][dor;24][epy;24][ruC;24][dtw;24][lmr;24][dpt;24][uxy;24][rty;24][eu y;24][cnv;24][dmy;24][dpq;24][clo;24][eru;24][dgr;24][dsw;24][cnu;24][fuw;24][ery;24][dfr;24][lty;24][lvC;24][ltw;24][uvy;24][lqw;24][lpq;24][flv;24][clt;24][lgr;24][clq;24][fwy;23][dfp;23][cmr;23][fly;23][lsw;23][dty;23][nuv;23][pvy;23][lou;23][mwC;23][efl;23][lnt;23][dem;23][dls;23][dfv;23][euv;23][nqu;23][rtu;23][lno;23][lox;23][ltu;23][dmq;23][deq;23][lmq;23][dmv;23][lp s;23][eny;23][dmn;23][nuC;23][dmr;23][cqr;23][lns;23][fry;23][dfy;23][npq;23][puC;23][nxy;23][nvx;23][enu;23][cds;23][lmC;23][lsy;22][dmp;22][elm;22][ltv;22][rsu;22][dqv;22][dtv;22][elq; 22][cqu;22][nvy;22][loy;22][env;22][uvC;22][nqw;22][evy;22][cqv;22][drs;22][lmx;22][qrw;22][flm;22][dmx;22][dtu;22][psw;22][mnw;22][cmu;22][mwy;22][dps;22][lsu;22][cnq;22][flC;22][pqr;22][fuy;22][qvw;22][twy;22][muw;22][elo;22][fuv;22][mrw;22][vxy;22][muy;22][vCy;22][c pq;22][opu;22][quC;22][fpy;22][rsw;22][pqw;22][ngr;22][dfm;22][fln;22][cls;22][ory;22][dou;2 0][lst;20][mpC;20][mqu;20][swy;20][fnu;20][lsx;20][dfn;20][equ;20][lsv;20][dsy;20][csv;20][m nr;20][muC;20][mpy;20][dnt;20][dsx;20][fnw;20][qrv;20][flt;20][dqx;20][quw;20][nrs;20][oru;20][mnq;20][los;20][ltC;20][lqv;20][lqx;20][doy;20][ntw;20][ltx;20][cfn;20][egr;20][dtx;20][ovy; 20][dsv;20][mny;20][tuy;20][epq;20][mqw;20][psu;20][rsy;20][tuw;20][qru;20][nou;19][qrx;19][dsC;19][dns;19][tvy;19][suw;19][eqv;19][fny;19][nvC;19][owy;19][mru;19][mux;19][muv;19][t uv;19][ntu;19][dsu;19][pqu;19][mxy;19][swC;19][emu;19][quv;19][psv;19][lsC;19][psy;19][qvC ;19][dos;19][emr;19][mry;19][mrC;19][emy;19][fvy;19][ngx;19][fls;19][els;19][nsw;19][csu;19][dno;19][ouy;19][ouw;19][mpq;19][nsu;18][qvx;18][ntv;18][fqw;18][rsC;18][osu;18][flo;18][ns y;18][flq;18][det;18][fnv;18][qux;18][svy;18][loC;18][dfq;18][nqv;18][suv;18][mvC;18][des;18][mqx;18][lot;18][elt;18][mnv;18][mgr;18][mpu;18][pqv;18][suy;18][fqr;18][dst;18][mnu;18][fqu ;17][fqv;17][lgt;17][lmo;17][mqv;17][fnq;17][psC;17][dqs;17][dfs;17][lgs;17][qsw;17][nsv;17][f pq;17][mvy;17][dqt;17][qtw;16][svC;16][doq;16][dwg;16][pwg;16][nsC;16][esu;16][dug;16][qrs ;16][ogr;16][esy;16][lmt;16][dmo;16][loq;16][qsv;15][pqs;15][ouC;15][dlg;15][suC;15][lug;15][dmt;15][dgB;15][lng;15][flg;15][dpg;15][qtv;15][oqv;15][cdg;15][ngs;15][cpg;15][ogw;15][oqu; 14][dng;14][qsu;14][lgi;14][msw;14][clg;14][nwg;14][rwg;14][lms;14][lyg;14][dgi;14][dfg;14][uwg;14][mqs;14][mtu;14][nug;14][qtu;14][pug;14][nrg;14][lpg;14][lwg;14][lnB;14][moy;14][dr g;14][dyg;14][lgB;14][lrg;14][ltg;14][pwB;14][dms;14][rug;14][prg;14][dwB;14][dvg;14][psg;12][uxg;12][crg;12][dtg;12][dyB;12][uvg;12][uyg;12][tug;12][wyg;12][dpB;12][mns;12][ryg;12][mou;12][lui;12][dsg;12][lwB;12][sug;12][lpB;12][nyg;12][fyg;12][msy;12][msC;12][dui;12][lni; 12][rsg;12][lmg;12][cng;12][lsg;12][cyg;12][dxg;12][pvg;12][lyB;12][mrs;12][cug;12][rxg;12][d 1B;12][swg;12][dli;12][clB;12][pyg;12][lti;11][lpi;11][dog;11][nwB;11][frB;11][luB;11][rvg;11][log;11][deg;11][pwi;11][fli;11][flB;11][cpi;11][liB;11][lxg;11][syg;11][nyB;11][diB;11][dnB;11][pyB;11][dmg;11][duB;11][dCg;11][msv;11][msu;11][wyB;11][lrB;11][oug;11][dpi;11][wCg; 11][lvg;11][nsg;11][cli;10][rwB;10][nsi;10][wCB;10][fyB;10][pCg;10][psB;10][psi;10][prB;10][Iri;10][mng;10][lxB;10][lmB;10][rsi;10][rsB;10][cni;10][xyg;10][ltB;10][swB;10][uxB;10][mpg; 10][dCB;10][dfB;10][lsi;10][lwi;10][Cyg;10][mwg;10][cdi;10][svg;10][fuB;10][rxB;10][elg;10][deB;10][lCg;10][lsB;10][oui;10][lyi;10][dxB;10][dfi;10][lqg;10][myg;10][ryB;10][doB;10][doi;10][ouB;10][uyB;10][suB;10][ruB;10][dsB;10][cuB;10][dsi;10][nuB;10][nvg;10][vyg;10][nyi;10][drB;10][dyi;10][eyg;10][loB;10][rCg;10][dqg;10][nrB;10][dwi;10][sui;10][pui;10][nui;10][dvi;10][mug;10][dni;10][nwi;10][erg;10][dvB;10][puB;10][loi;10][swi;10][nri;10][oyg;10][uwB;10][p vB;10][xyB;9][nCg;9][vwi;9][pqg;9][fyi;9][riB;9][rvB;9][mrg;9][oyB;9][qsg;9][dti;9][lvi;9][uCg ;9][pyi;9][cvi;9][uyi;9][sCg;9][myB;9][lCB;9][qwg;9][lxi;9][pCB;9][mpB;9][dij;9][rwi;9][mnB; 9][uvi;9][uwi;9][cyi;9][dmB;9][mvg;9][rxi;9][lqB;9][syB;9][syi;9][lmi;9][cri;9][mqg;9][uvB;9][r yi;9][lvB;9][qrg;9][mwB;9][nsB;9][cui;9][eyB;9][wyi;9][ngg;9][pvi;9][eug;9][vyB;9][pri;9][dlj; 9][qug;9][dri;9][dxi;9][fag;9][mCg;9][rui;9][elB;9][svi;9][cag;9][svB;9][lij;9][daB;9][maB;8][cl j;8][tuB;8][dgj;8][nvi;8][rvi;8][nCB;8][nvB;8][lgi;8][vCg;8][oCg;8][mCB;8][mni;8][oyi;8][nqB; 8][qwB;8][qtg;8][ngi;8][rCB;8][egg;8][loj;8][pqB;8][lgj;8][xyi;8][lwj;8][dgi;8][qvg;8][vyi;8][dm i;8][erB;8][lpj;8][dvj;8][lvj;8][dtB;8][msg;8][ltj;8][doj;8][oqg;8][Cyi;7][qsB;7][dwj;7][dtj;7][qrB ;7][qxg;7][ljB;7][qsi;7][luj;7][mpi;7][vyj;7][lCi;7][djB;7][muB;7][qri;7][dCi;7][qwi;7][rCi;7][qu B;7][lmj;7][mqi;7][qui;7][mirB;7][qvB;7][qvi;7][wyj;7][lrj;7][flj;7][lyj;7][dsj;7][dyj;7][lgj;7][mv B;7][dei;7][dqj;7][dpj;7][vCB;7][mui;7][lnj;7][duj;7][wCi;7][qrj;7][cgi;7][oqB;7][eli;7][myi;7][mvi;7][eri;7][nwj;7][mwi;7][ryj;7][uCB;7][sCi;7][eyi;7][rwj;7][lsj;7][qvj;7][pgi;7][qwj;7][drj;7][nCi;7][oqi;7][euB;7][pCi;7][nyj;6][puj;6][ngj;6][qtB;6][lCj;6][qxi;6][nrj;6][rCj;6][dnj;6][vCi;6][nvj;6][eui;6][egi;6][evi;6][mCi;6][uvj;6][msi;6][pgj;6][mri;6][flk;6][vCj;6][uCi;6][msB;6][pyj;6][wCj;6][lvk;5][lxj;5][dzB;5][elj;5][muj;5][lrz;5][uwj;5][lsk;5][lgk;5][flz;5][lsz;5][lpz;5][dej;5][dl k;5][suj;5][dik;5][ljk;5][dgk;5][xyj;5][luk;5][ruj;5][quj;5][nuj;5][uyj;5][ujB;5][eyj;5][dgz;5][irk; 5][lmk;5][mrj;5][luz;5][diz;5][lik;5][nCj;5][ruz;5][cuj;5][dxj;5][lpk;5][dkB;3][uwz;3][lyk;3][lCh ;3][ltk;3][lok;3][lwA;3][liA;3][lwh;3][wyz;3][lwk;3][nwz;3][lnz;3][wyk;3][ljA;3][dvz;3][euj;3][clz;3][nvz;3][lgA;3][lpA;3][elz;3][lgh;3][lph;3][dlh;3][lgz;3][nuz;3][qwz;3][lzB;3][lyh;3][lgk;3][dyz;3][lCk;3][ljz;3][lAB;3][clk;3][duz;3][elh;3][lxk;3][dlz;3][elk;3][lmh;3][lnA;3][loz;3][lmA;3][lkB;3][uvz;3][lwz;3][dnk;3][dsz;3][lnk;3][lqz;3][clA;3][clh;3][vyk;3][dnz;3][lvz;3][lkz;3][lnh;3][vyz;3][liz;3][uCj;3][lyz;3][vyA;2][flA;2][ltz;2][dsA;2][elA;2][luh;2][lzA;2][luA;2][lyA;2][lkA; 2][lhB;2][lCz;2][lmz;2][lqA;2][lsh;2][lth;2][lgh;2][lxA;2][lsA;2][loA;2][dlA;2][flh;2][duA;2][lr A;2][lCA;2][lvA;2][lrh;2][ltA;2][ruh;2][lxz;2][lih;1][lhj;1][lxh;1][lhz;1][lhA;1][lhk;1][lvh;1][loh ;1]

[0324] 4 Phage Combinations

[0325] 4 phage combinations were analyzed in silico for their ability to lyse the 352 different strains of Klebsiella pneumoniae bacteria as profiled by their capsule type, based on the ability of the single phage to lyse a bacteria of a particular capsule type as assessed by a liquid media assay.

[0326] The combinations that lyse the highest number of bacterial strains (as profiled by their capsule locus type) are provided herein below. This trait is referred to as “at least 1 phage % coverage”. The number following each combination refers to the Percent trait performance—in this case the percent of bacteria strains as profiled by their capsule type that are targeted by the phage combination. The combinations are listed in descending performance grade.

[0327] [lquB;89][lqug;89][lgsg;89][luyg;88][lsyg;88][lqiB;88][lgtB;88][flgg;88][lgtg;88][lqgj;88][lqgi;88][lgsB;88][luyB;88][lqxg;86][lyiB;86][dlqg;86][lsug;86][lqvB;86][lqvi;86][lqxB;86][lq Cg;86][lqvg;86][lqwi;86][lqgz;86][lqui;86][lqxi;86][lgjB;86][lygi;86][lqgB;86][lygj;86][lgsi;86][flqB;86][dlqi;86][flyg;86][lpqg;86][dlqB;86][lgrg;86][elqg;86][lsuB;86][lpqB;86][clqg;86][ltyg; 86][lmag;86][lsCg;86][lsyB;86][larB;86][ltyB;86][lnaB;86][lng;86][lqgh;85][lswi;85][lsvB;85][lsvi;85][lsvg;85][loqg;85][lqgk;85][lryB;85][lstg;85][clyg;85][lpyg;85][lruB;85][lryg;85][lpyB; 85][clsg;85][lqyg;85][lpqi;85][lnyB;85][lsCi;85][dlyB;85][clqi;85][dlsB;85][dlsg;85][dlsi;85][dl yi;85][dlyg;85][luyi;85][lsCB;85][elqi;85][lsiB;85][lsgi;85][lqCi;85][lsyi;85][lqCB;85][lrug;85][lrsg;85][lqgA;85][lqwg;85][lquj;85][lvyB;85][lyjB;85][lvyg;85][lmqB;85][lujB;85][luiB;85][lgti ;85][lqwB;85][lmyg;85][elsg;85][elqB;85][lvyi;85][lygz;85][lrsB;85][flyB;85][lugj;85][flsg;85][elyg;85][lqij;85][lwyi;85][lstB;85][lqzB;85][lgri;85][lCyg;85][lnyg;85][lxyB;85][lxyi;85][lxyg;85][lygB;85][flqi;85][lnqi;85][ltug;84][lqwj;84][ltuB;84][lnyi;84][lpug;84][lpuB;84][lsui;84][clyi; 84][lqvj;84][lqAB;84][lqxj;84][lqyB;84][lqiz;84][lghB;84][lgkB;84][lCiB;84][lrsi;84][clqB;84][1 sgB;84][loqB;84][lygh;84][lsgz;84][lsgj;84][clug;84][lygA;84][elsB;84][lygk;84][lyij;84][elsi;84][lyzB;84][lnsg;84][lCgj;84][lswg;84][lpsB;84][lpsg;84][lswB;84][lsxg;84][lsxi;84][loyg;84][lsx B;84][clsi;84][lwyB;84][lryi;84][luzB;84][lmsg;84][lmug;84][lnug;84][lnsB;84][luvg;84][luvB;84][luxg;84][lmyB;84][luxB;84][flyi;84][luCB;84][luyj;84][lugi;84][lugz;84][lugB;84][lmuB;84][elyB;84][lpyi;84][lxCi;84][luCg;84][dlgj;84][lCyi;84][lwyg;84][ltCB;84][ltCg;84][lnuB;84][lmq i;84][ltyi;84][lCyB;84][lriB;84][dliB;84][lCgi;84][elyi;84][lviB;84][fluB;84][flug;84][lvCi;84][fl sB;84][lxiB;83][eliB;83][lmiB;83][lniB;83][quvB;83][ltjB;83][lxyj;83][lngj;83][ltCi;83][elgi;83][lxCB;83][lqyi;83][lnCg;83][lCij;83][lnCi;83][lCgB;83][uvyB;83][lCgz;83][cCg;83][lnsi;83][lqi A;83][lgik;83][lCjB;83][luCi;83][lmCg;83][lvCj;83][luCj;83][lsti;83][lvCg;83][eltB;83][lnCB;83][clsB;83][elgj;83][ltiB;83][ltvg;83][lqih;83][dlqs;83][ltgj;83][lwij;83][lgtj;83][lszB;83][clri;83][clrg;83][lrui;83][dljB;83][elrB;83][lsjB;83][dlxi;83][elri;83][elvi;83][flmg;83][lxCg;83][flrg;83][lsgA;83][lwyj;83][lxCj;83][loyB;83][loqi;83][losg;83][eltg;83][dlrB;83][elxi;83][uvyg;83][ltvB; 83][lqCj;83][lgsj;83][dlij;83][flsi;83][quvg;83][dlri;83][luvi;83][lpiB;83][lrtg;83][lwiB;83][lrtB; 83][dlrg;83][lvCB;83][flvg;83][dlyj;83][lrwi;83][flwi;83][flvB;83][flgi;83][elrg;83][frB;83][luw g;83][lugA;83][luwi;83][lyiz;83][lwCi;83][lsgk;83][fltg;83][fltB;83][clui;83][lsgh;83][dlvi;83][is Cj;83][dlgj;83][dltB;83][lrgi;83][lrjB;83][lugh;83][clvi;83][lrCi;83][lrCB;83][cluB;83][louB;83][lvij;83][lvgi;83][lrgj;83][luij;83][lrCg;83][flCg;83][lvgj;83][luxi;83][dluB;83][luwB;83][lmgi;83][dlug;83][lukB;83][lpsi;83][lmtg;83][cflg;83][lykB;83][luhB;83][clyB;83][lyAB;83][dlgi;83][ip Cg;83][flgj;83][cltg;83][clxi;83][lpCi;83][lvyj;83][fliB;83][lmsB;83][lmtB;83][lugk;83][clgi;83][flvi;83][lvjB;83][lmyi;83][dltg;83][elug;83][luAB;83][elqj;83][lpCB;83][lgij;83][lmrg;83][lmrB; 83][lpqj;83][loug;83][eluB;83][lyhB;83][lwxi;82][lmvg;82][lmui;82][lmpB;82][dlCB;82][lmsi;82][elui;82][eluj;82][lmri;82][lvwi;82][lvxg;82][lvxi;82][lmvi;82][elvB;82][lyih;82][lwCg;82][elx B;82][elgB;82][lxij;82][elgz;82][elyj;82][lxjB;82][elvg;82][elCg;82][lCyj;82][elxj;82][lxgj;82][d lCg;82][lCzB;82][dlCi;82][lvgB;82][lmvB;82][flxB;82][lCgk;82][lgjz;82][lmxi;82][lmnB;82][lm ng;82][fljB;82][flgB;82][celg;82][flgz;82][flCB;82][flCi;82][lvgz;82][flxi;82][lmwi;82][flxg;82][lviz;82][flwB;82][lyik;82][flwg;82][flui;82][dlzB;82][lmpg;82][lvxB;82][luiz;82][dlxB;82][lqv C;82][lCgh;82][lnqu;82][lCgA;82][ltgz;82][lmgB;82][elti;82][lnqs;82][luvj;82][dlxg;82][lmxB;82][lnrg;82][lnrB;82][lntg;82][lgiB;82][lntB;82][ltgB;82][elsj;82][lnui;82][elxg;82][lnuj;82][ltgi;82][lnvg;82][lnvi;82][ltyj;82][lnvB;82][lmgj;82][eflg;82][lmCB;82][lmCi;82][lgiz;82][luxj;82][lri j;82][luwj;82][lmgz;82][lnsC;82][ltzB;82][lCiz;82][elvj;82][elwi;82][elij;82][eljB;82][lwCj;82][f lpB;82][lwCB;82][dlgz;82][flri;82][flgj;82][lwgi;82][dlgB;82][lwgj;82][lwiz;82][flpg;82][lxgi;82][flnB;82][lwjB;82][flng;82][flmB;82][qrug;82][qruB;82][quvi;82][dliz;82][lmxg;82][lyiA;82][ruyg;82][lvzB;82][dlsy;82][elng;82][ltwg;82][ltwi;82][lngj;82][lpCj;82][lijB;82][dlpB;82][dlqu;82][lgsC;82][lgsx;82][lgsw;82][lgsv;82][dlqv;82][lgsu;82][clng;82][lquz;82][clni;82][lgst;82][dlq x;82][lgrj;82][elni;82][lpjB;82][clpg;82][clpi;82][clqu;82][clgj;82][dlgt;82][dlpi;82][lptg;82][uvy i;82][cdli;82][lsxC;82][svyi;82][lrgB;82][dlvg;82][lnCj;82][elqx;82][lnwi;82][losB;82][ltxB;82][ltCj;82][cfli;82][ltxg;82][lsij;82][ltwB;82][lswj;82][lnyj;82][lsiz;82][lskB;82][dlvB;82][lsAB;82][lsyj;82][lnjB;82][loCg;82][dlui;82][ltui;82][lngi;82][loyi;82][lshB;82][ltvi;82][dlpg;82][cdlg;82][dflg;82][lsuj;82][lpwi;82][lsvC;82][dlti;82][lsvj;82][elqu;82][lpui;82][elqv;82][lptB;82][clxg;82][dlwi;82][clwi;82][lrxg;82][lrvi;82][lrvB;82][clti;82][lpgj;82][lrwB;82][lpgi;82][cltB;82][lrxi;82][elpi;82][lrxB;82][lpyj;82][clvg;82][lrgz;82][lquC;82][elpg;82][cliB;82][lrwg;82][elqs;82][dlni; 82][lqux;82][lquw;82][clgz;82][dfli;82][dflB;82][lquv;82][ruyB;82][dlmg;82][dlmi;82][dlmB;82][dlnq;82][elmg;82][dlng;82][lqxC;82][clmg;82][lrzB;82][clgj;82][lizB;82][elpB;82][dlsj;82][cl Ci;82][lstC;82][lrvg;82][clrB;82][lruj;82][elnB;82][dlnB;82][cdlB;81][lwxg;81][lvik;81][lihB;81][qsvi;81][loqi;81][lnqv;81][dlsv;81][flvj;81][loCi;81][flwj;81][swyi;81][dlsx;81][cluj;81][lorg;81][lvkB;81][lvAB;81][lrsj;81][lrhB;81][ltxi;81][cdlq;81][dlsC;81][lvgh;81][lrAB;81][lvgk;81][lr kB;81][lvih;81][lCAB;81][lChB;81][lCiA;81][lviA;81][lCik;81][lCih;81][lvhB;81][lxzB;81][lor B;81][dlgk;81][dlvj;81][dlst;81][dlgA;81][elog;81][lpgB;81][dlxy;81][lpgz;81][lnzB;81][lpsC;81][lmwg;81][dlkB;81][loqj;81][flti;81][lnqC;81][ngx;81][fluj;81][ltgh;81][elrs;81][elst;81][losi;81][lnri;81][lnpB;81][lnpg;81][dlxj;81][lotg;81][flyj;81][dlgh;81][clvB;81][flgh;81][elpq;81][clwg ;81][cluy;81][lnqw;81][dlih;81][lnij;81][lpij;81][lrsC;81][ltAB;81][celi;81][cflB;81][luwy;81][lik B;81][lqwC;81][luyz;81][lsvy;81][luih;81][ltkB;81][luik;81][lqwz;81][luiA;81][lswC;81][lswy;81][lujz;81][lgjB;81][luvy;81][lqvz;81][lgzB;81][lvwg;81][luCy;81][lvCy;81][lgjz;81][lgih;81][ls uy;81][lthB;81][lgik;81][ltij;81][lgiA;81][lstj;81][lghj;81][ljzB;81][lsuC;81][lqxz;81][elrj;81][lux y;81][lgjA;81][lgjk;81][ltgk;81][lwgz;81][lwih;81][lwik;81][wiA;81][lsCz;81][lwzB;81][lxCy;81][lsiA;81][lsik;81][lsih;81][lrwj;81][lrti;81][lxiz;81][lsxy;81][ltwj;81][ltgA;81][lwgB;81][lrCj;81][lvwB;81][lryj;81][liAB;81][lsty;81][lvgA;81][lCkB;81][ltvj;81][lsxj;81][lwxB;81][lriz;81][lx gB;81][lrgA;81][lrgk;81][ltuj;81][lrgh;81][lxgz;81][lsCy;81][flgk;81][cljB;81][lmzB;81][lnxB;81][dlwB;81][lnwB;81][flqv;81][dlqr;81][elgA;81][elnj;81][dlqz;81][clog;81][lgru;81][lgrs;81][lp zB;81][drs;81][lprg;81][flni;81][lprB;81][svyB;81][lnxi;81][flog;811 [eluy;81][eflB;81][deli;81][delB;81][dflq;81][elwj;81][lnwj;81][elwB;81][logj;81][elwg;81][elxy;81][lnvj;81][rsuB;81][elsy; 81][lnxg;81][dlmq;81][lnsy;81][clqs;81][delq;81][dlwg;81][uvyj;81][loCB;81][efli;81][elzB;81][dlAB;81][quvj;81][clnq;81][elns;81][elsx;81][dlqw;81][dlik;81][qswi;81][lmwB;81][lnsj;81][flm i;81][elnq;81][svyg;81][lngz;81][eliz;81][clqt;81][flpi;81][elsv;81][clqv;81][clqx;81][lngB;81][fl qs;81][elqt;81][clpB;81][lpqC;81][dlqC;81][clnB;81][dluy;81][elmB;81][lnuy;81][delg;81]

[0328] The percent of host bacterial strains (as profiled by their capsule locus type) that are infected by two phages of a phage combination are provided below. This trait is referred to as “at least 2 phage % coverage”. The phage combinations are ordered in descending performance grade.

[0329] [luvy;64][dlvg;62][dlvB;62][dlui;62][lquv;62][dluB;62][dlug;62][dluj;61][luwy;61][dlnB; 61][lsvy;61][delg;61][dlpg;61][dlsv;61][dlpq;61][lgru;61][dlng;61][dlpB;61][lnvy;61][luvB;61][dluy;60][deli;60][dlni;60][dlny;60][luvg;60][delB;60][lswy;60][dlns;60][lnuy;60][dlvi;60][lwyg; 60][lvCg;60][lvyg;60][dlwg;60][lnwg;60][dlgB;60][luwg;60][dlnq;60][luwB;60][dlqr;60][luvi;60][lnsu;60][lnuC;60][dlmg;60][lpuy;60][dlpi;60][dlqu;60][dlwB;60][dlrB;60][dlrg;60][lquw;60][lnsv;59][lgsw;59][dlsg;59][luCg;59][dlCg;59][lruB;59][dlgi;59][dlsy;59][dlyg;59][dlqw;59][lnqu ;59][lsuy;59][lnui;59][lpqu;59][lnvC;59][luvj;59][dlqv;59][luwi;59][dlog;59][dlvy;59][lgsv;59][d lvj;59][dlsC;59][lnwB;59][dlmB;59][lnwi;59][lrui;59][lvyi;59][lpqw;59][dlqs;59][lnvB;59][dlwi; 59][lnvi;59][dlri;59][lqvx;59][lvyB;59][lnqv;59][lvCB;59][lnvg;59][dlyB;57][lrCg;57][lpvg;57][lnug;57][dlnj;57][luwj;57][lmqu;57][luCB;57][dlsB;57][dlxg;57][lwyB;57][dlrj;57][lsuC;57][lpv B;57][dlxB;57][dlmi;57][dlqg;57][lqvg;57][dlsj;57][lnuB;57][dflg;57][lrwg;57][luCi;57][clqu;57][lqwg;57][elsu;57][lwyi;57][dlsx;57][lrgB;57][dlCi;57][lpwg;57][eluy;57][cluy;57][lnqw;57][ln ri;57][lvCi;57][lrug;57][dlCB;57][elug;57][dlrs;57][lwCg;57][dlxy;57][lnsw;57][lgsu;57][clqv;57][dloB;57][lmvg;56][lrCi;56][cluB;56][dlqx;56][dflB;56][lruj;56][lsvC;56][elqu;56][lpui;56][lr wB;56][lvyj;56][clug;56][eluB;56][lmui;56][elui;56][lvwi;56][lwCi;56][lrwi;56][lwgi;56][dlgj;56][lnrg;56][lnuj;56][lnvj;56][lmuj;56][lryi;56][lvwB;56][dloi;56][lvwg;56][lryg;56][lswC;56][dl qB;56][lmwg;56][lmug;56][elvy;56][pwB;56][lgtv;56][lpvi;56][lpuj;56][luxy;56][lqvi;56][lqvB; 56][lugB;56][dlsi;56][luxC;56][dlyi;56][dliB;56][dlst;56][lryj;56][lnwj;56][delq;56][dlti;56][dlty ;56][lrvB;56][lgri;56][lvgB;56][lpCg;56][dlxj;56][lmvB;56][cdlB;56][lvCy;56][elwy;56][dfli;56][lwgB;56][dlgz;56][lqwi;56][lqwB;56][lwCB;56][clvB;56][luCy;56][clui;56][elvg;56][dlgk;56][1 mvi;56][dltB;56][dltg;56][clvg;56][lpwi;56][lmrg;56][lmri;56][cluj;56][luyi;56][clng;56][lvyz;56][lmqv;56][lqux;56][luyg;56][cdlg;56][lprg;56][lpug;56][lpuB;56][lwyj;56][dljB;56][lgtw;56][flq v;56][dflq;56][dlmq;56][dlxi;56][lgrg;56][lmqw;56][lrgi;56][lpsy;56][lpri;56][dlqi;56][dlgt;56][1 mwB;56][muB;56][nrB;56][lgrj;56][lrCB;56][lgtu;56][lsug;55][loCg;55][luCj;55][dlij;55][lrwj; 55][lquC;55][lmCg;55][lnCg;55][cdlq;55][lqug;55][dlyj;55][luyB;55][lrCj;55][lrvi;55][lsuB;55][elav;55][lnpq;55][lnog;55][cdli;55][clpg;55][lmax;55][lsuj;55][lwiB;55][lrvg;55][lqui;55][clni;5 5][lowg;55][lmrB;55][lsui;55][dlkB;55][lmyi;55][lryB;55][louB;55][loug;55][lswg;55][lpyg;55][clqs;55][elrg;55][lpgB;55][lwgj;55][lngB;55][lpqs;55][loui;55][dCj;55][dlqC;55][lvgi;55][eluj;55][lprB;55][lmpg;55][dlgA;55][lnpg;55][lmCi;55][lriB;55][elyg;55][elvB;55][lmCB;55][dlzB;55][clnB;55][lqvC;55][lmwi;55][dlgh;55][flqw;55][elwg;55][lgrs;55][elyi;55][lugi;55][elCi;53][dlh B;53][lnsy;53][clpB;53][flqu;53][luCz;53][dlAB;53][lngi;53][dlqz;53][lnxi;53][lnxg;53][elsy;53][loCB;53][elpg;53][clnq;53][clCi;53][lrxB;53][lrxi;53][loCi;53][lmng;53][lrxg;53][elpq;53][clw g;53][lmpB;53][lmsi;53][lqwC;53][dlik;53][elwi;53][lwjB;53][dliz;53][elqw;53][lnpB;53][dltj;53][lmpi;53][lpqx;53][louj;53][lmni;53][lquB;53][lnCi;53][ltuB;53][lnyi;53][clrg;53][lqvj;53][lqw j;53][clvi;53][lpyi;53][dlgj;53][elvi;53][lmyB;53][lmyg;53][luxB;53][luyj;53][elyB;53][luiB;53][lpCB;53][lvCj;53][lpCi;53][lgrB;53][lnyg;53][lpqg;53][elri;53][ltug;52][lwgz;52][lvxg;52][lvxi; 52][lsxy;52][lsvB;52][lujB;52][lswi;52][elyj;52][lpqi;52][elCg;52][lugj;52][luxg;52][lsyi;52][clr B;52][clCB;52][lwCj;52][lsyj;52][elmg;52][elmB;52][loyg;52][clqx;52][lnsi;52][lrsC;52][clwi;5 2][lnCB;52][lpqC;52][dlih;52][clyB;52][lmnB;52][lpyB;52][lxyg;52][lygB;52][lvxB;52][clyg;52][lorg;52][lnoB;52][lpsC;52][lquj;52][lrjB;52][lmsB;52][lnqC;52][lngx;52][lpgi;52][clCg;52][lsv g;52][celq;52][elsv;52][lswB;52][lrgj;52][ltwB;52][luxi;52][lvgj;52][elty;52][luij;52][lowB;52][1 twg;52][elng;52][lnti;52][lqwz;52][lnsg;52][ltwi;52][lngj;52][elwB;52][flni;52][lnxB;52][cflq;52][lpqt;52][luxj;52][elsw;52][ltui;52][elrB;52][flng;52][clpi;52][elmi;52][lswj;52][clyi;52][loyi;52][lvCz;52][clri;52][lmsg;52][lviB;52][luyz;52][lnyj;52][lqvz;52][dliA;52][elrj;51][clqi;51][flwg; 51][logg;51][lnsj;51][lrsi;51][flnB;51][elqt;51][[nsC;51][lrsg;51][elCB;51][lmxg;51][lowi;51][lm og;51][lnyB;51][clmi;51][elnq;51][elqi;51]lsCi;51][lpsg;51][Cgi;51][lngs;51][Cyi;51][lovg;51][lsvi;51][lwxi;51][clgB;51][lvjB;51][clqB;51][clyj;51][lxCg;51][lwij;51][elpi;51][lwxg;51][lpgj; 51][lnjB;51][logi;51][loyj;51][ltvi;51][celi;51][clmg;51][lsvj;51][ltuj;51][lgsx;51][lniB;51][elqs; 51][elni;51][ltvB;51][lygi;51][elpB;51][loyB;51][lsCy;51][lquz;51][lnCj;51][elqg;51][lsyg;51][lq yi;51][lmoB;51][lpqB;51][lCgB;51][clqg;51][lxyi;51][lCyg;51][lrij;51][lorB;51][lsCg;51][lpyj;51][lvxj;51][lpjB;50][lpsj;50][flvB;50][lnsB;50][lyiB;50][fluB;50][clgj;50][lqxg;50][lmxB;50][flu g;50][lrsB;50][lCyB;50][loCj;50][flgs;50][celB;50][clqt;50][loqB;50][lsyB;50][elns;50][elnj;50][lCiB;50][lntg;50][lvgz;50][lgsC;50][elxy;50][lngg;50][lpiB;50][lmqi;50][lntB;50][elqB;50][lwiz; 50][celg;50][elnB;50][ltvg;50][flvg;50][lrti;50][cliB;50][lovB;50][lrsj;50][clgi;50][lwzB;50][lpqj ;50][lqyg;50][lsCB;50][lmti;50][lpsi;50][lnqi;50][clxg;50][flui;50][lsty;50][lxgB;50][lxyj;50][lw xB;50][lpxg;50][lmxi;50][flwB;50][lxyB;50][lpij;50][lnij;50][lngz;49][lvgh;49][lpqz;49][lpti;49][flyj;49][clog;49][lvgk;49][elog;49][elrs;49][fluj;49][clsg;49][lqyB;49][loqj;49][elsg;49][lmqB;49][lrgh;49][luih;49][lugz;49][lqxi;49][lriz;49][lxCi;49][flyi;49][lgsi;49][lpxi;49][lqCg;49][lpxB;49][clxB;49][ltwj;49][lqCi;49][loxg;49][lwik;49][lgtx;49][flrg;49][lxCy;49][lswz;49][elwj;49][luz B;49][clsi;49][lmag;49][lvzB;49][lCjB;49][flCi;49][lxCB;49][lasg;49][lnij;49][flwi;49][lsCj;49][luiz;49][lugh;49][lmgB;49][lmtg;49][flCB;49][lvij;49][lxgi;49][flpg;49][lgsj;49][elsi;49][flrB;49][flri;49][lpsB;49][clsB;49][flCg;49][lCyj;49][lCgj;49][clgj;49][lpCj;49][elgB;49][lrgz;49][flvi; 49][lrtB;49][elvj;49][elgi;49][clxi;48][flyB;48][lsxg;48][lviz;48][luhB;48][lmtB;48][lpgz;48][lvk B;48][lukB;48][lugk;48][elqj;48][luAB;48][clij;48][cljB;48][lovi;48][lxgj;48][lqCB;48][lyjB;48][lwih;48][lvih;48][eltg;48][lygj;48][lgst;48][flyg;48][lxyz;48][lrtg;48][lsvz;48][lnqB;48][lptg;48][lsxC;48][lsyz;48][nvyi;48][qrui;48][elqx;48][lgsB;48][lqxB;48][cflB;48][lrkB;48][lrgA;48][lptB ;48][elgj;48][lwiA;48][eliB;48][lrzB;48][lrgk;48][ltvj;48][lCij;48][lvgA;48][lujz;48][lqgB;48][lu iA;48][ltCi;48][luik;48][elxg;48][lvhB;48][lugA;48][lqxj;48][elti;48][lmgi;48][elpj;48][eljB;48][lqtC;48][flpi;48][flpB;48][ltCg;48][lyij;48][elsB;48][eltB;47][lrAB;47][clti;47][lsxi;47][elij;47][1 txi;47][lrhB;47][lvAB;47][cltB;47][lvik;47][flvj;47][flwj;47][lyiz;47][cltg;47][elsj;47][lmiB;47][ltCB;47][qrwi;47][lqgi;47][lmij;47][flCj;47][lsxB;47][ltxB;47][cfli;47][nuyg;47][logB;47][lstC;47][loxB;47][lCgz;47][lqxC;47][lsxj;47][lxiB;47][lmgj;47][lnzB;47][elst;47][ltyi;47][lmjB;47][flq x;47][cflg;47][lCiz;47][lxjB;47][ltyj;45][uvyi;45][ruyB;45][lCkB;45][eflg;45][cliz;45][ruyg;45][flqi;45][lgtg;45][lCzB;45][lCgk;45][lxCj;45][lgti;45][uvyB;45][lqiB;45][clgz;45][lygz;45][ltxg;45][nuyB;45][lCik;45][lpzB;45][qruB;45][loxi;45][elxB;45][lqCj;45][lyik;45][lviA;45][qrug;45][f lqj;45][flog;45][efli;45][elxi;45][lqxz;45][eflB;45][ltyg;45][lCgA;44][lxij;44][lyih;44][ltCj;44][1 otB;44][lsCz;44][elgz;44][lxgz;44][quvB;44][ltyB;44][flmi;44][lgtj;44][lyzB;44][qvwi;44][uvyg; 44][lygk;44][lCgh;44][elsx;44][eltj;44][clgk;44][flqB;44][lgsz;44][flqg;44][lgtB;44][eliz;44][quv i;44][lyiA;44]

[0330] The percent of host bacterial strains (as profiled by their capsule locus type) that are infected by three phages of a phage combination are provided below. This trait is referred to as “at least 3 phage % coverage”. The phage combinations are ordered in descending performance grade.

[0331] [dlvy;48][dluy;47][dlwg;44][dlqw;44][dlqu;44][dlwi;43][dlqv;43][luwy;43][cdlq;43][lqu w;42][dlwB;42][dlqr;42][luCy;42][cdli;42][dlrs;42][cdlg;42][dlrg;41][dlny;41][dluB;41][dlns;41][cdlB;41][lpqu;41][dlug;41][dlri;41][lnuC;41][lpuy;41][lvCy;41][lrvg;40][dlxy;40][dlty;40][clu y;40][dlng;40][dlui;40][luvy;40][lnuy;40][dlCi;40][dlCg;40][lquC;40][dlrB;40][lnvy;40][lnvC;40][dlqC;40][dlsy;40][lnsy;40][lvwg;40][dlmq;40][lgru;40][dlsv;39][lnqw;39][lwxg;39][dlpq;39][dlyi;39][dluj;39][dlCB;39][dlrj;39][lpug;39][dlnj;39][delq;39][dlvg;39][luwg;39][luwi;39][dlyj;39][lnsC;39][dlni;39][eluy;39][suC;39][sCy;39][elwy;39][dlpg;39][dlqx;39][lsuy;39][lnsu;39][lu xy;39][lnpq;39][lqwC;39][lpuB;38][lpqw;38][dlyg;38][luwB;38][dlvi;38][elrs;38][lprB;38][lxCy ;38][lprg;38][clwg;38][dlpi;38][dlgt;38][clqu;38][lquv;38][dflq;38][lpui;38][dlCj;38][dlvB;38][lr wB;38][lrwg;38][lrvi;38][lpri;38][clnq;38][lnsw;38][lgtu;38][lwxB;38][lnqs;38][dlxg;38][dlnB;38][lqux;38][dlsC;38][lnqu;38][lvwB;38][lnqv;38][lrsC;38][lnpg;38][lqvC;36][dlnq;36][lgsu;36][clui;36][lnug;36][dlxi;36][clwi;36][luwj;36][lmav;36][lpsy;36][lrvB;36][lrwi;36][dlpB;36][lvwi; 36][lpxg;36][elqw;36][elsw;36][luxg;36][lrug;36][flqu;36][lngx;36][lnpB;36][lruj;36][elnq;36][e lns;36][luyi;36][dlyB;36][lqxC;36][lnrB;36][lpsC;36][luyj;36][lnrg;36][lrui;36][lpqC;36][lmqw; 36][elvy;36][clrB;36][delg;35][lgtC;35][lrwj;35][lnvg;35][dlqs;35][lwxi;35][luyB;35][lnuj;35][d eli;35][elsx;35][luyg;35][dlxB;35][elwB;35][elwg;35][elxy;35][cluB;35][clri;35][luCi;35][elsu;3 5][lnCB;35][luxi;35][dlmi;35][lgrs;35][clrg;35][luxC;35][lnsv;35][lnui;35][lnCg;35][lnuB;35][el ng;35][lpwi;35][elqu;35][lpwg;35][luvg;35][lpvg;35][lpxB;35][lCyg;35][clug;35][lpxi;35][dlsx;35][lmqu;35][lnyg;35][lnwg;35][lnqC;35][lpqx;35][lnyB;35][lCyB;35][elnB;35][lCyi;35][lpvi;34][lruB;34][lpuj;34][cluj;34][lpqt;34][lryB;34][luvi;34][lnqB;34][dlqi;34][elsv;34][dlvj;34][lpwB;34][lnyi;34][dlxj;34][luCB;34][luCg;34][dlmg;34][lqyg;34][lnri;34][clvg;34][lpyj;34][lnwB;34][el wj;34][elui;34][lnCi;34][lpqs;34][dlqg;34][dlmB;34][lqyB;34][lnyj;34][lvxg;34][lsxy;34][delB;34][lpyi;34][lwCg;34][lngg;34][elni;34][lwCB;34][elwi;34][lgsC;34][lnxg;34][elsy;34][elxB;33][clvB;33][lnvB;33][clyB;33][lqyi;33][celg;33][lswy;33][lswC;33][elpq;33][elxg;33][lpyB;33][lm ui;33][lpCi;33][clng;33][lmwi;33][clyg;33][lmng;33][lpyg;33][luCj;33][lCyj;33][lryg;33][clCg;33][luxj;33][elty;33][dlqB;33][lnwi;33][luyz;33][elpi;33][clxB;33][lrCB;33][elqx;33][clvi;33][clC B;33][lryi;33][lwCi;33][clpi;33][lgtx;33][lgtw;33][elqv;33][clxg;33][lrxg;33][clyi;33][lpvB;33][1 nxB;33][lmwg;33][luxB;33][lmuB;33][clnB;33][clqx;33][clqv;33][elrB;33][eluB;33][elug;33][lu vB;33][clqt;33][celB;33][lsxC;33][lpCj;33][lmnB;32][clpg;32][clmg;32][elpB;32][lrtg;32][elxi;32][uvyg;32][clCi;32][lnCj;32][lsvC;32][lvxB;32][clni;32][elri;32][elpg;32][ruyg;32][lquB;32][fl qx;32][lmug;32][lmrB;32][lmrg;32][clpB;32][lnqi;32][dltB;32][elrg;32][celi;32][lqCB;32][dlst;32][lrCg;32][lrCi;32][dltg;32][lnwj;32][lwyB;32][lwyg;32][dlog;32][clmi;32][lmni;32][dlgj;32][fl qw;32][elpj;32][lmpi;32][lwyi;32][lpCB;32][lmwB;32][lqCg;32][lqug;32][celq;32][lmri;32][lvxi ;32][nuyB;32][elvg;32][nuyg;32][lwCj;32][lnvi;32][clyj;32][lpCg;32][clxi;32][lqui;32][lowg;31][lxyg;31][dlti;31][lowi;31][lryj;31][lsvy;31][lovi;31][elqs;31][ltyg;31][lxyB;31][lptg;31][lstC;31][lgrB;31][lgsx;31][lowB;31][elrj;31][lqvx;31][lqCi;31][ltyB;31][lxCB;31][ruyB;31][lnxi;31][luvj ;31][elvB;31][lmpg;31][clqs;31][lxCg;31][elnj;31][lwyj;31][elCg;31][lrxB;31][elvi;31][dloB;31][eluj;31][elCB;31][dloi;31][flui;31][lrxi;31][elxj;30][lmvB;30][elvj;30][lmvg;30][lntg;30][lpti;30][luCz;30][cflq;30][lmxg;30][lvxj;30][flmB;30][lptB;30][flwg;30][lorg;30][lgtv;30][elCi;30][lnvj ;30][lovg;30][elqt;30][fluj;30][flwj;30][lsty;30][dlqz;30][clog;30][lrti;30][lmpB;30][lrCj;30][flw B;30][flpi;30][lmuj;30][dflB;30][lquj;30][flwi;30][ltvg;30][flug;30][lgrg;30][ltui;30][lpqB;30][lx yi;30][lqwg;30][lvyg;30][lpqg;30][lrtB;30][ltyi;30][lqwB;30][ltug;30][lmyg;30][lvCg;30][clqB;30][dfli;30][clqg;30][fluB;30][lngj;30][lpqi;30][loug;30][lxCi;30][uvyi;30][lmyi;30][ltwg;30][lqs w;30][lgst;30][ltCg;28][lvCi;28][flxg;28][flri;28][ltCB;28][elyB;28][dlsB;28][dltj;28][dlsg;28][d lsi;28][flpg;28][uvyB;28][lxyj;28][lovB;28][ltuj;28][lvyB;28][loui;28][quvg;28][flpB;28][lorB;28][elyg;28][laCj;28][elyi;28][lari;28][arug;28][lmvi;28][lmyB;28][lnsB;28][clai;28][lvyi;28][lq wi;28][lmxi;28][lswB;28][dflg;28][lnoB;28][lnog;28][lmqx;28][elmg;28][lgsv;28][flmi;28][flqv; 28][cltg;28][ltwB;28][lpsB;28][ltxg;28][lntB;28][elst;28][lmxB;28][lxCj;28][ltuB;28][lqxg;28][fl mg;28][elmi;28][flrg;28][lqxB;28][lvCB;28][cltB;28][clsB;27][flqs;27][qruB;27][elog;27][elmB; 27][lsui;27][elyj;27][lmCg;27][lpqj;27][lpsi;27][lswg;27][cflg;27][flvg;27][flrB;27][lpsg;27][lm Ci;27][eflg;27][ltyj;27][louB;27][eflB;27][lnsg;27][ltCi;27][lxyz;27][ltvB;27][ltwi;27][flxj;27][1 mqg;27][cfli;27][clti;27][lsug;27][lxCz;27][loxi;27][cflB;27][flxi;27][efli;27][lsvg;27][lrsg;27][lr sB;27][uvyj;27][lsuB;26][lswi;26][loyg;26][clsg;26][lvCj;26][louj;26][loyB;26][lvyj;26][flyg;26][lsyB;26][elqg;26][flCg;26][lnti;26][qrui;26][mCB;26][lsuj;26][loyi;26][flvB;26][ltvi;26][flvi;26][lquz;26][loxB;26][flyi;26][loxg;26][ltwj;26][lmqi;26][flxB;26][flCi;26][flCB;26][eltg;26][fin B;26][flyB;26][elqB;26][lmqB;26][flng;26][eltB;26][lrsi;26][lpsj;26][lqxi;26][lqvg;26][lrsj;26][1 svB;25][lvyz;25][flni;25][lsyg;25][flqg;25][flCj;25][lgtg;25][lgtB;25][flvj;25][elqi;25][rsuB;25][lqti;25][lqwj;25][lmog;25][elsB;25][lvCz;25][flyj;25][flqB;25][lotg;25][lpqz;25][lsvi;25][lsxg;25][ltxi;25][lqvB;25][lsCB;25][clsi;25][lmtB;25][lnsi;25][ltCj;25][quvB;25][clgj;25][elti;25][lnsj;25][ltxB;25][quvi;25][dlsj;25][losg;25][elsg;24][lsCg;24][lqwz;24][lmoB;24][lstj;24][qrwi;24][cq vi;24][nvyi;24][loCB;24][ltvj;24][eltj;24][lswz;24][flqi;24][lsti;24][loCg;24][loCi;24][lstg;24][lo si;24][lsyi;24][lsxB;24][lgrj;24][lmtg;24][lswj;24][lqvi;24][elqj;24][fltg;24][fltB;24][losB;24][qv wi;24][lstB;23][lsxi;23][lotB;23][lqxj;23][lsxj;23][quvj;23][lsyz;23][elsi;23][suvB;23][loyj;23][1 msB;23][lgsB;23][svyg;23][lmsg;23][flti;23][lsCi;23][lmti;23][lgsg;22][loqB;22][lgsi;22][lqvj;22][flsg;22][lsCz;22][svyB;22][flog;22][lmsi;22][lgiB;22][swyi;22][elsj;22][lqxz;22][lsvj;22][lsyj; 22][dlgB;22][logg;22][lsvz;22][dliB;20][svyi;20][flsB;20][lgtj;20][flgj;20][lsCj;20][loCj;20][flsi; 20][lwgB;20][dlgi;20][elsz;20][logi;20][qswi;20][lqvz;20][clgB;19][dlgj;19][lugi;19][elgB;19][1 pgi;19][lCgB;19][lgsz;18][lpgB;18][lCgi;18][qsvg;18][lvgB;18][dljB;18][lugB;18][lgij;18][lugj; 18][logi;18][lngB;18][luiB;18][elgi;18][lmgB;18][clgi;18][lwgi;18][lpiB;18][eliB;17][lgsj;17][in gi;17][cliB;17][loqj;17][qsvi;17][lygB;17][lsgi;17][lwiB;17][qsvB;17][lqgB;17][lygj;17][lmiB;17][lgjB;17][flgB;17][lxgB;17][lygi;17][lsgB;17][lxgi;17][lrgi;17][lviB;17][lmgi;17][ltgB;17][loi B;17][lrgj;17][lCiB;17][lvgi;17][flgi;17][lugk;17][lwgj;16][lpgj;16][lyiB;16][dlgz;16][lniB;16][d lgh;16][dlij;16][flgA;16][lrgB;16][clgj;16][lsgj;16][fliB;16][lugA;16][ltgj;16][lxiB;16][flgz;16][1 rgk;16][lngj;16][flgj;16][dlgA;16][lghB;16][lijB;16][logB;16][logj;16][lugz;16][lqgi;16][flgk;16][ltgi;16][lujB;16][lygh;15][lrgA;15][lygA;15][lgiz;15][luik;15][lugh;15][lukB;15][lrij;15][ltgA;15][lygk;15][ltgk;15][lyij;15][luij;15][ltgz;15][lgih;15][lgzB;15][lCgj;15][lyjB;15][ltij;15][lqiB;15][flgh;15][lrgz;15][lsgk;15][lsij;15][cljB;15][lxgj;15][ltiB;15][dlgk;15][lpgz;15][lsiB;15][lnij;15][dlih;15][clgk;15][lngz;15][lriB;15][clgh;15][lgkB;15][flhB;14][lnjB;14][lrgh;14][clgz;14][lmgh; 14]

[0332] The percent of host bacterial strains (as profiled by their capsule locus type) that are infected by four phages of a phage combination are provided below. This trait is referred to as “at least 4 phage % coverage”. The phage combinations are ordered in descending performance grade.

[0333] [dlny;31][dluy;30][dlnq;27][lnuy;27][dlqC;26][cluy;26][dlxy;26][lpuy;26][luwy;25][luCy ;25][luxy;24][luxC;24][dlqw;24][dlpq;24][dlqr;24][dlqu;24][dlvy;24][lnqC;24][lxCy;24][elwy;24][cdlq;24][dlty;23][lnuC;23][eluy;23][lnpq;23][lnqu;23][luvy;23][lnvy;22][lpqC;22][lnqw;22][c elq;22][delq;22][dlrs;22][lpqw;22][lqwC;22][dlmq;22][clnq;22][elxy;22][dlqv;20][dlqx;20][clqu; 20][lvCy;20][clqv;20][dlsy;20][lquC;20][lswy;20][lgru;20][elvy;20][elpq;20][elnq;20][elqw;20][lpsy;19][dlsC;19][lpqx;19][lpqu;19][dlns;19][lmqu;19][lmqw;19][lswC;19][dlsv;19][dlsx;19][lnq x;19][clqx;19][lnvC;19][lqxC;19][lquw;19][lnsw;19][elqu;19][lrsC;18][lnsu;18][lmqx;18][elrs;18][dlst;18][flqw;18][elqv;18][lsvy;18][lqvC;18][cflq;18][dflq;18][elqx;18][lsty;18][lqux;18][lquv ;18][elsw;18][lsuy;18][lnsy;18][lnqv;18][lqvx;18][flqv;17][dlqs;17][lsxy;17][lnsv;17][elns;17][fl qu;17][elty;17][lpsC;17][dlgt;17][lgsw;17][lsCy;17][lsxC;17][elsx;16][clqs;16][lsvC;16][lgrs;16][lnsC;16][elsu;16][elsv;16][clqt;16][flqx;16][elsy;16][lpqt;16][lmqv;16][lgtw;16][lstC;15][lngs;15][lpqs;15][lgtC;15][lgsv;15][lgsC;15][elst;15][lsuC;15][lgtv;15][lgsu;14][flrg;14][flqs;14][clwg; 14][dflg;14][lpwg;14][lgsx;14][dlug;14][lgtu;14][elqt;14][flug;14][dlyg;14][elqs;14][clpg;14][lqt x;12][lngB;12][flpg;12][dlpg;12][lpwB;12][cflg;12][lnwg;12][flyg;12][lprg;12][fltg;12][lrwg;12][luyg;12][flwg;12][dlng;12][clpB;12][fing;12][lnyg;12][dlyB;12][dlrg;12][clrg;12][lngi;12][lnrg; 12][lgst;12][cdlg;12][lryg;12][lnpg;12][lrsg;12][lpyg;12][lrug;12][lnug;12][clng;12][clyg;12][fis g;12][lwyg;12][dlwg;12][dlwB;11][lorg;11][flgB;11][lwgB;11][dlgB;11][luwg;11][lrgB;11][ruy g;11][flrB;11][flgi;11][lnwB;11][nuyg;11][dlui;11][lrxg;11][dlvg;11][flvg;11][lrtg;11][clnB;11][cltg;11][dlgi;11][clyB;11][dlpB;11][lptg;11][ltwg;11][dlmg;11][lniB;11][cdlB;11][ltgi;11][dlnB; 11][dltg;11][lgiB;11][flog;11][lntg;11][flxg;11][lpsg;11][lnsg;11][lpug;11][dlsg;11][lugB;11][lsy g;11][lsug;11][lnyB;11][lugi;11][lnpB;11][clug;11][lygB;11][lswg;11][lpgB;11][ltug;11][lstg;11][clsg;11][lpyB;11][clgB;11][lwyB;11][lygi;10][lnsi;10][flsB;10][dfli;10][dflB;10][ltgB;10][lnui; 10][lovg;10][lwCg;10][dlCg;10][eflg;10][luvg;10][dlqg;10][lrsB;10][lwxg;10][dlni;10][lrvg;10][clmg;10][lpvg;10][luxg;10][lmug;10][clrB;10][clgi;10][dlpi;10][lnrB;10][lowg;10][lruB;10][flpB ;10][loxg;10][lryB;10][firi;10][lwgi;10][lCyg;10][elyg;10][lnwi;10][lpxg;10][lxyg;10][flimg;10][f InB;10][lqyg;10][dlxg;10][flyB;10][clni;10][lsgi;10][lvwg;10][losg;10][lvyg;10][dlrB;10][dlyi;10][clpi;10][lnog;10][clCg;10][lmyg;10][flsi;10][fluB;10][dlog;10][flni;10][clog;10][lnyi;10][lrxB ;10][lprB;10][lmpg;10][clvg;10][elpg;10][loug;10][lsgB;10][elwg;10][flti;10][flui;10][loyg;10][1 sxg;10][lmng;10][lrwB;10][lmwg;10][elrg;10][celg;10][lnti;10][cflB;10][luyB;10][dluB;10][flw B;10][lnxg;10][flCg;10][lrCg;10][flxB;10][lrgi;10][lpgi;10][lxgB;10][lnri;10][lpCg;10][lnuB;10][clwi;10][logB;10][clxg;10][lorB;10][lrsi;10][delg;10][lpwi;10][ltyg;10][lvxg;9][clCB;9][lpxB;9][lwyi;9][elpB;9][lsCg;9][clvB;9][lqwg;9][lovB;9][lsyB;9][lxyB;9][elCg;9][ltwi;9][dlCB;9][lmpB ;9][dlti;9][lmvg;9][lwxB;9][cdli;9][lqug;9][lvgB;9][flxi;9][cliB;9][lstB;9][elng;9][lptB;9][lpui;9][lmnB;9][dlqB;9][clti;9][lgrg;9][lpvB;9][cltB;9][lrxi;9][dlmB;9][lrvB;9][lnoB;9][dlxB;9][loui;9][lsuB;9][elsg;9][lmqg;9][clqg;9][luiB;9][lyiB;9][lpqg;9][flqg;9][dlwi;9][lvwB;9][clxB;9][lvyB;9][lqsg;9][ruyB;9][lngg;9][cluB;9][losi;9][flpi;9][delB;9][lpti;9][lpsi;9][lmtg;9][lqyB;9][clsi;9][lryi; 9][lpyi;9][lriB;9][fliB;9][lCyB;9][dliB;9][dloB;9][loyB;9][dloi;9][mCg;9][lsti;9][svyg;9][flyi;9][clsB;9][ltiB;9][ltvg;9][lpri;9][clyi;9][lsui;9][logi;9][lmrg;9][lnxB;9][lmgi;9][lnxi;9][nuyB;9][lvgi ;9][rsuB;9][flwi;9][flvB;9][lpsB;9][lswB;9][lrwi;9][lsxi;9][fltB;9][lsxB;9][dlvi;9][luwB;9][celB; 9][flvi;9][elwB;9][lpCB;9][elug;9][swyi;9][lpuB;9][lnsB;9][lxCg;9][lrtB;9][uvyg;9][elyB;9][dls B;9][dlri;9][lmgB;9][lpiB;9][dlsi;9][losB;9][lwiB;9][lsvg;9][luyi;9][lsiB;9][clri;9][lrui;9][lowB;9][lxgi;9][lsyi;9][lotg;9][lswi;9][lrti;9][lnCg;9][lnvg;9][lmyB;9][luxB;9][lmwB;9][ltui;9][dlvB;9][loxB;9][louB;9][lwCB;9][ltwB;9][ltxg;9][lntB;9][cfli;9][luCg;9][elog;8][lmog;8][svyB;8][lotB;8][lpxi;8][elvg;8][lpij;8][qrug;8][lmni;8][lowi;8][lvwi;8][lmCB;8][lnvB;8][lnvi;8][eCB;8][ltxi;8][dlvj;8][suvB;8][lpvi;8][lovi;8][loiB;8][elgB;8][eflB;8][lwxi;8][lmxg;8][lvxB;8][elxg;8][svyi;8][lt xB;8][luvB;8][eltg;8][clqB;8][ltCg;8][ltyi;8][elrB;8][dlxi;8][lmsg;8][lvCg;8][lnqi;8][loxi;8][lsvB ;8][loCg;8][lsvi;8][logg;8][loyi;8][ltvi;8][luvi;8][dlij;8][ltuB;8][nvyi;8][uvyB;8][clxi;8][flCB;8][qsvg;8][lgij;8][dltB;8][clui;8][lxiB;8][lxCB;8][luwi;8][lqyi;8][luxi;8][lCgB;8][lrCB;8][clvi;8][lx yi;8][lnCB;8][elmg;8][lqgB;8][lrvi;8][lpqB;8][elqg;8][elnB;8][ltyB;8][dlmi;8][lnqB;8][lgtg;8][dl qi;8][lqvg;8][lqgi;8][lvyi;8][lqwB;8][lqCg;8][lmqB;8][luij;7][lvij;7][flqB;7][lvgj;7][dlgj;7][lmoB ;7][clij;7][lrCi;7][lnij;7][elsB;7][lgrB;7][flqi;7][lwCi;7][qrwi;7][lqvB;7][lmyi;7][loyj;7][eluB;7][1 qiB;7][lmrB;7][loqj;7][lpCi;7][lgsB;7][lvyj;7][dlyj;7][lvCB;7][elmB;7][elsi;7][lqvj;7][loqB;7][in wj;7][clmi;7][luCB;7][lmuB;7][qCB;7][sCB;7][dlrj;7][sCi;7][lpqi;7][lmpi;7][elqB;7][clyj;7][fl ij;7][clqi;7][lgri;7][lmij;7][lxCi;7][lmti;7][lviB;7][lqwi;7][lqvi;7][dltj;7][lqwj;7][deli;7][lqxg;7][c ljB;7][dlgj;7][elyi;7][dluj;7][lmqi;7][lgsi;7][lqui;7][lCyi;7][lCgi;7][flCi;7][flgj;7][lquB;7][elxB;7][lnCi;7][ltgj;7][uvyi;7][lrsj;7][lwgj;7][qvwi;7][lgjB;7][ltvj;7][clCi;7][cqvi;7][ltvB;7][lvxi;7][lwy j;7][lnmxB;7][lngj;7][lgsj;7][clgj;7][quvg;7][lpjB;7][elni;7][elri;7][lwij;7][logi;7][lgrj;7][celi;7][it wj;7][lwjB;7][flmB;7][ltij;7][lijB;7][dlsj;7][lmui;7][lsyj;7][flvj;7][lrwj;7][loCB;7][efli;7][lnjB;7][elvB;7][qsvi;7][elwi;7][lmiB;7][lswj;7][lryj;7][elpi;7][lpgj;7][lsvj;7][qswi;7][qsvB;7][lmwi;7][1 mvB;7][dlCi;7][flmi;7][lmvi;7][elgi;7][lmgj;7][clgj;7][lrCj;6][lCyj;6][lpsj;6][flyj;6][lqij;6][lqxi;6][lyjB;6][lygj;6][fljB;6][lmxi;6][lqgj;6][lrij;6][lgtB;6][lpyj;6][fluj;6][lstj;6][lqxB;6][lugj;6][lmsi; 6][elui;6][lmri;6][lwCj;6][lgjB;6][lpuj;6][lmjB;6][lgti;6][dlCj;6][eltB;6][lqCj;6][ltjB;6][lsgj;6][in vj;6][elxi;6][lnyj;6][lyij;6][elvi;6][lgtj;6][lmtB;6][lrgj;6][louj;6][ltCi;6][lsCj;6][ltyj;6][quvB;6][1 mCi;6][lngj;6][lvjB;6][lnsj;6][lojB;6][lpgj;6][flwj;6][logj;6][lmsB;6][luvj;6][loCi;6][flgj;6][lqCi; 6][elai;6][isij;6][eCi;6][lvCj;6][luCi;6][irjB;6][loCj;6][dinj;6][elti;6][lsjB;6][aruB;6][lvCi;6][qu vi;6][dljB;6][ltCB;6][lCiB;6][qrui;6][eliB;6][dlxj;5][lgik;5][lvik;5][cluj;5][lygk;5][lgjk;5][lsxj;5][flxj;5][ltuj;5][lvxj;5][flCj;5][lmuj;5][elyj;5][eljB;5][elwj;5][elnj;5][lnCj;5][elij;5][uvyj;5][elqj;5][quvj;5][dlik;5][lsuj;5][lnuj;5][elmi;5][elgj;5][lruj;5][lpCj;5][lxyj;5][lCij;5][lCjB;5][elsj;5][ltCj;5][luwj;5][lCgj;5][elvj;5][lxgj;5][luyj;5][dlgk;5][lxij;5][lxjB;5][flgk;5][elrj;5][lujB;5][lquj;5][lqxj; 5][lxCj;5][elpj;5][lmgk;5][luik;3][lgjz;3][lviz;3][lygz;3][lsiz;3][lskB;3][lqvz;3][luyz;3][lgjA;3][1 quz;3][lgjz;3][eluj;3][flgz;3][lrzB;3][lizB;3][lujz;3][lgiA;3][clgz;3][lyik;3][ljzB;3][luiz;3][lgzB;3][lrgz;3][dlzB;3][lqwz;3][lnzB;3]

[0334] 5 Phage Combinations

[0335] 5 phage combinations were analyzed in silico for their ability to lyse the 352 different strains of Klebsiella pneumoniae bacteria as profiled by their capsule type, based on the ability of the single phage to lyse a bacteria of a particular capsule type as assessed by a liquid media assay.

[0336] The combinations that lyse the highest number of bacterial strains (as profiled by their capsule locus type) are provided herein below. This trait is referred to as “at least 1 phage % coverage”. The number following each combination refers to the Percent trait performance—in this case the percent of bacteria strains as profiled by their capsule type that are targeted by the phage combination. The combinations are listed in descending performance grade.

[0337] [lgsgi;91][lgstg;91][lgsuB;91][lquiB;91][lqujB;91][lqugj;91][lgsug;91][flqsg;91][lgsiB;91][lgstB;91][lpquB;90][lstyg;90][lgsvi;90][lgsgj;90][lpqsB;90][lpqug;90][lgsgz;90][fiqiB;90][lmq ug;90][lgsgB;90][lmquB;90][lgruB;90][lgriB;90][lquzB;90][lgtuB;90][dlqsB;90][lgtjB;90][lsuyg ;90][lgtgj;90][lgsvg;90][clqsg;90][lnqiB;90][lnqsg;90][dlqiB;90][lquvB;90][lnqug;90][lqxiB;90][lnqsB;90][lquvg;90][lnquB;90][lgtug;90][lsuyB;90][clqug;90][flqgj;90][lgtiB;90][flqgi;90][luyjB ;90][lquxB;90][lgsxB;90][elqsg;90][lqugz;90][lgrsB;90][dlqsg;90][lsygi;90][lgsxg;90][lqugi;90][luygj;90][luyiB;90][lsyiB;90][lqgij;90][flqsB;90][lgsxi;90][lgrug;90][lgswi;90][flsyg;90][flqtg;90][flqtB;90][dlqsi;90][flqug;90][flquB;90][lqviB;90][lpqiB;90][lqugB;90][lgsCg;90][lgsvB;90][1 styB;90][lquxg;90][lgrsg;90][lpqsg;90][lgtgB;89][luvyg;89][lrsiB;89][ltyjB;89][elqgj;89][lnggj;89][lnggi;89][elqxi;89][ltyiB;89][elqgi;89][elqiB;89][lgtzB;89][luvyB;89][elqvi;89][lnqjB;89][lty gj;89][clsyg;89][elquB;89][lgtgi;89][lgtgz;89][lngtB;89][elqug;89][lqvjB;89][flnqB;89][lgtCg;89][flngg;89][lngtg;89][elqsi;89][loqug;89][lgtCB;89][lquwB;89][lquxi;89][luxyg;89][lquCB;89][1 qtxB;89][logsg;89][luxyB;89][flqvi;89][lruyg;89][flmqg;89][lquCg;89][lgrsi;89][flpqg;89][lruyB ;89][lsuiB;89][lquvi;89][elqtB;89][lrsyB;89][flpqB;89][lquyB;89][lquyg;89][lqugA;89][lqxgj;89][fluyg;89][luygB;89][lqugh;89][lgtvB;89][lqugk;89][dlsiB;89][luygz;89][fluyB;89][luygi;89][luy zB;89][lquhB;89][lquwi;89][lgrtB;89][lmqsg;89][lpqtB;89][lnyiB;89][lpqtg;89][lpqsi;89][lgrtg;89][lgtxg;89][dlgjB;89][lmuyB;89][lrsuB;89][flqvg;89][lpgjB;89][lmqtB;89][lquij;89][lrsug;89][d lsyB;89][latvg;89][lnsyg;89][dlsyi;89][dlsyg;89][lnsyB;89][cluyg;89][ltuyB;89][flarg;89][lmatg; 89][ltuyg;89][flqrB;89][lpqgi;89][lpqgj;89][flqsi;89][lpuyB;89][lstCg;89][lmuyg;89][elqtg;89][1 mqgi;89][loquB;89][lgsjB;89][lgrgj;89][clqxi;89][flqxi;89][flqxB;89][lqxgi;89][lswyi;89][lqukB; 89][dlqtg;89][lqvij;89][lqijB;89][lqxij;89][lnuyg;89][lygij;89][clqvi;89][lqxjB;89][dlqgi;89][fityg ;89][lxyiB;89][lpsyB;89][lsCiB;89][lgszB;89][lnuyB;89][flqxg;89][flqwi;89][lqvCi;89][flgjB;89][lquwg;89][elsyg;89][lqwij;89][clqui;89][dlqtB;89][lqxCi;89][lgsgA;89][lquAB;89][dlqug;89][is vyg;89][lstCB;89][clqgi;89][flqgB;89][lvyiB;89][lsvyi;89][clquB;89][flqgz;89][lsvyB;89][lmqiB ;89][lgrgi;89][lsvCi;89][lgizB;89][fltyB;89][lpuyg;89][dlqxi;89][clqsi;89][lgsgh;89][lqvgj;89][lp syg;89][lqCgi;89][lqgiB;89][lgsyg;89][lgrjB;89][lsygB;89][lqgiz;89][lqCgj;89][lgsti;89][lqvgi;89][lsygz;89][lqwiB;89][flyiB;89][cflqg;89][flqvB;89][elqsB;89][lpyiB;89][lnqsi;89][lgsCi;89][lrsy g;89][dlyiB;89][dlqvi;89][lsviB;89][flygi;89][lsCyg;89][lsxyg;89][lsCgi;89][dlqij;89][lqgjz;89][1 sxyi;89][lsxyB;89][lgsui;89][fisyB;89][lgswg;89][dlqgj;89][lgswB;89][lqCiB;89][clqtg;89][flygj; 89][lsxCi;89][lgsCB;89][lsygj;89][dlquB;89][lryiB;89][lgsgk;89][flsCg;88][elsvi;88][flswi;88][1 psiB;88][lsCyi;88][flsvi;88][flsvB;88][flvyg;88][flsvg;88][lsxiB;88][lngxB;88][flsyi;88][clqrg;88][lptyg;88][qsuvB;88][flsgi;88][lptyB;88][lsxCB;88][qsuvg;88][lwyij;88][lsxCg;88][lwyiB;88][fl siB;88][lrswi;88][clqri;88][lqygi;88][lqgih;88][dlqwi;88][lrujB;88][lqCgB;88][flsuB;88][lnpqg;88][eluyB;88][lqvxB;88][dlqvB;88][lmgrB;88][dlqgB;88][dlstg;88][dlqgz;88][lmgrg;88][lqwgi;88][lqvCg;88][lruiB;88][lqwgj;88][lqCjB;88][dlvyi;88][lqvCB;88][lqygj;88][dlqxB;88][dlrsg;88][1 qvCj;88][dlqxg;88][lrugj;88][elsxi;88][cflsg;88][clqsB;88][lsCyB;88][dlngg;88][lsuzB;88][clstg; 88][clsug;88][lsujB;88][lCygi;88][lCygj;88][clsvi;88][lCyiB;88][lsugB;88][lsugz;88][clsxi;88][is ugj;88][clsCg;88][lsugi;88][clsyi;88][clsgi;88][lsuyi;88][lsuCB;88][dltyB;88][lsuCg;88][lsuxB;88][cflqi;88][dlnqi;88][lswiB;88][clqtB;88][clqti;88][elpqi;88][lpsCB;88][clpqi;88][elpqg;88][flqz B;88][lvyjB;88][flrsg;88][flrsB;88][lsyzB;88][elstB;88][lsyjB;88][lpsCg;88][psCi;88][lpsyi;88][flsug;88][lsygA;88][lsygk;88][lsygh;88][flryg;88][firyB;88][lsCgB;88][lsCgz;88][flstg;88][flstB; 88][lsCgj;88][clpqg;88][lqCij;88][lqvgz;88][eflgg;88][lmqvB;88][lnqvB;88][lstuB;88][lnquj;88][lnqui;88][dlqri;88][lnqrg;88][lqxgz;88][dluyg;88][lqxzB;88][lgtkB;88][lngwi;88][dluyB;88][lnqr B;88][lquCi;88][elxyi;88][lquwj;88][lmngg;88][elvyi;88][lqwjB;88][dlsxi;88][lrsCB;88][lmqwi; 88][dflqi;88][dflgg;88][lmygi;88][lquxj;88][lqxiz;88][lqxgB;88][lmtyB;88][lsvCg;88][lrtyg;88][1 quvj;88][lqxCg;88][lrsyi;88][lrsgi;88][elygj;88][dlqrB;88][lmnqB;88][lstug;88][lqxCB;88][lqCg z;88][lgthB;88][lqxCj;88][lquiz;88][lmtyg;88][lgtAB;88][eluyg;88][elygi;88][lrtyB;88][dlqrg;88][lquCj;88][lnqvi;88][lnqvg;88][lqwxi;88][lqgjk;88][dlqti;88][lrstB;88][lmqCg;88][dlsvi;88][lqvz B;88][lmqxB;88][lqgjB;88][lmqxi;88][lmqxg;88][lqgzB;88][lnpqB;88][lqgik;88][lqyiB;88][lqwi z;88][dlqvg;88][lqvxi;88][lqvxg;88][lmpqB;88][dlqui;88][lrsCg;88][lmpqg;88][lqvwi;88][elyiB; 88][lrsCi;88][dltyg;88][lnaxg;88]

[0338] The percent of host bacterial strains (as profiled by their capsule locus type) that are infected by two phages of a phage combination are provided below. This trait is referred to as “at least 2 phage % coverage”. The phage combinations are ordered in descending performance grade.

[0339] [lvygB;67][lwygi;67][lrugB;67][lvygi;67][lsuvB;66][dlsug;66][luvyg;66][luvyB;66][dlsu B;66][luvyi;66][dlsvB;66][dlsvg;66][lruyi;66][lwygj;65][lquvi;65][dlqvB;65][dlryB;65][lswyg;65][lrwyi;65][dlnqB;65][lvygj;65][lnvyB;65][elvyg;65][lruyB;65][lruyg;65][lquvg;65][lnvyi;65][1 nvyg;65][dlvyB;65][lquvB;65][lqvgi;65][lrugi;65][dlqvg;65][dlvyg;65][lvwyi;65][dlngg;65][lsvy g;65][dlryg;65][lvyiB;65][lqvgB;65][lgrui;65][dlqrB;65][lgrgB;65][lruiB;65][dlpqB;65][lqwgi;65][luvyj;65][dlnyg;65][dlqrg;65][dlpqg;65][luvjB;65][lwyiB;65][lrygi;65][lsuvg;65][lquvj;64][ls vyB;64][eluyg;64][lgrgi;64][elvyB;64][dlqri;64][dlqui;64][lmsug;64][lqvwi;64][dluyB;64][dlpqi; 64][dlquB;64][dlygi;64][lsugB;64][lgswg;64][dlpsg;64][lmruB;64][lnwyi;64][dlriB;64][lmrug;64][luwyg;64][luygB;64][lsvyi;64][lnuyi;64][lgrwi;64][dlsyg;64][dlswi;64][dlnyi;64][dlnqi;64][dls vi;64][lvCyg;64][lwyjB;64][dlsgi;64][lvCiB;64][dlryi;64][luwyB;64][lsvCg;64][dlnsB;64][dluyg ;64][dlqgB;64][lvyjB;64][lgrug;64][lgruB;64][dlqsg;64][dlqug;64][lvyij;62][lswyB;62][elsug;62][dlqsB;62][lryiB;62][eluyB;62][lqugB;62][lqviB;62][lmryg;62][elqug;62][elvyi;62][lgsvg;62][dl qvi;62][elqvg;62][clqvB;62][lqvgj;62][clqvg;62][lmsuB;62][dlpsi;62][dlxyB;62][dlsxg;62][lqwi B;62][lsuCg;62][dlvyi;62][lvCyB;62][lrujB;62][lquwg;62][lqwgj;62][lnugj;62][lquwB;62][luwyi ;62][dlqgi;62][lnujB;62][lsvCB;62][dlsyB;62][lswyi;62][lnqvg;62][lqvCg;62][lvygz;62][lnqvB;62][luygi;62][elqrg;62][lnqvi;62][luCiB;62][lnqui;62][luCgj;62][lrsuB;62][lngwi;62][lnuyB;62][ln uyg;62][lnuiB;62][louyg;61][lmsyB;61][lwCyi;61][lsuyg;61][lmryB;61][lmriB;61][dlsiB;61][lvC ij;61][lrygj;61][lwyij;61][lgswi;61][lrsug;61][lgriB;61][lvyiz;61][lswCi;61][clqrg;61][dlqsi;61][d lsyi;61][flvyg;61][lpuyi;61][lmsCg;61][lmgrg;61][dlmqg;61][lgsvi;61][lgsvB;61][lmqvg;61][dlrs B;61][lnsuB;61][lnsug;61][lqvjB;61][elquB;61][lmuyg;61][dlyiB;61][dlqxB;61][lqugi;61][dlygj; 61][luCyg;61][luwyj;61][lqvxi;61][elgri;61][clsug;61][lmsyg;61][lrugj;61][lnquB;61][lgswB;61][elqvB;61][dlrsg;61][elygi;61][lruxB;61][elygB;61][lqwjB;61][lpqwi;61][dlqxg;61][lsuyi;61][lsu gi;61][lsuCB;61][lmygi;61][lquwi;61][lvCyi;61][lsvCi;61][elqui;61][dlqwi;61][lpqgB;61][lnqug; 61][elsuB;61][lqvCB;61][lvyzB;61][dflqg;61][lrxyg;61][lrxyi;61][dlyjB;60][elgrB;60][clqri;60][1 rtuB;60][lnqrg;60][lpqui;60][lmqsg;60][luCyB;60][lgrCg;60][ltvyB;60][lpsug;60][dlrsi;60][lgsug ;60][lquwj;60][lmqvi;60][fivyB;60][lnygi;60][lryjB;60][lpsuB;60][louyB;60][lrsgB;60][lmqvB;60][clvyi;60][lqvgz;60][firuB;60][lmyiB;60][dlxyi;60][dlmqB;60][lgtvi;60][lmqsB;60][lmqui;60][lrsyi;60][luyiB;60][dlsxi;60][flvyi;60][ltvyg;60][dflqB;60][cluyB;60][lpygi;60][lgrxg;60][lgrxi;60][clquB;60][elpqg;60][lqvxB;60][clqrB;60][clpyg;60][lsuiB;60][lquCg;60][clqug;60][lsuyB;60][logrg;60][loqug;60][dlqiB;60][lwxyi;60][lqvxg;60][dlqgj;60][lruxg;60][lgsui;60][loqui;60][lqvC i;60][loavg;60][ltwyB;60][clavi;60][lrsCg;60][luCyi;60][lmpag;60][lavij;60][clpag;60][elyiB;60 ][lgrgj;60][lpuyg;60][ltwyg;60][ltwyi;60][elqvi;60][lrsyg;60][lnuyj;60][lmqug;60][elqwg;60][lqu yg;60][lpuyB;60][lmgrB;60][flqvg;60][cluyg;60][lwyiz;60][lmuyB;60][lrsCi;59][luygj;59][lmpq B;59][dltyi;59][lmpqi;59][dlstg;59][dlgjB;59][dlqtB;59][cluyi;59][elygj;59][clqui;59][elqwi;59][dlqxi;59][lsugj;59][lqwij;59][lqygB;59][elsyg;59][clquj;59][lmqwi;59][dlqti;59][dflqi;59][lpqug; 59][lgrjB;59][losug;59][lsvgi;59][dlyij;59][dltyg;59][dlyzB;59][lngrB;59][lnquj;59][lrugz;59][lp qCg;59][dlqtg;59][lrtug;59][loggB;59][lquyB;59][elsvg;59][flqwg;59][clqwg;59][lpqgi;59][lsujB ;59][luyij;59][lquiB;59][loqvB;59][lsygB;59][lquCi;59][lrswg;59][lpquB;59][clpqB;59][flrug;59][lmrsg;59][flqvi;59][lxygi;59][lgrsg;59][lgrsi;59][dlsti;59][elsyi;59][dlmqi;59][elqyg;59][clngg;59][lgtwB;59][lgtwi;59][lgtwg;59][lgsuB;59][dlstB;59][lqvzB;59][lgrCi;59][lmsgi;59][losuB;59][1 qviz;59][dlqgz;59][clnyg;59][flwyi;59][lmnyg;59][luxyi;59][elvyj;59][luxyB;59][luxyg;59][lqw Ci;59][lgtvB;59][flqvB;59][loquB;59][lgrxB;59][lgrij;59][luxiB;59][lswiB;59][lquCB;59][lgtvg; 59][lmquB;59][dltyB;59][clygi;59][lqwxi;57][flryg;57][lrswi;57][clpqi;57][losyg;57][clqiB;57][1 suxB;57][lmqxg;57][lrsCB;57][lpsCg;57][elpqi;57][elqgB;57][clqwi;57][lmqgB;57][dlqzB;57][e lquj;57][lqwiz;57][clsvi;57][lCygi;57][lnpqg;57][lqygi;57][clnqi;57][lnsyg;57][lpsyg;57][lsviB;57][lpyiB;57][lquxi;57][lrsyB;57][flryi;57][clpyi;57][lquij;57][ltuyB;57][cdlqg;57][ltuyg;57][fluy g;57][lmsiB;57][elsvB;57][lnyiB;57][lpygj;57][lgrCB;57][lnsCg;57][dlqij;57][clnsg;57][loqvi;57][loqwi;57][lqugj;57][lmnyB;57][lsygi;57][luyjB;57][elxyg;57][lquxB;57][losCg;57][lquxg;57][e lqwB;57][logrB;57][lrswB;57][luxjB;57][clqgi;57][luxyj;57][elyij;57][loqCg;57][dlyiz;57][lvCyj ;57][elqgi;57][lmrsB;57][flqwB;57][lpswi;57][lnsyi;57][lrsgi;57][elpqB;57][elsyB;57][lnygj;57][lstuB;57][elmqg;57][lnqCg;57][clnyi;57][lnggB;57][lnyjB;56][lsyjB;56][lrtyB;56]

[0340] The percent of host bacterial strains (as profiled by their capsule locus type) that are infected by three phages of a phage combination are provided below. This trait is referred to as “at least 3 phage % coverage”. The phage combinations are ordered in descending performance grade.

[0341] [dluyg;50][dlvyi;50][dlvyg;50][dlvyB;49][dlqwi;49][luwyg;49][luwyi;49][dluyB;49][dlry g;48][lquwg;48][lquwi;48][dlryi;48][cdlqg;48][cdlqi;48][dlqug;48][dlsuB;47][dlsug;47][luwyj;47][lpuyg;47][dlrsi;47][dlqvg;47][lpqug;47][dlrsg;47][dlqui;47][dlquB;47][luwyB;47][dlqvi;47][1 quwj;45][dlqvB;45][dlnyi;45][dlriB;45][dlqri;45][dlnyg;45][dlryB;45][dlqrg;45][dlrsB;45][luCyi ;45][lpqui;45][cluyi;45][lquwB;45][lpuyi;45][lpuyB;44][lpquB;44][cluyg;44][luCyj;44][dlsyi;44][lnvyg;44][dlswi;44][lnuyj;44][luCyg;44][dlmqi;44][dlpsg;44][lvwyi;44][lquCi;44][lmrug;44][1 mruB;44][dlxyi;44][luvyB;43][dlqxi;43][lnqvg;43][lrswB;43][clnyi;43][dltyg;43][lmryg;43][clqu i;43][dlyiB;43][lnvyi;43][dlqrB;43][lquCg;43][lnuyg;43][lquyg;43][lnwyi;43][dlpsi;43][luvyg;43][luvyi;43][lvCyi;43][lvCyg;43][dlpqg;43][luCyB;43][dlmqg;43][lnsug;43][dlnsB;43][dlmqB;43][lrswg;43][clnyg;43][lnuyi;43][cluyB;43][lrwyi;43][dltyi;43][dlygi;43][dlqxg;43][lmuyB;43][lm nyg;43][lmuyg;43][dlsyg;43][lruxg;42][claCg;42][loawi;42][lawCi;42][dlpai;42][dltyB;42][ltCy g;42][lnvyB;42][lruyi;42][lquCB;42][lpsug;42][lnqrg;42][luxyi;42][luxyg;42][lsuCB;42][ltCyi;42][dlsvi;42][lrswi;42][lquyB;42][dlxyB;42][lgrwi;42][lgrui;42][lpsyi;42][lnsuB;42][lmryB;42][lq tyg;42][lgtCg;42][lquvi;42][luxyj;42][clvyi;42][lsuyi;42][dlsyB;42][lntyg;42][lsuCg;42][lruyg;42][lnquj;42][lwCyi;42][lqvwi;42][lquvB;42][lmnyB;42][dlqtg;42][lvCyj;42][dlsvB;42][lvCyB;42][dlsvg;42][lmrsg;42][lquCj;42][lquvg;42][clqug;42][lnqvi;42][clqwg;42][lgrug;42][lmrsB;42][cl gyg;42][dlqtB;41][lmqui;41][lpsCi;41][lmsuB;41][lwxyi;41][luvyj;41][clqCi;41][lsCyB;41][lnqv B;41][lgrCg;41][lsCyi;41][lnsyg;41][dlqti;41][lsuyg;41][lqvCg;41][lgrCB;41][dlqxB;41][lsuyB;41][lnpqg;41][lrsug;41][lnsyB;41][lnqug;41][lgrCi;41][lgtuB;41][lnsCg;41][lxCyg;41][dlygj;41][d lyjB;41][lqCyg;41][lpqCi;41][lpqxi;41][ltCyB;41][lruxB;41][dlpqB;41][dlyij;41][lsuxg;41][lpsu B;41][lpqwi;41][lpqxg;41][lxCyi;41][clqwi;41][lgruB;41][lgsyB;41][lgtui;41][dlnqi;41][lquxg;41][lnsyi;41][lnsCB;41][lnsCi;41][dlngg;41][lxCyB;41][clquj;41][lgtyB;41][lgtCi;41][lgtug;41][el qwB;41][lqxCi;41][lquxj;41][lquxi;41][lgtCB;41][lruyB;41][clpyi;41][lpswi;41][lqxCg;41][lrtuB ;41][lnqui;41][luxyB;41][lpsyg;41][lqvCi;41][lnuyB;41][lpsyB;41][lnqrB;41][elqwg;41][lsCyg;41][eluyg;41][lqxCB;41][lqwxi;41][clquB;41][lngtg;41][lrtug;41][lgsyg;41][lCygi;40][clsug;40][1 rsxg;40][loquB;40][flpyg;40][loqug;40][dlqsi;40][clrsg;40][dflqi;40][clrsi;40][elngg;40][lntyB;40][dlqsg;40][lpqsi;40][clnsi;40][lpqtg;40][lmsug;40][lpqsB;40][dlqgi;40][lmqug;40][clpsi;40][cl nsg;40][lnpqB;40][lquxB;40][lpsCB;40][lmquB;40][dlyiz;40][flqCi;40][elnqB;40][lngwi;40][lpq sg;40][elnqi;40][lpsCg;40][lmngg;40][clsyi;40][lgsuB;40][luCiB;40][lmqwi;40][fluyB;40][elqui; 40][flqCg;40][ltuyB;40][lgsug;40][lnqsB;40][luyjB;40][eluyB;40][dlqiB;40][lrugi;40][lnqsg;40][elswi;40][loqui;40][ltuyg;40][clsyg;40][lpqCB;40][irsyB;40][flnyi;40][clpyg;40][lmqCg;40][lqv xg;40][lmngi;40][elqwi;40][flnyg;40][dlqgB;40][louyB;40][flgyg;40][luyiB;40][lmgrg;40][lqvC B;40][lpqCg;40][lpqxB;40][lnuiB;40][louyg;40][lrugj;40][lgsui;40][lgsCB;39][elquj;39][lrsCB;39][dlnqB;39][elvyg;39][lngxj;39][luygj;39][lrsxi;39][finyB;39][iCyiB;39][lxCyj;39][lgsCg;39][1 oqvg;39][luyij;39][clxyi;39][dlsxi;39][clmqg;39][loqvi;39][lgrsB;39][lrsxB;39][ltxyg;39][clnqi;39][clngg;39][elvyi;39][luxgj;39][lsuxB;39][flpyB;39][clqvg;39][elrsB;39][loqCg;39][clqvi;39][fl pqi;39][logrB;39][lrxyg;39][lmqvB;39][lnqCg;39][clpqi;39][clqri;39][clqrg;39][elsuB;39][lptyg; 39][lgtxg;39][lgrtg;39][figyB;39][lnqCi;39][dlqsB;39][luygi;39][lmnqB;39][lrsyi;39][luygB;39][fluyg;39][irsuB;39][dflqB;39][elqyg;39][lnquB;39][ruiB;39][lrujB;39][lmgrB;39][lquvj;39][clps g;39][elqug;39][lngtB;39][ingxg;39][flrug;39][lmqvg;39][ltwyg;39][lrugB;39][lmqvi;39][lgtwg;39][flqCB;39][elsug;39][dlsxg;39][clqrB;39][lrsyg;39][inqsi;39][cltyg;39][dflqg;39][lsuvg;39][lnq CB;39][dlstg;38][elsxB;38][clpqg;38][lrtyg;38][nuvyg;38][lqvxB;38][flryB;38][elpqi;38][cloqg; 38][lqCgB;38][clsCg;38][lmsCg;38][lrxyi;38][lmsyg;38][lCygj;38][lrsCi;38][elsCg;38][elqvg;38][lrsCg;38][clqxB;38][nuvyB;38][flruB;38][flswg;38][flryg;38][elrsi;38][elvyj;38][lswyB;38][is wyg;38][iaxCj;38][elvyB;38][lmtyB;38][inaxi;38][itxyi;38][impai;38][distB;38][elsvi;38][flswi; 38][lngxB;38][elrsg;38][lqygi;38][lmtyg;38][elsvg;38][lnugj;38][clpqB;38][lnujB;38][lqvCj;38][clqvB;38][flswB;38][flryi;38][ltxyB;38][elxyi;38][clqxg;38][lgrtB;38][lpqtB;38][loqvB;38][flpq g;38][elqvi;38][elquB;38][ltwyi;38][elxyg;38][luykB;38][lnygj;38][lnygi;38][dlgjB;38][lgtxB;38][luCgj;38][lgrxB;38][lsuvB;38][lgrxg;38][lpygi;38][flquB;38][flwyi;38][eltyg;38][lgrsg;38][elsv B;38][dlyzB;38][dlqgj;38][lqCgi;38][elqwj;38][clqtg;38][lswyi;38][lgsCi;38][logrg;38][flqui;38][lsxyB;38][clqxi;38][lptyB;36][lsxCB;36][flpsg;36][lsxyi;36][elsxi;36][lnyiB;36][clqsB;36]

[0342] The percent of host bacterial strains (as profiled by their capsule locus type) that are infected by four phages of a phage combination are provided below. This trait is referred to as “at least 4 phage % coverage”. The phage combinations are ordered in descending performance grade.

[0343] [dlngg;32][dlnqB;32][dluyB;32][dluyg;32][lnuyB;32][dlryB;32][dlnyg;32][lnuyg;31][dlr yi;31][dlryg;31][lruyi;31][lqCyg;31][lnquB;31][dlnyi;31][lruxg;31][lruyB;31][luCyB;31][lruyg;31][dlquB;30][dlnqi;30][luCyi;30][lnqug;30][lnqCg;30][dlqug;30][luxyg;30][luCyg;30][lnuyi;30][lpuyi;30][cluyB;30][lnqCB;30][dlqrB;30][dlqui;30][lnpqB;30][lnpqg;30][lnqrB;30][lquyB;30][lp uyB;30][dlxyB;30][lruxB;28][lpuyg;28][luvyg;28][dlvyg;28][cluyi;28][dlqrg;28][dlpqB;28][dlpq g;28][lnqrg;28][clngg;28][lwCyi;28][luxyB;28][dlpqi;28][luCyj;28][clnyg;28][lquyg;28][cluyg;28][lnuyj;28][dlxyi;28][luwyB;28][luxyi;28][clpyi;28][lrxyg;28][lngxB;28][clpyg;28][lngxg;28][e luyB;28][cdlqg;28][clqwg;27][clquB;27][luvyi;27][lrwyi;27][nuvyg;27][lntyB;27][lnqCi;27][luw yg;27][clqrB;27][luwyj;27][cdlqi;27][dlvyB;27][ltuyg;27][luwyi;27][lquCB;27][dlqxg;27][lrtyB; 27][lgruB;27][eluyg;27][clqyg;27][lgrug;27][lquxg;27][dltyg;27][flrug;27][lptyB;27][lrxyi;27][ln wyi;27][dlqwi;27][lmrug;27][dlqxB;27][dlvyi;27][lrtyg;27][clnyi;27][dltyB;27][lnqui;27][dlqri;27][lrtug;27][clqwi;26][lmuyg;26][clqug;26][lptyg;26][lquCg;26][lmnyg;26][lngwi;26][lmruB;26][lnvyg;26][lgrCB;26][clpqB;26][lnvyB;26][lgrui;26][lmuyB;26][fluyg;26][elnqB;26][lxCyg;26][elngg;26][lgrxg;26][lquxB;26][lquwB;26][firuB;26][luxyj;26][clqrg;26][lxCyB;26][luvyB;26][el quB;26][lpquB;26][lwxyi;26][clpqg;26][elxyg;26][lmnyB;26][ltwyB;26][dlqvg;26][clnqi;26][luv yj;26][ltuyB;26][clxyi;26][lntyg;26][dltyi;26][lvwyi;25][elqug;25][flnqB;25][elvyB;25][lmryB;25][lmngg;25][lmnqB;25][fluyB;25][ltCyB;25][lgrCg;25][clqCg;25][dlnsB;25][lvCyg;25][dlsxg;25][lngxi;25][lpqxB;25][lpqCg;25][lpqCB;25][dlqvB;25][elgrB;25][lxCyi;25][elvyg;25][lxCyj;25][dlsvg;25][louyg;25][lvCyB;25][lpqui;25][lpqwi;25][lpqxg;25][ltvyg;25][dlsug;25][clqxB;25][cl pqi;25][lquCi;25][clvyi;25][clqri;25][nuvyB;25][dlmqg;25][celqg;25][cltyg;25][lsuvg;25][lgrxB; 25][clqxg;25][elxyi;25][lquxi;25][flqug;25][lquwg;25][elqyg;25][lpqug;25][lrtuB;25][ltwyg;25][clqui;25][lquvg;25][dlqxi;25][elqui;24][elqxg;24][lrswg;24][dlqvi;24][lmryg;24][lnqvB;24][elqx B;24][lnvyi;24][lrsuB;24][louyB;24][dflqg;24][ltxyg;24][ltCyg;24][lpsuB;24][lnqvg;24][elqwg;24][lnsyB;24][flmyg;24][lvCyi;24][finyB;24][flqui;24][dlmqB;24][lgrCi;24][flxyg;24][lgrwi;24][1 awCi;24][elnai;24][larxi;24][clmag;24][ltwyi;24][lnquj;24][elarg;24][clavB;24][flryi;24][lrswB; 24][lpqCi;24][lpsug;24][elpqB;24][dflqB;24][dlswi;24][clrsg;24][dlmqi;24][flquB;24][lngtB;24][elxyj;24][dlsuB;24][flngg;24][lquCj;24][lquwi;24][dlrsB;24][elpqg;24][clqCi;24][elvyi;24][elqw B;24][lmquB;24][flryg;24][lmqug;24][lmpqg;24][firyB;24][dlrsg;24][dlsyB;24][lmpqB;24][lrsug ;24][clqvg;24][dlsvi;23][lgtyB;23][clqxi;23][ltvyB;23][lsuxg;23][dlqtg;23][flpyB;23][ltCyi;23][1 pswi;23][lmtyB;23][fixyB;23][lmgrB;23][lrsCg;23][elmqg;23][lqxCg;23][lnsCB;23][lqxCB;23][elsxg;23][fltyg;23][dlpsg;23][eltyB;23][dlqti;23][flxyi;23][lstvg;23][lswyB;23][elgri;23][elpqi;23][dlsvB;23][lsuyB;23][lquvB;23][elqwj;23][lsuyg;23][dlqtB;23][cflyg;23][lnsug;23][elrsg;23][dlr si;23][clsug;23][flqyB;23][elrsB;23][flqxg;23][losug;23][losyg;23][elqwi;23][flnyg;23][lmngi;23][lmtyg;23][flqwB;23][dlpsi;23][clrsi;23][flvyg;23][lrswi;23][lpqxi;23][ltxyB;23][lrsxg;23][lnsu B;23][dlsyg;23][lrsCB;23][clquj;23][clpsg;23][lrsyg;23][flqrg;23][lmqwi;23][clnsg;23][ingtg;23][lrsyB;23][dflqi;23][flqrB;23][lquvi;23][lmpqi;23][lsuvB;23][lnsyg;23][lqwxi;23][elvyj;23][flwy i;23][dlsxi;23][lmqui;23][dlsyi;22][lswyg;22][lswCi;22][lngsB;22][lotyg;22][elsuB;22][dlqsB;22][flmqB;22][elpgj;22][elqvg;22][lpqtB;22][flqwg;22][lgrtB;22][flqri;22][elquj;22][suvyg;22][elq vB;22][ipstB;22][lpstg;22][flngi;22][lsvyg;22][flqvg;22][elrsi;22][suxB;22][lsvCg;22][flpqB;22][lsuyi;22][clsCg;22][lrsxB;22][lqvCg;22][iqvCB;22][lmgrg;22][dlstg;22][lmqCg;22][qvxB;22][1 quvj;22][lrsyi;22][lrsCi;22][lqvwi;22][flmqg;22][losCg;22][lqvxg;22][lmqxg;22][elqxi;22][losyB ;22][lquwj;22][clqtB;22][clsxi;22][lqrtg;22][clsvi;22][ivCyj;22][clstg;22][ltxyi;22][cflqg;22][lsx Cg;22][flsug;22][flnyi;22][ipsCB;22][losuB;22][isCyB;22][lgtug;22][flgyg;22][lmqxB;22][flqxB ;22][lrstg;22][elsvg;22][flpyg;22][clpsi;22][lsxyg;22][flvyi;22][lgtyg;22][ipsyB;22][lrstB;22][ins Cg;22][elsxB;22][elsug;22][lmqvg;22][igtwB;22][eltyg;22][fltyB;22][lgtui;22][clqvi;22][dlsti;22][isuCB;20][igswB;20][suvyB;20][flsuB;20][lqxCi;20][dlqsi;20][lnsyi;20][lswyi;20][lquxj;20][is xCB;20][elsxi;20][isvCB;20][igtuB;20][clnsi;20][isuCg;20][cflqi;20][lstyg;20][gsyB;20][sCyg; 20][lstyi;20][clqti;20][clsyg;20][flrsg;20][dlstB;20][elsyB;20][psCg;20][lmsug;20][flqxi;20][lnq sg;20][flrsB;20][lpsyg;20][flqCB;20][logrg;20][flpqg;20][clqtg;20][lrsxi;20][eflqg;20][lgtwi;20][lsvyB;20][flqwi;20][elsvB;20][istvB;20][loqug;20][isxyB;20][lqvxi;20][dlqsg;20][lstug;20][lpqtg ;20][iqxCj;20][istyB;20][inqvi;20][elswi;20][elqxj;20][flmqi;20][lgtwg;20].

### Example 4

### Phage Combinations Selected According to Host Coverage as Classified by Bacterial MLST

[0344] For this example, the particular phages are referred to by the single letter designation in Table 1, herein above.

[0345] 2 Phage Combinations

[0346] 2 phage combinations were analyzed in silico for their ability to lyse the 352 different strains of Klebsiella pneumoniae bacteria as classified by MLST, based on the ability of the single phage to lyse a bacteria of a particular MLST as assessed by a liquid media assay.

[0347] The combinations that lyse the highest number of bacterial strains (as classified by MLST) are provided herein below. This trait is referred to as “at least 1 phage % coverage”. The number following each combination refers to the Percent trait performance—in this case the percent of bacteria strains as profiled by their capsule type that are targeted by the phage combination. The combinations are listed in descending performance grade.

[0348] [ly;63][lq;63][lu;62][lw;62][lg;62][lC;61][dl;59][lv;59][li;59][B;59][lx;57][c1;57][wy;56][lr;56][fl;56][el;56][qw;56][lt;55][vy;55][lp;55][qv;55][uy;55][ls;55][ny;54][ry;54][wg;53][nu;53][xy;53][lm;53][ug;52][qu;52][lo;52][ln;52][qr;52][nw;52][nq;52][dy;52][lj;52][yg;52][wC;51][q x;51][vC;51][uC;51][uB;51][wB;51][wi;51][pq;51][py;51][uw;51][ui;50][yB;50][dn;50][nC;50][dq;50][sw;50][nv;50][nr;50][yi;50][sy;49][dg;49][uv;49][cy;49][rC;49][rg;49][lz;49][qs;49][vg;49][cq;48][qg;48][lk;48][fy;48][lh;48][dv;48][oq;48][su;48][du;48][ds;48][lA;48][my;48][sC;48][pu;47][cu;47][rB;47][dB;47][di;47][ru;47][oy;46][vB;46][qi;46][xC;46][nx;46][qB;46][pC;46][e y;46][ri;46][dw;46][cn;46][rw;46][Cg;46][vi;46][ou;46][mu;46][dC;45][cv;45][cg;45][vw;45][pg ;45][fn;45][fq;45][mw;45][eu;45][dr;45][mq;45][np;45][ux;45][Cy;44][eq;44][fw;44][dp;44][ty; 44][cC;44][xg;44][oC;44][tw;44][wj;44][ow;44][wx;44][Ci;44][pw;44][ci;44][do;44][CB;44][dx ;44][ns;43][cs;43][cB;43][pB;43][pi;43][df;43][mv;43][yj;43][mr;43][cr;43][mC;43][sv;43][rx;43][rs;43][qy;43][qC;43][qt;43][ng;42][ps;42][pv;42][vx;42][fv;42][no;42][dm;42][rv;42][cx;42][mn;42][cd;42][uj;42][cw;42][ew;42][xB;42][xi;42][mx;41][fr;41][px;41][fC;41][er;41][cp;41][tu ;41][fu;41][dt;41][nt;41][mg;41][ni;41][dj;41][sx;41][en;41][ev;41][tC;41][wz;40][ms;40][tv;40][co;39][wk;39][wh;39][yz;39][de;39][nB;39][cm;39][eg;39][wA;39][yk;39][yh;39][pr;39][mB;39][qj;39]

[0349] The percent of host bacterial strains (as classified by MLST) that are infected by two phages of a phage combination are provided. This trait is referred to as “at least 2 phage % coverage”.

[0350] The phage combinations are ordered in descending performance grade. [qy;28][cw;28][dw;27][vw;26][rw;26][Cy;26][ln;25][pr;25][pw;25][du;24][cd;24][rv;24][uw;24][qC;24][wx;24][dr;24][ru;23][lr;23][lw;23][dl;23][lp;23][cr;22][dC;22][ly;22][lu;22][ux;21][pv;21][cu;21][dy;21][dp;21][ew;21][lv;21][dv;21][uv;21][dx;21][cp;21][de;20][lm;20][uy;20][pu;20][cy;20][cl;20][vx;20][rx;20][wC;19][cC;19][dq;19][mw;19][wy;19][lC;19][cv;19][ce;19][dm;19][px;18][lq;18][cm;18][eC;18][mp;18][qu;18][cx;18][lx;18][or;18][fu;18][uC;18][ry;18][p y;17][cq;17][er;17][mu;17][rC;17][ex;17][nw;17][op;17][ov;17][mr;17][ev;17][aw;16][lo;16][o w;16][pC;16][cn;16][gB;16][vy;16][dn;16][fw;16][np;16][mv;16][my;16][eu;16][ep;16][ls;16][mC;16][ey;16][qr;15][el;15][xC;15][mq;15][cf;15][df;15][rs;15][mn;15][en;15][ny;15][nr;15][fx; 15][nu;15][em;15][fr;15][eq;14][vC;14][fp;14][nv;14][sv;14][xy;14][mx;14][gi;14][nC;14][co;14][fC;14][nx;14][pq;14][fm;13][ef;13][oy;13][nq;13][fv;13][su;13][tu;13][do;13][rt;12][ox;12][iB; 12][sx;12][qv;12][fl;12][sy;12][ou;12][sw;12][fy;12][ps;12][tw;12][qx;12][os;12][cs;12][ns;11][dt;11][ds;11][mo;11][fq;11][es;11][ct;11][eo;11][pt;11][ft;11][ty;11][tv;10][no;10][oC;10][lt;10][ms;10][fs;10][tC;9][qs;9][st;9][sC;9][tx;9][fo;9][nB;9][qt;9][ng;8][oq;8][mt;8][nt;8][et;8][fn;8][o t;7][ni;6][Cg;6][ij;6][gj;6][CB;6][cB;5][yB;5][sg;5][yg;5][lB;5][UB;5][dg;5][sB;5][cg;5][qg;5][d B;5][qB;5][eB;5][Ci;5][xB;5][lg;5][wg;5][eg;5][wB;5]

[0351] 3 Phage Combinations

[0352] 3 phage combinations were analyzed in silico for their ability to lyse the 352 different strains of Klebsiella pneumoniae bacteria as classified by MLST, based on the ability of the single phage to lyse a bacteria of a particular capsule type as assessed by a liquid media assay.

[0353] The combinations that lyse the highest number of bacterial strains (as classified by MLST) are provided herein below. This trait is referred to as “at least 1 phage % coverage”. The number following each combination refers to the Percent trait performance—in this case the percent of bacteria strains as profiled by their capsule type that are targeted by the phage combination. The combinations are listed in descending performance grade.

[0354] [lyg;77][lug;76][lqg;76][lwg;76][lyi;75][lgi;75][lyB;75][lvg;74][luB;74][lui;74][lqB;74][1 Cg;74][lwi;74][lwB;73][dlg;72][lvi;72][luy;72][lrg;72][lxg;72][lqw;72][lwy;72][lCi;71][lvB;71][clg;71][lCB;71][lqx;71][lqv;71][flg;71][lqu;71][dli;70][lvy;70][lxy;70][wyg;70][ri;70][lxi;70][cl i;70][dlB;70][lwC;69][lxB;69][luC;69][elg;69][fly;69][fli;69][lrB;69][lpg;69][clB;69][lgt;69][lv C;69][luw;69][flB;69][qwg;69][ltg;69][cly;69][clq;69][vyg;69][flq;68][wyB;68][wyi;68][uyg;68][lny;68][dly;68][lry;68][qvg;68][lty;68][lgs;68][lgr;68][dlq;68][lnq;68][lxC;68][eli;68][nwy;68][1 yj;68][luv;68][lpq;68][ryg;68][log;67][ely;67][lmg;67][dlu;67][loq;67][lgj;67][qwB;67][elq;67][1 sg;67][lsy;67][lsw;67][nqw;67][lpy;67][qwi;67][lpi;67][luj;66][lmy;66][lnu;66][qvB;66][elB;66][clu;66][elu;66][lpB;66][qvi;66][lsu;66][lsC;66][lux;66][ltC;66][flw;66][flC;66][uyB;66][vyB;66][lwj;66][vyi;66][uyi;66][lru;66][lqy;66][lCy;66][lrC;66][qrg;66][clC;66][lsi;66][nvy;66][loy;66][xyg;66][nqv;66][nuy;66][lti;66][ltB;66][dlC;65][ryi;65][qug;65][lpC;65][lqC;65][lmi;65][lCj;65][swy;65][dlw;65][ryB;65][lnw;65][qsw;65][lou;65][lmq;65][uvy;65][pyg;65][ltw;65][lnC;65][ls B;65][flu;65][dlv;65][loi;65][dfl;65][lpu;65][loC;65][lyz;65][flv;65][dls;65][lwx;65][dyg;65][lv w;65][lmB;65][wCg;64][qri;64][ltu;64][qrB;64][uwg;64][nry;64][vCg;64][quB;64][nyg;64][lrw; 64][fix;64][elw;64][lqz;64][uwy;64][pqg;64][elC;64][uvg;64][lyk;64][loB;64][lyh;64][lmw;64][dlx;64][lak;64][axg;64][clv;64][lgi;64][lyA;64][luz;64][lrx;64][xyi;64][qui;64][lwz;64][dlj;64][l vx;64][ltx;64][lsv;64][lnv;64][uCg;64][lmu;64][dlt;64][lvj;64][nqu;64][nxy;64][ngr;64][lsx;64][c lx;63][lpw;63][lwk;63][elv;63][nwg;63][lxj;63][nwC;63][lgj;63][lqA;63][lmC;63][ltv;63][lgh;63][xyB;63][ngx;63][quv;63][luh;63][luk;63][low;63][dln;63][nug;63][lng;63][lwh;63][liB;63][cdl; 63][dlr;63][dyB;63][suy;63][dyi;63][fr;63][lwA;63][pyB;63][nuC;63][nvC;63][luA;63][svy;63][clw;63][clj;63][cls;63][qsv;63][uwB;63][pqB;63][lnx;63][nyi;63][uvB;63][ruy;63][pyi;63][pgi;63][quw;63][del;63][dqg;62][nuv;62][npy;62][nuw;62][clt;62][elx;62][ngg;62][vwy;62][rug;62][1 nr;62][dlo;62][lpx;62][cfl;62][cln;62][rCg;62][lgh;62][uCB;62][lCz;62][wyj;62][lgB;62][fln;62][elt;62][lmx;62][qxi;62][npq;62][vCB;62][uwi;62][fny;62][vCi;62][dny;62][lgz;62][wCB;62][qv w;62][wCi;62][uxy;62][cyg;62][lCh;62][ljB;62][lrj;62][lCk;62][nyB;62][lgk;62][efl;62][lrv;62][uCi;62][lrs;62][lgA;62][elr;62][ouy;62][nwi;62][lmv;62][fyg;62][qvx;62][swC;62][pug;62][lox;62][clr;62][sug;62][nui;62][swg;62][uvi;62][uvC;62][dlp;62][qxB;62][lni;62][fls;62][fwy;61][rsy; 61][vxy;61][myg;61][oug;61][dnq;61][lCA;61][rwy;61][flj;61][wxy;61][nuB;61][qsu;61][syg;61][ngi;61][qru;61][dlm;61][qrw;61][ogg;61][qrx;61][qwj;61][dwy;61][cqv;61][puy;61][lvz;61][cv y;61][rxy;61][pqu;61][noq;61][mug;61][lpv;61][duy;61][dvy;61][ruB;61][nwB;61][dsy;61][dvg; 61][cel;61][clp;61][cny;61][elj;61][uwC;61][dqB;61][lnB;61][lrt;61][flt;61][dug;61][dgi;61][els; 61][dlh;61][dlz;61][suC;61][cug;61][flp;61][nvg;61][lih;61][nrg;61][cuy;61][swi;61][nrC;61][lvh ;61][lvk;61][oyg;61][lij;61][dlk;61][nru;61][lov;60][pqv;60][ngs;60][oqu;60][clo;60][lns;60][clm ;60][flo;60][qwx;60][puB;60][pqw;60][nqB;60][mny;60][lvA;60][qsx;60][eln;60][qsg;60][lps;60][dwg;60][dlA;60][liA;60][qux;60][rwg;60][lmr;60][elp;60][cnq;60][fvy;60][cqg;60][dqv;60][qrs ;60][clz;60][svC;60][rCi;60][rCB;60][noy;60][qwy;60][lxz;60][cyi;60][fyB;60][dnu;60][fnq;60][syi;60][fqv;60][sxy;60][fyi;60][liz;60][nsy;60][rvy;59][oqi;59][pwy;59][mqv;59][mqw;59][cyB; 59][rui;59][lst;59][mwy;59][1 kB;59][myi;59][lzB;59][lik;59][lhB;59][lxh;59][lxk;59][psy;59][pC g;59][myB;59][nsw;59][dng;59][sui;59][oqB;59][qtw;59][nsu;59][suw;59][qvj;59][qvC;59][uxg; 59][uyj;59][dgw;59][nou;59][ouB;59][dxy;59][qsi;59][fqw;59][dqs;59][elo;59][twy;59][vyj;59][euy;59][nCg;59][pqs;59][swB;59][clh;59][pqx;59][pvy;59][clk;59][lnt;59][qwC;59][lnp;59][lmt; 59][suB;59][wCy;59][elm;59][qrv;59][fry;59][lxA;59][cgi;59][duB;59][cqu;59][nty;59][pui;59][1 or;59][eyg;59][dry;59][lpj;59][flm;59][clA;59][npC;59][npu;59][lpt;59][nri;59][vwg;59][xCg;59][lAB;59][wyz;59][muB;59][owy;59][cxy;59][lms;59][lrz;59][nvi;59][dnw;59][syB;59][pxy;59][dsg;59][muy;59][dqu;59][ruC;59][qvy;59][cwy;59][ltj;59][ogw;59][ewy;59][dnC;57][cqs;57][m vy;57][cqB;57][mxy;57][fnw;57][dnv;57][wyk;57][vCy;57][lmp;57][nux;57][lrh;57][lrk;57][ryj; 57][eqv;57][oyB;57][dui;57][oui;57][oyi;57][eug;57][wyh;57][nsC;57][nCy;57][drg;57][dvi;57][nxC;57][lot;57][qsB;57][csy;57][tvy;57][flz;57][dvB;57][sCg;57][dCg;57][fxy;57][cuB;57][oqx; 57][cui;57][nyj;57][fwg;57][cvg;57][qtv;57][oqv;57][cqw;57][cqr;57][qwz;57][uCy;57][elz;57][nCi;57][mqu;57][far;57][oxy;57][dpy;57][wxg;57][dfy;57][wyA;57][dsi;57][cnu;57][dni;57][pu C;57][cqx;57][dwB;57][dgr;57][dqx;57][dwi;57][cry;57][lsj;57][mqg;57][flh;57][lpr;57][noC;57][twg;57][mnq;57][rwB;57][nrB;57][vwC;57][fqg;57][lno;57][ngt;57][eny;57][suv;57][lrA;57][1 mn;57][ouC;57][flk;57][rsC;57][mui;57][equ;57][eqw;57][nvB;57][rwi;57][mwg;57][tyg;57][ev y;57][nxg;56][dvC;56][pCB;56][eyi;56][nqC;56][ngy;56][mrg;56][mry;56][qwk;56][nuj;56][uxB ;56][cuC;56][doy;56][pCi;56][dnr;56][vxC;56][fvg;56][lmo;56][fuy;56][qrC;56][dns;56][lnj;56][fsy;56][lmj;56][oCg;56][cnC;56][quC;56][fnv;56][dsC;56][elh;56][nrw;56][xyj;56][mnu;56][pw g;56][rxg;56][dpg;56][Cyg;56][sCi;56][ntw;56][dpq;56][elk;56][flA;56][mgr;56][duC;56][txy;56][owg;56][quj;56][uxC;56][mvg;56][pvg;56][qrj;56][rvg;56][ery;56][mqx;56][qtx;56][elA;56][cv C;56][fnC;56][rxC;56][cpq;56][fnu;56][mqB;56][fwi;56][nwj;56][qwA;56][nvw;56][dog;56][nsv ;56][rCy;56][cvi;56][enu;56][enq;56][xCi;56][sxC;56][rwC;56][fgi;56][vwi;56][uxi;56][fug;56][eqr;56][lop;56][cCg;56][ovy;56][wCj;56][vxg;56][dnB;56][dxg;56][fwB;56][eyB;56][vwB;56][c dy;56][qwh;56][mqi;56][fqB;56][dfn;56][muC;56][dsB;56][eui;56][euB;56][los;56][nCB;56][loj; 56][dsw;56][dsu;56][dCi;56][exy;56][dsv;56][ltz;56][pry;56][mnw;56][pqr;56][dfg;56][uyz;56][nqj;56][vCj;56][qry;56][dwC;56][qyg;56][ntv;56][ntu;56][dyj;56][dCB;56][qvz;56][uCj;56][nrx; 56][qxy;56][duv;56][quy;56][sCB;56][cng;56][vyz;56][lpz;56][psC;56][xCB;56][svg;56][mwi;56][frg;56][crg;56][mvC;56][fqs;56][rsg;56][rty;56][mwB;56][cpy;56][ory;56][egg;56][drB;56][d ri;56][fnr;56][cvB;56][ogs;56][qtg;56][tuy;56][doq;56][lpk;56][dnx;56][qvk;56][wxi;56][nxi;56][uyk;56][uwj;56][lph;56][wxC;56][twB;56][msy;56][vyh;56][pgj;56][lsk;56][rsu;56][nyz;56][qrt ;56][dmy;56][tug;56][fvB;56][cxg;56][qxC;56][fvC;56][lsh;56][mqs;56][cwg;56][lsz;56][dno;56][mwC;56][fng;56][tyB;56][csC;56][lth;56][ltk;56][uvw;56][vyk;56][xCy;56][nwx;56][mvB;56][uyh;56][pvC;56][ewg;56][mrB;56][mnC;56][qxj;56][npg;56][psu;56][pyj;56][fqx;56][fqu;56][dt y;56][nrs;56][fpy;56][ntC;56][cnv;56][psg;55][tyi;55][mnr;55][eqx;55][uyA;55][mnv;55][sCy;55][fpq;55][CyB;55][csu;55][csg;55][ltA;55][cuv;55][pwB;55][egi;55][pvB;55][qvA;55][ruw;55][q vh;55][qCg;55][euC;55][mvi;55][cni;55][epy;55][now;55][cfy;55][epq;55][mCg;55][owi;55][lsA ;55][cdg;55][esy;55][fuB;55][osy;55][pwi;55][rvC;55][mri;55][rvB;55][ogr;55][nrv;55][dpB;55][twi;55][dpi;55][vyA;55][twC;55][tvC;55][Cyi;55][pwC;55][qsC;55][owB;55][lpA;55][fvi;55][p xg;55][cCi;55][wgi;55][oCB;55][wxB;55][oCi;55][ryz;55][cdq;55][dfq;55][nyk;55][nyh;55][dnp ;55][dey;55][erg;55][dnt;55][pvi;55][pqC;55][ryk;55][nxB;55][fwC;55][qyB;55][nCj;55][cCB;55][pqt;55][egs;55][enw;55][rxi;55][rxB;55][doi;55][dqt;55][drC;55][rvi;55][muw;55][tvg;55][dfi ;55][cnx;55][puw;55][mpq;55][msw;55][qyi;55][eqB;55][qtB;55][dmg;55][xyz;55][duw;55][qtu; 55][fni;55][svw;55][mxg;55][osu;55][svi;55][cri;55][nvx;55][nuz;55][owC;55][euv;55][doB;55][dtg;55][foy;55][ryh;55][frB;55][dmq;55][lmz;55][dfB;55][cdn;55][rsi;55][wgj;55][uvj;55][nyA;55][dxi;55][wiB;55][dqy;54][ryA;54][tuB;54][lmk;54][lmh;54][mrC;54][ugj;54][qsy;54][rCj;54][l oz;54][arz;54][lnz;54][dru;54][cnB;54][vxB;54][vxi;54][quz;54][rsw;54][fCg;54][ati;54][coq;54 ][nwz;54][sty;54][rsB;54][dqj;54][muv;54][npi;54][fsw;54][nvj;54][ygi;54][fuC;54][ouw;54][dx B;54][fui;54][cwi;54][svB;54][ovC;54][prg;54][osC;54][nuk;54][opq;54][pxC;54][nrt;54][fri;54][ugi;54][csi;54][pty;54][dxC;54][crB;54][tuC;54][dnj;54]

[0355] The percent of host bacterial strains (as classified by MLST) that are infected by two phages of a phage combination are provided below. This trait is referred to as “at least 2 phage % coverage”. The phage combinations are ordered in descending performance grade.

[0356] [lwy;39][dly;38][luw;38][lry;38][lvw;37][quy;37][lqw;37][dlw;37][lqy;37][clw;37][lrw;37][lvy;37][dlv;37][lCy;36][qry;36][lnw;36][luy;36][dlr;36][lgr;36][dqy;36][qwy;36][lwC;36][dlq ;36][clv;36][duw;36][luC;36][lrv;36][lqu;36][luv;36][lpr;35][dlu;35][dln;35][dlp;35][lrC;35][wC y;35][lpv;35][lqC;35][clr;35][lqv;35][lnr;35][qxy;35][rwy;35][lnu;35][lru;35][clu;35][lpy;35][lw x;35][uCy;35][cdl;35][dlC;35][lnv;34][lpw;34][uwy;34][qvy;34][nvw;34][uvw;34][quw;34][lvC; 34][lpu;34][lxy;34][ngy;34][ruw;34][lmu;34][dgw;34][dwy;34][lny;34][cly;34][nrw;34][vCy;34][rCy;34][lsy;33][lmr;33][lnp;33][pwy;33][dvy;33][duy;33][lnC;33][dlx;33][clp;33][vwy;33][rwC ;33][lpq;33][lsw;32][dlm;32][xCy;32][cln;32][qsy;32][muw;32][puw;32][qrw;32][lvx;32][lux;32][dry;32][rvC;32][clx;32][ouw;32][uwC;32][vwC;32][dqv;32][dqu;32][lnx;32][low;32][duv;32][quC;32][qvw;32][wxy;32][lmv;32][ely;32][lmn;32][nuw;32][clq;32][lnq;32][dls;32][pwC;31][ln o;31][lmw;31][rvy;31][qwC;31][dlo;31][cuv;31][dru;31][elw;31][lps;31][qwx;31][dny;31][nwx; 31][elr;31][dgr;31][qrv;31][dpy;31][clC;31][nrv;31][lsu;31][nCy;31][lrs;31][pqw;31][lrx;31][lqx ;31][pry;31][sCy;31][ltw;31][cls;31][lmy;31][lmq;31][dnw;31][dwC;31][pqC;31][lpC;31][mwy; 31][wxC;30][rsw;30][fln;30][clo;30][cqw;30][dsw;30][clm;30][lns;30][dmy;30][cel;30][owC;30][dpq;30][lxC;30][dnv;30][drC;30][dnu;30][flw;30][cnu;30][flu;30][muy;30][cwy;30][loy;30][elu ;30][puy;30][qyg;30][lng;30][lpx;30][quv;30][lmC;30][qyB;30][elv;30][qyi;30][cuy;30][fr;30][q ru;30][del;30][ruy;30][lou;30][lnB;30][dvC;30][lsC;30][cqu;30][cnv;30][oqw;30][nuy;30][ruC;30][lms;30][owy;30][lgs;30][cdq;30][qvC;30][cry;30][fly;30][duC;30][nqC;30][muv;30][dxy;30][nqu;30][pqr;30][dnr;30][cdy;30][qrC;30][lov;30][vwB;28][dsu;28][puC;28][fuy;28][elq;28][cfl;28][dqx;28][lni;28][mry;28][uxy;28][lor;28][nvx;28][pqu;28][dfl;28][eln;28][ltu;28][elp;28][lsv;28][suw;28][dnq;28][vwg;28][lrt;28][qxC;28][lop;28][qux;28][vwi;28][dwg;28][doq;28][nru;28][f lp;28][dnx;28][svw;28][lnt;28][lmp;28][uvC;28][pvC;28][pvy;28][dnp;28][dwi;28][cdn;28][dwB ;28][qsC;28][cwg;28][dey;28][cpy;28][flv;28][uvy;28][nwy;28][nuC;28][nry;28][loq;28][cwi;28][cuC;28][uxC;28][rwg;28][lpt;28][flq;28][dug;28][rwB;28][dnC;28][lmx;28][mvy;28][now;28][c ny;28][dlt;28][cvC;28][pwg;28][dmq;28][Cyg;28][pwB;28][pqv;28][csu;28][vxy;28][uwg;28][ds y;28][CyB;28][Cyi;28][fwy;28][doy;28][ltv;28][loC;28][nrC;28][cqr;28][mqu;28][mwC;28][duB ;28][rwi;28][tuy;28][dxC;28][nuv;28][ewy;28][fwC;28][nux;28][dui;28][mnw;27][qtu;27][flm;27][lmo;27][uwi;27][elx;27][rxy;27][cvy;27][los;27][coq;27][npu;27][dfy;27][nwC;27][fqu;27][df q;27][mqw;27][uwB;27][euy;27][dqs;27][ogr;27][elm;27][els;27][pxy;27][pwi;27][drg;26][cxy;26][qCg;26][ngr;26][mnu;26][eqw;26][elC;26][nrx;26][cdg;26][nsy;26][twy;26][fqw;26][ery;26][mrC;26][nsw;26][nvy;26][nqw;26][drB;26][cpq;26][qsu;26][clt;26][muC;26][dns;26][dri;26][lty; 26][evy;26][lox;26][dty;26][lsx;26][oqu;26][dlB;26][lwB;26][nxy;26][nxC;26][cqv;26][equ;26][rsu;26][dsC;26][cqx;26][fpy;26][suy;26][pxC;26][cnq;26][fnu;26][ouC;26][wxB;26][ovy;25][cn x;25][rvg;25][swC;25][rvB;25][dli;25][enw;25][opq;25][rvi;25][prg;25][ovC;25][lnz;25][mgr;25][euv;25][cnC;25][psu;25][flC;25][dsv;25][fnw;25][lwi;25][epy;25][msw;25][npy;25][eny;25][in j;25][fuC;25][cfy;25][lwg;25][twC;25][msy;25][dlg;25][swy;25][vxC;25][wxg;25][uwj;25][nvC; 25][suC;25][crB;25][wxi;25][lrB;25][enu;25][fry;25][tuC;25][crg;25][rxC;25][mxy;25][qvx;25][ory;25][nsu;25][fvy;25][lwj;25][csy;25][elo;25][dpg;24][lmt;24][lrj;24][nqv;24][rui;24][pqx;24][dpB;24][dqt;24][fls;24][mnr;24][qrx;24][dno;24][lrg;24][dfn;24][euC;24][cuB;24][egr;24][dvB;24][dlj;24][dvg;24][dxB;24][mpq;24][flo;24][rug;24][nrs;24][mvC;24][mnv;24][oqv;24][lug;24][psC;24][suv;24][rsC;24][fnr;24][dCg;24][nsC;24][cui;24][dpi;24][qsw;24][pty;24][lpj;24][lpB;24][dvi;24][dCi;24][dCB;24][ouy;24][exy;24][csC;24][ruB;24][lri;24][rty;24][qtw;24][cri;24][qrs; 24][ngs;24][dxg;24][cug;24][fpq;24][luB;24][mny;24][npC;23][flx;23][lwA;23][fvC;23][rsy;23][enq;23][ltx;23][ngx;23][lwh;23][luj;23][lwz;23][dlz;23][lrA;23][cqs;23][lrh;23][lrk;23][npq;23][mnq;23][epq;23][dyi;23][cyB;23][fny;23][lpg;23][lrz;23][cyg;23][efl;23][mqv;23][dyg;23][lui;23][mnC;23][lwk;23][dyB;23][dxi;23][psy;23][dlh;23][lyj;23][dmg;23][dyj;23][fnv;23][pqs;23][d nB;23][fnC;23][mwg;23][dlk;23][eqv;23][lpk;23][lpA;23][lph;23][uyg;23][lyB;23][lpz;23][uxi;23][dqg;23][uxg;23][esy;23][dlA;23][ltC;23][sxy;23][clg;23][cvB;23][lpi;23][uxB;23][mqx;23][c yi;23][noy;23][cvg;23][fqr;23][lgt;23][oxy;22][vxB;22][cCg;22][clB;22][lyi;22][lvB;22][mwB;22][ntu;22][nsv;22][ewg;22][ntw;22][cli;22][lyg;22][rxB;22][cCB;22][uyi;22][luA;22][fsw;22][qu g;22][mqs;22][lot;22][uyB;22][tvy;22][fnq;22][lvj;22][uCg;22][eqx;22][qrt;22][dqB;22][nou;22][dgi;22][dng;22][dnt;22][lst;22][luk;22][rxi;22][rxg;22][cCi;22][lyz;22][lyk;22][uvg;22][lyh;22][lCB;22][pvg;22][wCg;22][fqv;22][wyg;22][pvB;22][uCi;22][svC;22][cqg;22][nwB;22][lyA;22][vxg;22][luh;22][lvg;22][luz;22][vxi;22][pvi;22][cvi;22][wyB;22][mwi;22][wCB;22][uCB;22][uv i;22][tvC;22][dni;22][wyi;22][pui;22][wCi;22][fqx;22][pug;22][lmj;21][lvA;21][cqB;21][puB;21][quB;21][uvB;21][nty;21][lmg;21][pqt;21][egs;21][cng;21][lCg;21][nug;21][nwg;21][dgj;21][fx y;21][lvi;21][nuB;21][lCi;21][lmB;21][qui;21][svy;21][npg;21][clj;21][sxC;21][noC;21][elt;21][noq;21][lvz;21][lvk;21][lvh;21][lxg;21][qtv;21][qsv;21][foy;21][uyA;21][cnB;21][nwi;21][lxB;21][txy;21][nrt;21][oqx;21][uyj;21][cgi;21][qsx;21][pxg;21][cxg;21][uvj;21][nrB;21][rCg;20][lqB ;20][nyB;20][lmz;20][erg;20][nui;20][lsg;20][lCj;20][lxi;20][lmk;20][clA;20][lmh;20][lmi;20][u yz;20][nvB;20][owB;20][clk;20][clh;20][qwg;20][uyh;20][npi;20][owg;20][rCB;20][clz;20][cni; 20][wCj;20][uyk;20][nrg;20][lag;20][lij;19][eug;19][xCB;19][wyj;19][awB;19][nat;19][eyg;19][qwi;19][nyg;19][ryB;19][lgi;19][ryg;19][ntC;19][lsB;19][rCi;19][uCj;19][eyB;19][owi;19][nCB ;19][nvg;19][osy;19][fui;19][egg;19][mCg;19][xCg;19][wyk;19][wyA;19][flt;19][lCk;19][ryi;19][fsy;19][nyi;19][wyh;19][euB;19][nCg;19][elB;19][lCz;19][fwg;19][lCA;19][eyi;19][lgh;19][nri; 19][wyz;19][quj;19][lCh;19][pCg;19][pCB;19][pyB;18][lgk;18][pCi;18][loB;18][pyg;18][nxg;18][lxA;18][lqz;18][mui;18][lqA;18][fwB;18][eqB;18][elg;18][quz;18][nvi;18][nCi;18][xCi;18][fu g;18][qtx;18][nxB;18][nwj;18][lsj;18][fuB;18][eui;18][lsi;18][lxj;18][ryh;18][mug;18][myg;18][osu;18][egi;18][ryj;18][lxz;18][nqB;18][ryz;18][lxh;18][lxk;18][muB;18][mqg;18][dnj;18][ryA;18][ntv;18][fwi;18][loj;18][dfg;18][log;18][qrg;18][eli;18][rCj;18][vyB;18][mrg;18][vyg;18][xyB; 18][pyi;18][ryk;18][ngg;18][vyi;17][myB;17][fCg;17][sty;17][swg;17][xyg;17][swB;17][rsB;17][dfB;17][loi;17][elj;17][osC;17][qrB;17][vCg;17][doB;17]I[vCB;17][mri;17][rsg;17][mvg;17][oq s;17][nxi;17][dog;17][mrB;17][fqs;17][pyj;17][svB;17][vCi;17][mvi;17][gB;17][myi;17][doi;17][qri;17][svg;17][mvB;17][lsA;17][dfi;17][vyj;17][qwh;17][lsz;17][nwz;17][syg;17][loz;17][mxg ;17][dsB;17][ngi;17][mqB;17][xyi;17][vyA;17][qwj;17][syB;17][dsg;17][vyk;16][frg;16][gqwz;16][lsk;16][qxB;16][rsi;16][vyz;16][qxg;16][csg;16][nuj;16][tug;16][qwk;16][mi;16][gqwA;16][v yh;16][lsh;16][tuB;16][svi;16][elA;16][ugi;16][nyj;16][fri;16][vCj;16][frB;16][swi;16][xyj;16][n vj;16][pqg;16][fqg;16][elh;15][qvg;15][ygi;15][lgi;15][qrj;15][pqB;15][csi;15][elz;15][fyg;15][el k;15][qxi;15][dsi;15][flB;15][twg;15][qrz;15][oyg;15][twi;15][flg;15][oyB;15][twB;15][wgi;15][suB;15][syi;15][psg;15][dtg;15][tyi;15][nyk;15][fyB;15][sCB;15][pgi;15][qsg;15][fng;15][nuk;15][oyi;15][fvg;15][fgB;15][nyz;15][qvB;15][nyh;15][sug;15][sCg;15][nuz;15][tyB;15][nCj;15][s ui;15][flj;15][tyg;15][nyA;15][oui;14][qsB;14][ngj;14][fvi;14][oug;14][qvi;14][xyz;14][fgi;14][f vB;14][fli;14][fyi;14][liB;14][tvg;14][qxj;14][wiB;14][oCg;14][oCB;14][ouB;14][ltB;14][pgj;14][ltg;13][qvj;13][qvA;13][qvh;13][lti;13][sCi;13][flA;13][fni;13][oCi;13][flz;12][qvk;12][qsi;12][qvz;12][qtg;12][flk;12][flh;12][qtB;12][ltj;12][qti;12][ogg;11][oqB;11][ltz;10][oi;10][ltk;10][lt A;10][lth;10][wgj;9][lgj;9][lij;9][ugj;8][ljB;8][lzB;6][lgz;6][lgk;6][lkB;6][lhB;6][lAB;6][lgh;5][l gA;5][liz;5][lik;5][lih;4][liA;4]

[0357] The percent of host bacterial strains (as classified by MLST) that are infected by three phages of a phage combination are provided below. This trait is referred to as “at least 3 phage % coverage”. The phage combinations are ordered in descending performance grade.

[0358] [ruw;20][duw;20][dru;20][dwC;19][puw;18][cwy;18][uvw;18][lpw;18][cdy;18][lrw;18][d lw;18][lpr;18][duC;17][clw;17][lru;17][duv;17][dqy;17][dwy;17][dlu;17][dlr;17][lrv;16][lvw;16][lqy;16][duy;16][cdl;16][drC;16][lmp;16][lnp;16][cuy;16][cqw;16][lmw;16][ruy;16][luw;16][cd q;16][dlp;16][lCy;15][dry;15][lwx;15][cuC;15][lpu;15][clr;15][dxC;15][quy;15][lrx;15][cry;15][dqu;15][clp;15][dlm;15][dgw;15][wCy;15][cuv;15][pwC;15][cpy;15][dnw;15][dln;15][lpx;15][ln w;15][dlC;15][uwC;15][cln;15][lpv;15][pry;15][uCy;15][uwy;15][rwC;15][lux;14][euC;14][clu; 14][uvy;14][elw;14][rwy;14][del;14][wxC;14][cvy;14][euv;14][dlx;14][lnr;14][cdn;14][dey;14][1 mn;14][lor;14][vwy;14][muw;14][qwy;14][pwy;14][clm;14][cly;14][lny;14][qwC;14][quC;14][e wy;14][ruC;14][dpy;14][cqr;14][lnu;14][rCy;14][qru;14][lpC;14][dlv;14][dvC;14][rvy;14][puy;14][clC;14][rxC;14][lop;14][luv;14][lmy;14][dly;14][enw;14][luy;14][cqu;14][vwC;14][lmr;14][mwC;14][lpy;14][dgr;14][pvy;13][elC;13][lnv;13][lqC;13][dmy;13][uxC;13][dxy;13][eln;13][ux y;13][dmq;13][qrC;13][lwC;13][qry;13][cxy;13][lvx;13][dnp;12][lmu;12][lmv;12][lwy;12][euy; 12][dnr;12][lnC;12][quw;12][lnx;12][lry;12][wxy;12][lnq;12][qrw;12][dnu;12][rxy;12][elp;12][d vy;12][dlq;12][eqw;12][puC;12][cvC;12][lmC;12][rsu;12][cpq;12][epy;12][low;12][dpq;12][vxC ;12][dnC;12][svw;12][ory;12][nuw;12][mqw;12][nrw;12][lmx;12][mwy;12][clv;12][muC;12][cel ;12][clx;12][ery;12][pqr;12][fuC;12][nru;12][cnC;12][lrC;12][muv;12][lov;12][pqw;12][elr;12][pxC;12][clq;12][suv;12][npu;12][mnw;12][qvy;12][uvC;12][npC;11][vxy;11][exy;11][nwx;11][c ny;11][xCy;11][nwC;11][nvw;11][elv;11][pvC;11][qux;11][elx;11][elm;11][nCy;11][cqv;11][px y;11][qrx;11][lns;11][muy;11][npy;11][qvw;11][pqu;11][rvC;11][lrs;11][vCy;11][evy;11][elu;11][mqu;11][mrC;11][luC;11][dqx;11][pqC;11][lmq;11][cnx;11][rsw;11][mpq;11][ngy;11][equ;11][lqu;11][flw;11][mry;11][flx;11][lsv;11][rsy;11][lpq;11][dnx;11][egr;11][qxC;11][nuv;11][fwC;11][ouy;11][flu;11][nrv;11][nwy;11][lxC;11][cfy;11][svy;11][cnu;11][lvy;11][mnr;11][mny;11][q uv;11][nux;11][mgr;11][nrx;11][mvC;11][cqx;11][dfl;10][qvC;10][mqv;10][enu;10][lno;10][ovy ;10][dfy;10][lou;10][cnq;10][lqw;10][loy;10][dqv;10][dsv;10][lgr;10][fqu;10][mnC;10][qwx;10][nqC;10][ely;10][ouw;10][qrv;10][qxy;10][lox;10][flp;10][suw;10][mnv;10][sx;10][fr;10][fuy;10][dny;10][eqv;10][dnv;10][epq;10][dsw;10][lmo;10][eqx;10][dlo;10][mvy;10][lps;10][lvC;10][nuy;10][fwy;10][dnq;10][dsu;10][psu;10][npq;10][fxy;10][cnv;10][lsu;10][flC;10][pqx;10][lxy;10][fry;10][lsw;10][suy;10][mnu;10][mxy;10][clo;10][pqv;10][osu;10][nqw;10][csy;10][doy;10][qvx;10][mnq;10][eny;10][dfq;9][dls;9][csu;9][cfl;9][fqr;9][elq;9][nry;9][qsy;9][mqx;9][osy;9][nv y;9][enq;9][flm;9][psy;9][owy;9][nvx;9][swy;9][los;9][elo;9][fvC;9][cls;9][lqx;9][nrC;9][fpy;9][nsv;9][dty;9][fqw;9][nuC;9][efl;9][lsy;9][loC;9][flv;9][dsy;9][rty;9][oxy;9][fly;8][lms;8][sCy;8][nqr;8][fvy;8][msw;8][nxC;8][fsw;8][nqu;8][csC;8][nxy;8][lqv;8][lrt;8][nrs;8][lty;8][fqx;8][tuy;8][nvC;8][dsC;8][sxy;8][rsC;8][esy;8][dlt;8][sty;8][fsy;8][qsv;8][pty;8][sxC;8][fpq;8][tuC;8][twy;8][fnw;8][now;8][twC;8][nou;8][swC;8][ngx;8][cqs;8][fqv;8][ltu;8][ltC;8][noy;8][owC;8][fln;8][e ls;8][qrs;8][dqt;8][ovC;8][svC;8][dno;8][tvy;8][lpt;8][nqv;8][dfn;7][ouC;7][qsw;7][flt;7][flq;7][n sw;7][ntw;7][lnt;7][lsC;7][suC;7][qsu;7][qrt;7][fls;7][loq;7][nsu;7][ogr;7][lgt;7][fnu;7][ntv;7][lqs ;7][ltw;7][clt;7][nrt;7][qsx;6][osC;6][qsC;6][lst;6][txy;6][dns;6][flo;6][msy;6][fqs;6][lty;6][ntu;6][egs;6][qtu;6][dnt;6][noC;6][psC;6][oqu;6][qtw;6][foy;6][oqv;6][ds;6][ltx;6][lmt;6][opq;6][fnr; 6][pqt;6][nsy;6][fnv;6][mqs;6][elt;6][coq;6][oqx;6][nty;6][ogs;6][fnC;6][tvC;6][doq;6][pqs;6][nt C;5][lot;5][atv;5][fny;5][noq;5][atx;5][oaw;5][nat;5][dCg;5][nsC;5][lyg;5][Cyg;5][cnB;5][cwg;5 ][lgB;5][lnB;5][fnq;5][dCB;5][ngs;5][qyg;5][lyB;5][qyB;5][CyB;5][nyB;4][qCg;4][nyg;4][ngg;4][wCB;4][nCB;4][lng;4][lmg;4][cdg;4][ygi;4][lmB;4][nxB;4][pyB;4][cCg;4][clB;4][nwg;4][lpB; 4][cCB;4][dyB;4][pyg;4][dyg;4][lpg;4][wCg;4][dwg;4][lqB;4][lqg;4][dwB;4][nCg;4][nwB;4][lC B;4][ewg;4][nqB;4][lCg;4][myB;4][myg;4][cng;4][lyi;4][lvg;4][lwg;4][qyi;4][lsB;4][lwB;4][dlg; 4][nxg;4][pqg;4][wiB;4][lmi;4][ryB;4][wxg;4][lrg;4][prg;4][lrB;4][mvg;4][pvg;4][vyg;4][wyB;4][ryg;4][mqg;4][wyg;4][mrg;4][lpi;4][cwi;4][pCB;4][clg;4][lvB;4][dlB;4][vyB;4][lxB;4][pvB;4][liB;4][npg;4][wgi;4][mug;4][mvB;4][mrB;4][dqB;4][dCi;4][dqg;4][Cyi;4][myi;4][dnB;4][cyB;4][sug;4][lgi;4][pyi;4][pqB;4][dng;4][cyg;4][cxg;4][mqB;4][pCg;4][mCg;4][wxB;4][rsB;3][nxi;3][pyj;3][mxg;3][crB;3][drB;3][qrj;3][rvg;3][vxB;3][rsg;3][fug;3][crg;3][mwB;3][svg;3][npi;3][dp B;3][wxi;3][pgj;3][cni;3][dmg;3][lnj;3][mvi;3][psg;3][pCi;3][vxg;3][pvi;3][uxB;3][dxg;3][eyB;3][rxB;3][mqi;3][csg;3][pwB;3][cCi;3][dxB;3][svB;3][pxg;3][rvB;3][mri;3][xCB;3][xCg;3][muB; 3][qrg;3][eyg;3][qrB;3][uyg;3][rCB;3][qvg;3][cqg;3][ruB;3][vCg;3][uvg;3][drg;3][pgi;3][oyg;3][nyi;3][cqB;3][pug;3][elg;3][dyi;3][lsg;3][rCg;3][lni;3][uxg;3][xyg;3][nwi;3][ljB;3][qvB;3][elB;3][ryi;3][ngi;3][log;3][vyi;3][syB;3][uyB;3][loB;3][puB;3][qwB;3][rwg;3][uvB;3][qwg;3][suB;3][wCi;3][nvB;3][mwg;3][dwi;3][lvi;3][luB;3][vCB;3][rxg;3][dpg;3][lCi;3][xyB;3][lgi;3][pwg;3][c ug;3][nvg;3][lxg;3][lug;3][rug;3][nrB;3][rwB;3][syg;3][nrg;3][lri;3][oyB;3][ryj;3][nCi;3][loi;3][1 xj;3][dfg;3][oug;3][ouB;3][lgj;3][qsg;3][sCB;3][qug;3][uyj;3][lrj;3][nug;3][vyj;3][dri;3][swB;3][cvB;3][ngj;3][uwB;3][xyi;3][rsi;3][quB;3][cri;3][frB;3][dgi;3][uvj;3][dug;3][dvg;3][dxi;3][uwg; 3][fvB;3][dfB;3][qwj;3][rCi;3][cyi;3][fyB;3][syi;3][clj;3][qri;3][uCg;3][ogg;3][eqB;3][qxg;3][svi ;3][erg;3][fuB;3][vwB;3][lmj;3][oCg;3][eug;3][oyi;3][fwB;3][fwg;3][nyj;3][lxi;3][ugi;3][swg;3][cuB;3][cvg;3][dvB;3][flB;3][cli;3][fvg;3][uyi;3][vxi;3][wyj;3][fCg;3][dni;3][lui;3][vCi;3][quj;3][lwi;3][dli;3][lsj;3][rwi;3][mui;3][oCB;3][uCB;3][flg;3][sCg;3][euB;3][dsB;3][qsB;3][qvj;3][eqg; 3][rui;3][lsi;3][rxi;3][rvi;3][frg;3][mwi;3][fyg;3][sui;3][oqB;3][qvi;3][xCi;3][nvi;3][qxB;3][dsg;3][lpj;3][wyi;3][nri;3][uxi;3][lyj;3][dpi;3][uvi;3][nuB;3][pui;3][duB;3][pwi;3][vwg;3][lgj;3][qxi;2][lCz;2][oCi;2][fvi;2][sCi;2][luz;2][luj;2][lwj;2][fui;2][qwi;2][eli;2][ltg;2][fri;2][csi;2][fli;2][dgj; 2][lnz;2][ugj;2][rCj;2][qrz;2][quz;2][nwz;2][nvj;2][dfi;2][qui;2][ltB;2][dtg;2][dlj;2][lwz;2][nuz;2][lvj;2][doB;2][xyz;2][wgj;2][lmz;2][lqz;2][nCj;2][lyz;2][qtB;2][lCj;2][lgz;2][ryz;2][dnj;2][uwi; 2][cgi;2][cvi;2][wyz;2][lrz;2][vwi;2][lzB;2][oqi;2][vyz;2][qtg;2][lpz;2][qsi;2][lxz;2][dyj;2][fyi;2][qvz;2][clz;2][fng;2][lij;2][swi;2][qxj;2][dog;2][fwi;2][dlz;2][nwj;2][xyj;2][dsi;2][qwz;2][owg;2][elz;2][twg;2][eyi;2][tyg;2][nuj;2][fqg;2][oui;2][dui;2][wCj;2][cui;2][fqB;2][loj;2][fiz;2][eui;2][d vi;2][tyB;2][uyz;2][twB;2][owB;2][nyz;2][nui;2][lsz;2][lvz;2][uCi;2][uwj;2][lwk;2][tug;2][lgk;2][lgA;2][clA;2][qwA;2][lxk;2][fgi;2][lik;2][ltj;2][tyi;2][lCk;2][tvg;2][qvk;2][lAB;2][flj;2][lwA;2][fik;2][elk;2][qti;2][nyk;2][wyA;2][twi;2][ryA;2][loz;2][qwk;2][lti;2][lrA;2][lmk;2][tuB;2][lsk;2][nuk;2][lrk;2][wyk;2][lkB;2][lA;2]1[doi;2][vyk;2][vCj;2][lyk;2][liz;2][nyA;2][uCj;2][eai;2][elj;2 ][ryk;2][lgk;2][owi;2][lvk;2][dlk;2][lyA;2][fni;2][lpA;2][lCA;2][luk;2][uyk;2][clk;2][dlA;2][ltz;2][liA;2][lpk;2][lxA;1][flA;1][vyA;1][qvA;1][lsA;1][uyA;1][ltA;1][ltk;1][luA;1][elA;1][lvA;1][lr h;1][lph;1][lhB;1][elh;1][nyh;1][lih;1][lyh;1][lxh;1][qvh;1][lgh;1][lvh;1][lwh;1][dlh;1][luh;1][uy h;1][lCh;1][qwh;1][clh;1][lmh;1][wyh;1][lth;1][flh;1][ryh;1][lgh;1][lsh;1][vyh;1]

[0359] 4 Phage Combinations

[0360] 4 phage combinations were analyzed in silico for their ability to lyse the 352 different strains of Klebsiella pneumoniae bacteria as classified by MLST, based on the ability of the single phage to lyse a bacteria of a particular capsule type as assessed by a liquid media assay.

[0361] The combinations that lyse the highest number of bacterial strains (as classified by MLST) are provided herein below. This trait is referred to as “at least 1 phage % coverage”. The number following each combination refers to the Percent trait performance—in this case the percent of bacteria strains as profiled by their capsule type that are targeted by the phage combination. The combinations are listed in descending performance grade.

[0362] [luyg;85][lwyg;85][lqwg;84][lvyg;84][lqvg;84][lqug;84][lxyg;83][luyi;83][luyB;83][lqxg ;83][flyg;83][lqwi;83][lwyi;83][lqvi;83][lqui;82][lqwB;82][lvyi;82][lwyB;82][lqvB;82][lquB;82][lryg;82][lgrg;82][luCg;82][lwCg;82][ltyg;82][luwg;82][lvyB;82][lgtg;82][lvCg;82][luvg;82][lqx i;82][lpyg;81][clyg;81][flgg;81][flyi;81][lqxB;81][lxyi;81][lpqg;81][dlyg;81][clqg;81][lxyB;81][1 ogg;81][flyB;81][dlqg;81][lryi;80][flqi;80][loyg;80][lmyg;80][lrug;80][lgri;80][lxCg;80][lgtB;79][luwi;79][clyi;79][lvCi;79][lryB;79][luvB;79][luxg;79][dlug;79][luvi;79][lqyg;79][luwB;79][lw Ci;79][flwg;79][lpqi;79][lygi;79][flqB;79][loug;79][luCB;79][luCi;79][lgrB;79][clug;79][lgsg;79][clqi;79][elyg;79][lgti;79][lpqB;79][lpug;79][lgsi;79][lpyi;79][clyB;79][flCg;79][ltCg;79][ltyB; 79][lrCg;79][ltyi;79][dlqi;79][lCyg;79][elqg;79][lvCB;79][lsug;79][flvg;79][logi;79][lsyg;79][cl qB;79][dlyi;79][flug;79][elug;79][lwCB;79][lqgi;78][dlyB;78][lygj;78][lswg;78][lmyi;78][lwxg; 78][lvwg;78][dlqB;78][lpCg;78][loqB;78][lpyB;78][lnyg;78][uvyg;78][lyiB;78][lrui;78][lsyi;78][loCg;78][lwgi;78][lmyB;78][lruB;78][lygz;78][dlwg;78][flwi;78][elyi;78][lrwg;78][lxCi;78][loy i;78][dlvg;78][clCg;78][lgsB;78][lmqg;78][ltug;78][dlCg;78][elqi;78][lygB;78][lqiB;78][lqyi;78][ltwg;78][lugi;78][lmug;78][lqCg;78][nwyg;78][lygh;78][cluB;77][lmwg;77][lsCg;77][lsui;77][1 ygA;77][lygk;77][lswi;77][lxCB;77][clui;77][ltvg;77][luxi;77][lqyB;77][lqgj;77][louB;77][loyB; 77][lugj;77][loui;77][dlui;77][flxg;77][flCi;77][lrxg;77][luxB;77][dluB;77][flvi;77][flwB;77][dfl g;77][elui;77][luiB;77][lngg;77][lvxg;77][elwg;77][lpwg;77][lmqi;77][dlxg;77][uvyB;77][lCyi;77][luvy;77][lqgh;77][nqwg;77][elqB;77][lwiB;77][lrCi;77][lqgB;77][elyB;77][flCB;77][lpui;77][lwgj;77][lpuB;77][lqgz;77][lugh;77][uwyg;77][lugz;77][flrg;77][ltxg;77][lsyB;77][flui;77][fluB; 77][luwy;77][lsuB;77][flvB;77][eluB;77][clvg;77][lugB;77][lowg;77][lyjB;77][lnyi;77][lnug;77][quvg;76][lnwg;76][lnuy;76][lagk;76][laCi;76][lrCB;76][lwyj;76][lsCi;76][lswB;76][lwxi;76][dl tg;76][lsvg;76][swyg;76][nvyg;76][lvwi;76][lwgh;76][nwyi;76][lrvg;76][lgjB;76][lwgz;76][linqi; 76][elvg;76][elCg;76][uvyi;76][lujB;76][lyih;76][lugk;76][ltCB;76][ltCi;76][luyj;76][lwgB;76][l vgi;76][lqgA;76][lugA;76][lqwj;76][clxg;76][lquw;76][lmqB;76][clCi;76][lpCi;76][ruyg;76][lCy B;76][lgsw;76][lquv;76][ltui;76][loCi;76][qswg;76][dlCi;76][lqCB;76][lmwi;76][lmuB;76][lmui; 76][dfli;76][ngwi;76][lpxg;76][ltuB;76][lnyB;76][lpCB;76][luxy;76][nqvg;76][clCB;76][nuyg;76][flwy;76][flxi;76][clwg;76][lvwB;76][lmvg;76][lwgA;76][lyiz;76][lyiA;76][elwi;76][lwxB;76][lwgk;76][lyij;76][dlwi;76][lswy;76][dlsg;76][lCgi;76][lrwi;76][dlvi;76][lmCg;76][dlrg;76][lqij; 75][lquj;75][lqvx;75][lqvj;75][lvxi;75][lqih;75][lrxi;75][lgiz;75][lqiA;75][lrwB;75][flxy;75][swy i;75][lgtx;75][lqux;75][dlwB;75][cluy;75][eluy;75][flxB;75][qswi;75][quvB;75][uwyB;75][dflB; 75][dlCB;75][lsvi;75][vwyg;75][dlog;75][dlvB;75][ouyg;75][nwyB;75][lsuy;75][lwjB;75][flri;75][lnqB;75][lyik;75][lsxg;75][lpvg;75][luih;75][loCB;75][lmwB;75][lmxg;75][lykB;75][lyzB;75][elxg;75][loxg;75][lnqu;75][lnqv;75][lnqw;75][lyhB;75][lnwy;75][cflg;75][flqw;75][lnui;75][lviB ;75][lvgj;75][ltwB;75][ltwi;75][lgsx;75][clvi;75][lqxj;75][lCgj;75][lsCB;75][delg;75][lowi;75][el vi;75][lpwi;75][cdlg;75][clxi;75][lgrx;75][clvB;75][ltvB;75][lgsv;75][eltg;75][ruyB;75][dluy;75][ltxy;75][nqwB;75][lovg;75][flpg;75][lgtw;75][clqu;75][louy;75][elwB;75][nqvi;75][lqwx;75][lq vw;75][elqu;75][lyAB;75][clrg;75][dlpg;75][quwg;75][lngx;75][cltg;75][lnvy;75][lnvg;75][elrg; 75][puyg;75][lnwi;75][lnCg;75][luvC;75][lgsu;75][lxyj;75][lgkB;75][nvyi;75][lrxB;75][flqv;75][lqzB;75][dlxi;75][flvy;75][nuvy;75][lgik;75][lCiB;75][dlgi;75][dlsi;75][frB;75][qvwg;75][nryg; 75][flqx;75][lruy;75][lrtg;75][quvi;75][lnuB;75][lvxB;75][ltvi;75][suyg;75][luij;75][luiz;75][elCi ;75][luiA;75][lukB;75][luzB;75][uwyi;75][svyg;75][luhB;75][lvgh;75][lvgz;75][lvgB;75][lwxy;75][lwih;75][lvyj;75][ltwy;74][lgru;74][lrxy;74][clwi;74][ruyi;74][wxyg;74][lsxy;74][lsxi;74][lgtv ;74][ltxi;74][qrug;74][rxyg;74][lswC;74][lsvB;74][clxB;74][qsvg;74][ltxB;74][nxyg;74][lmrg;74][lrvi;74][lCgB;74][lCgh;74][lwiz;74][lwij;74][qvxg;74][elqv;74][lxgi;74][swyB;74][lCgz;74][ef lg;74][rwyg;74][lwiA;74][flsg;74][lsvy;74][loqu;74][clsg;74][lmvi;74][uvCg;74][lpwB;74][lmCi ;74][luik;74][lowB;74][lqAB;74][clqv;74][lrgi;74][luAB;74][uxyg;74][lvwy;74][lvxy;74][lrsg;74][lghB;74][flog;74][fltg;74][lnxy;74][fluy;74][dlxB;74][nuyi;74][flny;74][dlgj;74][luwC;74][qsw B;74][lvgA;74][dlqu;74][lvgk;74][vxyg;74][lwhB;74][lmxi;74][clxy;74][lwik;74][dwyg;74][qrw g;74][lnwB;74][lxgj;74][dltB;74][dlri;74][pqvg;74][loqx;74][dlsB;74][pvyg;74][dlti;74][ltvy;74][clgi;74][fvyg;74][fwyg;74][dlmg;74][ouyB;74][lwyz;74][lpxi;74][dvyg;74][lgrw;74][qsvi;74][l mqw;74][lwCj;74][lwzB;74][lwkB;74][clwB;74][lpuy;74][svyi;74][clvy;74][quwB;74][lvjB;74][dliB;74][qrxg;74][flqu;74][elvB;74][lmvB;74][lmwy;74][lqwC;74][luyz;74][cfli;74][luCj;74][nq rg;74][clqx;74][elwy;74][lCgA;74][clpg;74][lpqx;74][nqvB;74][lpqu;74][pqug;74][ltuy;74][elqw ;74][elxi;74][rvyg;74][nuyB;74][lnxg;74][flyj;74][lorg;74][lrvB;74][nvyB;74][lCjB;74][elCB;74][cvyg;74][lsuC;74][nuwy;74][lmCB;74][lawy;74][lawz;74][lCgk;74][luCy;74][lriB;73][latu;73][lsuw;73][elri;73][clsi;73][lvCj;73][efli;73][lpxB;73][fqvg;73][cqvg;73][lgtj;73][lrgj;73][lnqs;73][clri;73][dlqv;73][nquv;73][luyh;73][dloi;73][lngt;73][lpqw;73][lxiB;73][lwAB;73][elqx;73][dln g;73][lptg;73][dlxy;73][flsi;73][lnCi;73][clgj;73][deli;73][lmtg;73][cflB;73][lquy;73][ouyi;73][lu xC;73][lquC;73][lmuy;73][lsvC;73][luwj;73][lvih;73][vwyB;73][vwyi;73][lmxy;73][suyi;73][luy k;73][nqug;73][lqvC;73][elvy;73][nwCg;73][dlgB;73][qvwi;73][ngxg;73][lsxC;73][flpi;73][dlqw ;73][flnq;73][celg;73][dlwy;73][cuyg;73][clog;73][dlgh;73][puyB;73][dlqx;73][lwyh;73][lmqx;73][qruB;73][qvwB;73][lqwk;73][nuC;73][flmg;73][lnrg;73][nryi;73][lwyk;73][lrsi;73][lnvi;73][1 pxy;73][lmxB;73][loxi;73][clyj;73][clmg;73][oqug;73][loqw;73][cdli;73][elpg;73][dlrB;73][lpvi; 73][lsxB;73][cliB;73][lwCy;73][duyg;73][dlgz;73][rsyg;73][lrwy;73][flgi;73][quwi;73][npyg;72][lnvC;72][dqvg;72][flqj;72][lnyj;72][flng;72][flry;72][ngri;72][dlgA;72][suyB;72][lvCy;72][dlgk ;72][uvCB;72][dfly;72][qwxg;72][svyB;72][suvy;72][eluC;72][dlvy;72][dlqs;72][lqvz;72][fliB;72][elxB;72][lqwh;72][lqwA;72][lqxC;72][lnty;72][lnwC;72][qvxi;72][flqr;72][lvxC;72][clny;72][lnqr;72][nuvg;72][nswy;72][uwCg;72][pwyg;72][lwyA;72][ngsw;72][flsy;72][luyA;72][lxCj;72][flqs;72][qwyg;72][lviz;72][lxgh;72][floi;72][flpB;72][lnry;72][dljB;72][puyi;72][lvij;72][lxgz; 72][nruy;72][ltxC;72][lxgB;72][lviA;72][clng;72][ltyj;72][lqxy;72][elxy;72][elti;72][clqw;72][cd 1B;72][elqt;72][clqt;72][lquz;72][dluC;72][qsvB;72][lryj;72][lrgz;72][lrgh;72][lrgB;72][lCij;72][1 ouC;72][lotg;72][lmri;72][muyg;72][nvCg;72][lCih;72][flvC;72][lovi;72][lpvB;72][nuwg;72][nx yi;72][lruC;72][lpwy;72][clnq;72][dlpi;72][flwC;72][dloB;72][clqs;72][clwy;72][pquB;72][clgj; 72][elog;72][wygi;72][pqwg;72][lmpg;72][loxB;72][loxy;72][qsug;72][lowy;72][lqvy;72][qvyg; 72][qrvg;72][qrui;72][lgrj;72][clrB;72][lprg;72][fryg;72][mqvg;72][lqxz;72][lpsg;72][clti;72][lqs t;72][cltB;72][cluC;72][lnpq;72][flsB;72][fltB;72][lstg;72][flti;72][flty;72][lrgk;72][owyg;72][lrg A;72][lrsB;72][lnoq;72][lmrB;72][nuCg;72][qvCg;72][nwyj;72][flxC;72][clgz;72][lrti;72][lrtB;72][clgB;72][dlny;72][nryB;72][vxyi;72][dlmi;72][lrvy;72][lmqv;72][uvCi;72][lxjB;72][lCiz;72][qvxB;72][flgj;72][lCiA;72][dlyj;72][elty;72][flqt;72][celi;72][dlsy;72][clgh;72][pqvi;72][mwyg; 72][lrsy;72][npqg;72][lvhB;72][pqvB;72][wygj;72]

[0363] The percent of host bacterial strains (as classified by MLST) that are infected by two phages of a phage combination are provided below. This trait is referred to as “at least 2 phage % coverage”. The phage combinations are ordered in descending performance grade.

[0364] [lqwy;49][lqvy;49][lnwy;48][dlwy;48][lwCy;47][lnuw;47][lvwy;47][lrwy;46][dlvy;46][lu wy;46][lnqw;46][dlny;46][dlqw;46][lqvw;46][lqxy;46][lquy;46][lvCy;46][lquw;45][lnwC;45][lq vC;45][lqwC;45][lnry;45][luwC;45][dlqv;45][lruy;45][lvwC;45][dlsy;45][lgrw;45][clwy;45][luC y;44][lpuy;44][lnvy;44][lnuC;44][luvy;44][lpwy;44][lswy;44][lnqr;44][lnuv;44][lwxy;44][dlnq;44][lgru;44][lxCy;44][lrvy;44][lgrv;44][dluy;44][lqwx;44][lquC;44][lnuy;44][lquv;44][clqw;44][l asw;44][lpaw;44][luxy;43][dlas;43][lvxy;43][dlxy;43][clvy;43][lpqu;43][lnqu;43][luvC;43][lnv C;43][lnxy;43][dlqu;43][dfly;43][lnpy;43][lgsu;43][lowy;43][lnqv;43][lqux;43][lsuw;43][lsuy;43][lruC;43][lrsy;42][clqv;42][lmuy;42][dlqx;42][lqxC;42][lswC;42][clny;42][lgrs;42][ltwy;42][lsu C;42][cluy;42][loqw;42][lgsv;42][flwy;42][flry;42][dluC;42][lpuC;42][cluC;42][lsuv;42][luxC;42][elwy;42][lwxC;42][lsvy;42][lmwy;42][dluv;42][lmqu;42][loqv;42][dlty;42][lqvx;42][lnpq;41][clvC;41][lgtw;41][clqu;41][louy;41][dlsu;41][loqu;41][lmqv;41][fluy;41][clnq;41][lrxy;41][lwy B;41][lmvy;41][clsy;41][flvy;41][lwyi;41][fluC;41][clqs;41][flqw;41][clxy;41][dlwB;41][dflq;41][lngx;41][lwyg;41][elqw;41][flqv;40][luwi;40][dlyB;40][lvxC;40][lgrx;40][luwg;40][louC;40][d lwi;40][lsvC;40][nquw;40][lmqw;40][clqx;40][dlwg;40][dlyj;40][ltwC;40][ltuy;40][ltuC;40][luw B;40][dlgt;39][flwC;39][lnsy;39][lpqx;39][nuwy;39][lwyj;39][cfly;39][lpxy;39][lnxC;39][eluy;39][ltvy;39][dlng;39][flny;39][lgtu;39][elvy;39][flqr;39][lqwg;39][lqwB;39][dlyi;39][dlyg;39][flq u;39][dlrB;39][dlvB;39][lgtv;39][lvwB;39][lsxy;39][lnug;39][lwyA;39][lqwi;39][lnwg;39][flnq; 39][lwyk;39][lwyh;39][dlni;39][lryB;39][lgrt;39][lnrg;39][lwyz;39][rwB;39][lnwB;39][lmxy;38][nvwy;38][flvC;38][lnuB;38][lryj;38][elqu;38][lrxC;38][lrwi;38][dlvg;38][lvwi;38][lwCB;38][l mny;38][dlrg;38][dlvi;38][clwg;38][lryi;38][flpy;38][lrwg;38][lnui;38][dlri;38][lvwg;38][luwj;38][elxy;38][lnwi;38][lryg;38][loxy;38][lwCg;38][eluC;38][dlui;38][flsy;38][luCB;38][lnyB;38][cl wi;38][clwB;38][qwyg;38][lqwh;38][dluB;38][lnvB;38][luCi;38][lnvg;38][lCyB;38][cdlg;38][dl ug;38][luCg;38][eluv;38][lnyg;38][ltvC;38][lqwj;38][lvyB;38][lwCi;38][flpq;37][dlqg;37][loqx; 37][lnyi;37][cdlB;37][clvg;37][lnCg;37][lqwA;37][lnty;37][lvyg;37][lgsx;37][cdli;37][lnvi;37][1 nCB;37][lqwz;37][lnoq;37][luyi;37][luyB;37][luvB;37][lqwk;37][lgrB;37][lqug;37][lwCj;37][lq yB;37][luyg;37][lrCB;37][luvg;37][dlpB;37][lCyg;37][dlqB;37][dlqj;37][lvyi;37][lqyg;37][quwg ;37][elqv;37][lngg;37][lvyj;37][lCyi;37][clrg;37][lgrg;37][lqyi;37][clui;37][uwyi;37][clrB;37][lq rj;37][flxy;37][lqCg;37][lrCg;37][lnqB;37][dlpg;37][clvB;37][luvi;37][clvi;37][luyj;37][lrCi;37][dlpi;37][wCyg;37][lrvB;37][lnCi;37][clri;37][rwyg;37][lnqs;37][lvyk;37][dlCB;37][luvj;37][flqs; 37][uwyg;37][lgri;37][clty;37][rwyi;37][lquB;37][lvyh;37][luCj;37][lqCB;37][rwyB;37][lqui;37][quwi;37][lvyz;37][dlqi;37][lruB;36][lquj;36][luyz;36][lvCB;36][lswg;36][uwyB;36][dlCi;36][dl Cg;36][dlsg;36][lnqi;36][lpvB;36][luyk;36][lrgB;36][lrvg;36][elqx;36][efly;36][elvC;36][lwgB;36][nquv;36][luyh;36][dgwg;36][lrug;36][lqCi;36][lmqx;36][nruy;36][cluB;36][luyA;36][lqvB;36][lqvg;36][quwB;36][clug;36][nuwg;36][lvCg;36][uwCg;36][lpyB;36][lprg;36][clqt;36][clng;36][lqvi;36][lpwB;36][lugB;36][floy;36][lxyi;36][dwyi;36][lquz;36][lxyg;36][dlsB;36][clyg;36][dw yB;36][dwyg;36][luxg;36][lquk;36][lpvg;36][sxC;36][vCi;36][dlgB;36][lqvj;36][lrui;36][lsyg;36][ltxy;36][lxyB;36][lswB;36][nqug;36][lrvi;36][nuvC;35][lpyi;35][clyB;35][lpwi;35][lqvz;35][l pyg;35][clyi;35][lvCj;35][nswy;35][lwxg;35][lqvk;35][duyg;35][lpvi;35][qrwg;35][dnyg;35][lpu g;35][dlxB;35][luxi;35][luxB;35][lpwg;35][dlsi;35][lpuB;35][dlxg;35][dlxi;35][flqx;35][lsyB;35][lpyj;35][lwxi;35][nuvy;35][lwxB;35][lswi;35][lxyj;35][lsyi;35][lrsg;35][lsuB;35][lnxg;35][rgi; 35][pwyg;35][dlmB;35][lgtx;35][lwgi;35][clpg;35][elyB;35][vwyg;35][nuyB;35][lvxg;35][duyB; 35][qvyg;35][lsug;35][lpui;35][ngsw;35][vCyg;35][clni;35][nuyg;35][clqg;35][lsty;35][lngt;35][grwi;35][qrwB;35][lmuB;35][vwyi;35][lvxB;35][lugi;35][vwyB;35][flng;35][nqui;35][dlmg;35][qvwg;34][lmrg;34][lpsg;34][lmui;34][clsB;34][dryg;34][clCg;34][lpqg;34][dvyg;34][ltwi;34][elr B;34][lxyz;34][elyg;34][lnxi;34][dlgi;34][clpi;34][ltwB;34][dvyB;34][dvyi;34][lvxi;34][lpqB;34][lsui;34][lrsB;34][clsg;34][lmrB;34][lmug;34][nuyi;34][dlmi;34][lnyj;34][clCB;34][qvwB;34][it wg;34][clCi;34][clxg;34][dloB;34][clsi;34][lwiB;34][lriB;34][clqB;34][lpgj;34][elug;34][qvwi;34][elty;34][lpqi;34][eluB;34][lowB;34][lvgB;34][flxC;34][lsCg;34][elyi;34][dqvg;34][lygB;34][e lrg;34][lpgi;34][clyj;34][clqi;34][elwB;34][nryB;34][delB;34][nuCg;34][luiB;33][elui;33][qwxg; 33][lqxg;33][nuvg;33][flwg;33][lowi;33][lmri;33][lsCB;33][delg;33][dliB;33][lmwB;33][qrvg;33][ruCg;33][lmwg;33][lmvB;33][lpCB;33][nryg;33][lowg;33][dlog;33][uxyB;33][elwg;33][pqw g;33][lrxB;33][clxB;33][elri;33][lmvg;33][wxyg;33][flty;33][wxyi;33][flwB;33][lrxg;33][nouy;33][ltxC;33][clxi;33][lrsi;33][mwyg;33][dloi;33][uxyg;33][clgB;33][quxg;33][lgsg;33][cwyg;32][l mqg;32][lsCi;32][lmwi;32][deli;32][elwi;32][celg;32][lqxB;32][lpsi;32][nryi;32][quvg;32][lsvg; 32][lpCi;32][rvyg;32][nwyB;32][lrxi;32][dflg;32][elvB;32][flwi;32][lngj;32][elyj;32][fluB;32][lp Cg;32][dflB;32][rvyB;32][qrug;32][lgst;32][lqxi;32][uxyi;32][dfli;32][rvyi;32][lvgi;32][ngrg;32][lxCg;32][lmyB;32][lgsB;32][elqg;32][lmCg;32][nwyg;32][oqwg;32][flui;32][flug;32][elqB;32][lmyg;32][clgj;32][lmCB;32][lmqB;32][lxCB;32][lxCi;32][lygi;32][clgi;32][puyg;32][lmsg;32][el vg;32][lmvi;32][uvCg;32][lsvB;32][cuyg;32][clog;32][ruyg;32][qrui;31][lmqi;31][uvCB;31][flrg ;31][nwyi;31][elqt;31][cflB;31][muyg;31][puyi;31][lpxB;31][dxyg;31][clmi;31][wygB;31][loyB; 31][lqxh;31][louB;31][lqgB;31][qruB;31][pqug;31][ruyi;31][lmCi;31][cflg;31][lrtB;31][ltuB;31][lqxj;31][loug;31][nvyB;31][puyB;31][lCgB;31][nsvy;31][quvi;31][frB;31][dsyg;31][uvCi;31][l qsi;31][lpxg;31][celi;31][quvB;31][flqt;31][ruyB;31][nwCg;31][dltB;31][loqt;31][elvi;31][clmg; 31][ltug;31][lovB;31][dlti;31][cfli;31][owyg;31][lmyi;31][qvCg;31][nwCi;31][nqwg;31][flyg;31][qsug;31][loui;31][lqxz;31][lyiB;31][uvyg;31][lrtg;31][lrti;31][suvy;31][lxgB;31][elsg;31][lovg; 31][ngri;31][lqxA;31][elqi;31][lsvi;31][nqwB;31][lpxi;31][loyi;31][nvyg;31][fwyg;31][lviB;31][dltg;31][lqxk;31][vxyB;31][loyg;31][elpg;31][lgsj;31][lsxg;31][flyB;31][pquB;30][fwyB;30][lm xg;30][ixCj;30][flri;30][wygi;30][nvyi;30][vxyg;30][flyi;30][flvB;30][elpi;30][itui;30][isxB;30][suyB;30][fwyi;30][pqui;30][iwij;30][flyj;30][fqwg;30][uvyB;30][lovi;30][uvyi;30][flvg;30][swC g;30][rxyg;30][nqvB;30][mqwg;30][qgi;30][cliB;30][wgj;30][cltg;30][suyg;30][pvyg;30][Cgi; 30][flpB;30][nvCg;30][eiCB;30][lmxB;30][npyg;30][logg;30][flqg;30][lorg;30][elqj;30][flpg;30][clti;30][pvyB;30][mvyg;30][vxyi;30][lmpg;30][swyg;30][loCB;30][lxgi;30][swyB;30][nqvg;30][twyg;30][ngwi;30][loqB;30][nxyB;28][lori;28][pvyi;28][loqj;28][pxyg;28][rxyi;28][nwyj;28][cv yB;28][dliij;28][pvg;28][nxyg;28][itvB;28][lmxi;28][flvi;28][cltB;28][loCg;28][loCi;28][lsxi;28 ][elCg;28][cvyg;28][suyi;28][logi;28][flqB;28][lptg;28][pqvB;28][npqg;28][lCiB;28][lwjB;28][s wyi;28][nxyi;28][cqvg;28][elxg;28][ltvi;28][qswg;28][nqvi;28][ltvg;28][lrgj;28][wyiB;28][oqug; 28][dlgj;28][cvyi;28][elxB;28][flpi;28][flgj;28][flqi;28][elCi;28][lxiB;28][luij;28][qswB;28][qvx g;28][elxi;28][fnyg;28][qvxB;28][pqvi;28][lugj;28][cxyg;28][flCg;28][lqiB;28][loxg;28][loxB;28][qrsg;28][qtwg;28][flCB;28][lmog;28][qrxB;28][oqui;28][flsB;28][flCi;28][elgi;28][lrjB;28][it yB;28][ltyi;28][flsg;28][qrxg;28][ngxg;28][oquB;28][dljB;28][flmg;28][cqvi;28][loxi;28][lwzB; 27]

[0365] The percent of host bacterial strains (as classified by MLST) that are infected by three phages of a phage combination are provided below. This trait is referred to as “at least 3 phage % coverage”. The phage combinations are ordered in descending performance grade.

[0366] [dluv;28][dluy;28][lrwy;28][lquy;27][luwy;27][lquw;27][luCy;27][lrvy;27][lgrw;26][dlqu ;26][dlwy;26][dlqw;26][lpwy;26][dluC;26][lvwy;26][lwCy;26][dlvy;26][lgrv;25][lqwy;25][lwxy ;25][lquC;25][luwC;25][clqu;25][lruC;25][lvwC;25][cluy;25][lqvw;25][clwy;25][dlqv;25][lruy;24][lquv;24][dlxy;24][lgru;24][clqw;24][lvCy;24][lmwy;24][lqwC;24][luvy;24][lwxC;24][lrxy;24][luvC;24][lpqw;24][cluC;23][lmqw;23][lpxy;23][lnuy;23][elwy;23][lqwx;23][lpuC;23][clvy;23][clvC;23][lmuy;23][lpuy;23][dlny;23][lnuw;23][eluy;23][lmvy;23][dlsu;23][luxy;23][lxCy;23][1 owy;23][nuwy;23][lqvy;23][lpqu;23][eluv;23][lnqu;23][elvy;23][lsuw;23][clxy;23][nvwy;23][cl qv;22][lrxC;22][dlqx;22][nruy;22][lnsy;22][lnry;22][lvxy;22][lqxy;22][elqu;22][lmqu;22][lnuC;22][fluy;22][flqu;22][lmny;22][lnuv;22][lqvC;22][elqw;22][dlnq;22][luxC;22][clny;22][loqw;22][flwy;22][elqv;21][lngs;21][lnxC;21][lnvy;21][lgrx;21][lvxC;21][lnwy;21][lqux;21][nquw;21][flp y;21][nuvy;21][eluC;21][lmxy;21][lnqr;21][lqxC;21][dlsy;21][lswy;21][clqx;21][lnpy;21][lsuy;21][flqw;21][lnvC;21][lrsy;21][lnwC;21][lmqx;20][lpwg;20][clsy;20][lqvx;20][nuvC;20][flwC;20][elvC;20][lnqv;20][clnq;20][lnxy;20][lpwB;20][elxy;20][ltuy;19][lpwi;19][flpq;19][nquv;19][lp qx;19][flvy;19][dflq;19][cfly;19][lnpq;19][louC;19][cwyg;19][flry;19][lnqw;19][lswC;19][dfly;19][lmqv;19][lsuC;19][flqr;19][loqu;19][dlqs;19][louy;19][clwB;19][lgsu;19][lsxy;19][suvy;19][fl ny;19][lnoq;19][lrwg;19][lrwB;19][ltwy;19][dlug;18][dlwB;18][clwg;18][lrwi;18][lsuv;18][lvwg ;18][lngx;18][dluB;18][lgrs;18][nswy;18][dlwi;18][lsvy;18][lvwB;18][elqx;18][clwi;18][dlwg;18][lprg;18][lwxB;18][duyB;18][duyg;18][clty;18][lgsw;18][cuyg;18][dlrg;18][loxy;18][lsxC;18][1 vwi;18][lgtu;18][dlrB;18][dwyi;18][dwyg;18][efly;18][dwyB;18][lnwB;18][fluC;18][dlui;18][lw xg;18][lrvi;17][lwxi;17][lnwi;17][lnwg;17][lmwg;17][flnq;17][lmwB;17][clqs;17][dlpg;17][cdlB ;17][dlty;17][lrvg;17][lnty;17][dlpB;17][ltwC;17][clng;17][luwg;17][lrui;17][lruB;17][loqv;17][f lxC;17][lqyi;17][lrvB;17][lqyB;17][clni;17][flvC;17][lrug;17][dlri;17][flxy;17][lsvC;17][luwB;17][luwj;17][lqyg;17][dlni;17][dlxB;17][flqv;17][floy;17][dryg;17][luwi;17][cdli;17][clpg;17][nsv y;17][cdlg;17][clrB;17][flax;17][lnat;17][dlng;17][ltvy;17][dlpi;17][lmwi;17][uwyB;16][ltxy;16][dlCi;16][dgwg;16][vwyg;16][dCB;16][cvyg;16][dCg;16][dlmB;16][lrxB;16][lmpg;16][dlmg;16][lpxB;16][elty;16][lnuB;16][lCyg;16][vwyB;16][lgsx;16][lpug;16][nouy;16][lgrt;16][wCyg;16][ruyB;16][clug;16][uwyg;16][clmg;16][clpi;16][cluB;16][ruyg;16][lCyB;16][clrg;16][uwCg;16][lgtw;16][cvyB;16][lCyi;16][qwyg;16][dlxg;16][ruyi;16][lpui;16][lpuB;16][ltuC;16][clqt;16][cxy g;16][lori;16][elwB;16][lrxi;16][ngsw;16][vwyi;16][dlxi;16][pwyg;16][lnug;16][dlgt;16][lpxi;16][dxyg;16][clyB;16][dlvB;16][clyj;16][loqx;16][lnrg;16][lpxg;16][dlmi;16][lnxg;16][clri;16][lorg ;16][uwyi;16][cvyi;16][elwi;16][lrxg;16][dlvg;16][lgsv;16][elwg;16][nuwg;15][clmi;15][clyi;15][ruCg;15][lnxi;15][dlyg;15][lnyB;15][dlvi;15][rwyB;15][lnvB;15][ltvC;15][lpvB;15][luyB;15][d elg;15][dlyB;15][deli;15][c1CB;15][luyg;15][dvyg;15][ltxC;15][lnui;15][rwyg;15][clui;15][wxyg ;15][clyg;15][dvyB;15][lpvi;15][dlyi;15][flsy;15][delB;15][lpvg;15][elCi;15][quwB;15][lowB;15][quwg;15][elpg;15][dlqg;15][lsty;15][clvB;15][luyi;15][e1CB;15][puyg;15][lnvg;15][lowg;15][d lqi;15][rvyB;15][uvyg;15][clCg;15][clxg;15][cCi;15][qrug;15][dlqB;15][pCg;15][lpCB;15][elC g;15][lqCi;15][lqCB;15][clxB;15][puyi;15][lqCg;15][luxB;15][rvyg;15][lnyg;15][qrui;15][puyB; 15][wxyi;15][lnyi;15][uvyB;15][rwyi;15][qruB;15][lnCB;15][luyj;15][lnyj;15][elt;15][uvyi;15][dvyi;15][rvyi;15][lpCi;14][lowi;14][qrwg;14][luvj;14][lwCg;14][lnCg;14][clvg;14][lmrg;14][lnv i;14][luxi;14][qvwB;14][lxCB;14][luyA;14][qrwB;14][lnCi;14][lmyB;14][clxi;14][lwCi;14][luvi ;14][quwi;14][luxg;14][luvB;14][mqwg;14][lmyg;14][lmri;14][clqB;14][lpyj;14][lwCB;14][lvxB ;14][lpyB;14][qvyg;14][cqvg;14][elxB;14][lmug;14][luvg;14][qvwg;14][lmrB;14][lpyg;14][dlyj; 14][lgtv;14][pqwg;14][elpi;14][flty;14][qvwi;14][celg;14][lwyg;14][luyz;14][lmCB;14][lmCg;14][pvyg;14][elxg;14][lmui;14][clqi;14][qwxg;14][lryB;14][dqvg;14][lpyi;14][nwyi;14][lwyj;14][lr CB;14][mwyg;14][lrCg;14][lmyi;14][nwyg;14][cqvi;14][mxB;14][loqt;14][celi;14][elrB;14][qr wi;14][luCB;14][lmuB;14][lxCg;14][lwyB;14][lqug;14][lwyi;14][elrg;14][lryg;14][luyh;14][lqu B;14][luyk;14][clgj;14][nwyB;14][lvxg;14][vCyg;14][lvxi;14][clvi;14][clqg;14][pvyi;14][luCg;14][pvyB;14][lqui;13][luCi;13][lmxi;13][nwCi;13][elxi;13][lxCi;13][elvB;13][lwCj;13][uvCi;13][dnyg;13][qvCg;13][lmvB;13][lryi;13][uxyi;13][lngj;13][uxyg;13][lmvg;13][uvCB;13][pquB;13][lmxg;13][rxyg;13][lnqB;13][lgst;13][dloB;13][lryj;13][lgtx;13][muyg;13][dlog;13][elri;13][nwC g;13][lmvi;13][uvCg;13][lmCi;13][pqug;13][pqui;13][rxyi;13][flqs;13][uxyB;13][dlgj;13][lrCi;13][elvg;13][npyg;12][lovi;12][lwyz;12][dloi;12][lrsB;12][lwyh;12][qrxi;12][qrxB;12][lovB;12][1 wyA;12][lxCj;12][lwyk;12][clog;12][pxyg;12][qrxg;12][inqi;12][lmqg;12][lmqB;12][lquj;12][lo vg;12][eluB;12][elvi;12][luCj;12][lngg;12][elug;12][loyB;12][quxg;12][lmqi;12][vxyg;12][elui;12][lrsi;12][ouyi;12][nwyj;12][elyi;12][flpi;12][lsvB;12][vxyi;12][elyB;12][nqwg;12][lrsg;12][nu Cg;12][quvi;12][lvyj;12][ouyg;12][quvB;12][flxB;12][qrvg;12][loxB;12][ngwi;12][nuyg;12][flp g;12][nqwB;12][quvg;12][lswB;12][flpB;12][nuvg;12][owyg;12][flwB;12][loyg;12][lqwi;12][ely g;12][larg;12][lvyB;12][lawB;12][lxyB;12][vxyB;12][larB;12][flug;12][ouyB;12][lpB;12[[lpg ;12][elyj;12][flqt;12][nuyB;12][lvyg;12][nxyB;12][lqwg;12][flwg;12][lqxB;11][lsvg;11][svyB;11][elqi;11][lvCg;11][flxi;11][lvyi;11][mqvg;11][flri;11][lsvi;11][lquz;11][lxyg;11][dflB;11][loxg ;11][loug;11][lgri;11][lqwj;11][rsyi;11][flwi;11][pqxg;11][flCg;11][loyi;11][flxg;11][elqg;11][df lg;11][lvCB;11][loui;11][louB;11][mqvi;11][lpgj;11][lquk;11][flrg;11][flui;11][fluB;11][mqvB;11][lmog;11][elqB;11][flCB;11][lswg;11][lpqi;11][firB;11][dlsB;11][svyg;11][rsyg;11][flmg;11][svyi;11][nxyg;11][loxi;11][nuyi;11][loCg;11][clsg;11][ltyB;11][qvxi;11][flCi;11][elqj;11][elog;11][nvyB;11][lpsi;11][swyB;11][lvyz;11][loCB;11][mvyg;11][lvyk;11][lgrj;11][fwyg;11][lswi;11][fryg;11][lvyh;11][lpsg;11][lvCi;11][cflg;11][ltyg;11][lsyB;11][nvCg;11][fwyB;11][dlsg;11][lqx g;11][cflB;11][lxyj;11][nryB;11][qvxB;11][lxyi;11][pqvg;11][dsyg;11][qvxg;11][nryg;11][nxyi; 11][pqvi;11][pqvB;11][lvCj;11][nvyg;11][dfli;11][swyg;11][clsB;10][lqxi;10][flyB;10][lqwz;10][loCi;10][fqwg;10][lqwh;10][lqwA;10][suyg;10][ltui;10][npqg;10][lsuB;10][nryi;10][ltyi;10][fw yi;10][nvyi;10][lsug;10][lqwk;10][dlsi;10][flyg;10][ngxg;10][lsyg;10][lsxi;10][tvyg;10][swyi;10][lsxg;10][lsxB;10][psyg;10][flng;10][flvi;10][ltyj;10][dltg;10][suyB;10][ltCg;10][lxyz;10][ltug;10][lsui;10][lmsg;10][ngxi;10][ltCB;10][lgsB;10][flqB;10][lrti;10][lrtB;10][lsyi;10][flvB;10][flvg; 10][flqg;10][nqug;10][cfli;10][lrtg;10][lqxj;10][ltuB;10][lsCB;10][clsi;10][lqvB;10][lptg;10][lqv g;10][flyj;10][flyi;10][dltB;10][suyi;10][eflB;9][fvyg;9][lgtB;9][eflg;9][qswB;9][twyg;9][fqvi;9][cltB;9][fqvB;9][lgtg;9][dlti;9][nqui;9][fvyi;9][lsCg;9][ltvi;9][loqB;9][swCg;9][fvyB;9][lqvi;9][l qsg;9][lqvj;9][fqvg;9][lstg;9][ltxB;9][elsg;9][ngrg;9][ltvg;9][ltvB;9][logg;9][flqi;9][lqxA;9][ltCi; 9][qswg;9][lmtg;9][ltxi;9][ltwg;9][ltxg;9][qrsg;9][ltwB;9][nqvg;9][cltg;9][ngri;9][oqwg;9][flti;9][logi;9][fltB;9][lgsj;9][qsvB;9][qsvi;9][lsCi;9][fltg;9][qswi;9][efli;9][lqxz;9][lotg;9][lgti;9][nqvB ;9][lgtj;9][lqxh;9][qsvg;9][lgsi;9][lqxk;9][flgj;9][oquB;8][oqui;8][oqug;8][lqvk;8][floi;8][flsB;8][floB;8]

[0367] The percent of host bacterial strains (as profiled by MLST) that are infected by four phages of a phage combination are provided below. This trait is referred to as “at least 4 phage % coverage”. The phage combinations are ordered in descending performance grade.

[0368] [clwy;12][dlwy;11][lruy;11][lnpy;11][dluC;11][dluy;11][lnuw;11][cluy;11][lpuy;11][lpw y;11][clny;11][dluv;11][lnwy;10][lmny;10][lnwC;10][cluC;10][clqw;10][lrxC;10][lwCy;10][lm wy;10][lnuv;10][lruC;10][eluC;10][lwxC;10][dlqw;10][lpuC;10][luwy;10][dlqu;10][lrwy;10][lu wC;10][dlny;10][lquy;10][clnq;10][lnpq;10][lnry;9][lvwC;9][luvy;9][lmuy;9][clvy;9][lgru;9][lux C;9][eluv;9][lpqw;9][elvC;9][lvwy;9][suvy;9][luxy;9][dlnq;9][luCy;9][lqwy;9][elwy;9][lsuv;9][l nqw;9][lnuy;9][louy;9][fluC;9][dlxy;9][lpqu;9][lpxy;9][clqu;9][clxy;9][lrvy;9][lrxy;9][lnvy;9][lq wC;9][lmqw;9][lmxy;8][lgrw;8][clvC;8][lgrx;8][lxCy;8][lmqu;8][flxC;8][dlqx;8][lnxy;8][nruy;8][lqux;8][lqvy;8][eluy;8][dlvy;8][flwC;8][lvxC;8][lpqx;8][lwxy;8][elqw;8][lnqr;8][nuwy;8][lquC ;8][lmvy;8][lnuC;8][lvCy;8][lnvC;8][lnxC;8][nvwy;8][nuvy;8][lsvy;8][lxC;8][cfly;8][dfly;8][l mqv;8][lqxy;8][lngx;8][lnqu;8][lrsy;8][lvxy;8][elxy;8][luvC;8][clqx;8][lsuw;8][dlsu;8][lquw;8][f lxy;7][fluy;7][lqwx;7][lsuy;7][loxy;7][lnqv;7][lowy;7][elqu;7][lqvw;7][clqv;7][lmqx;7][nquw;7][elvy;7][dlty;7][clsy;7][elqx;7][flry;7][lqvC;6][flvC;6][clty;6][flwy;6][lswy;6][dflq;6][dlqv;6][dlq t;6][lgrv;6][lquv;6][lqvx;6][dlsy;6][flpy;6][nouy;6][nuvC;6][lnty;6][ltuC;6][louC;6][lgsv;6][clqt; 6][lgrs;6][lsxC;6][nquv;6][nsvy;6][clqs;6][ltwC;6][efly;6][flqu;6][lswC;6][flqr;6][flqx;6][lsvC;6][ltuy;6][lnsy;6][lsxy;6][elqv;6][flpq;5][lgrt;5][lsuC;5][lgsu;5][lsty;5][ltwy;5][loqu;5][flvy;5][flty; 5][ltvy;5][loqx;5][ltxC;5][flqw;5][lnoq;5][lgsw;5][dlqs;5][flny;5][lgsx;5][loqv;5][flsy;5][flqt;5][l txy;5][lgtu;5][flqv;5][flnq;5][nswy;5][lngt;5][lngs;5][lgtw;5][flqs;5][floy;5][lgtx;5][lygB;5][elty; 5][ltvC;5][elqt;4][lCyB;4][lnqB;4][lpyg;4][lqyB;4][loqw;4][lngg;4][lCyg;4][lmyB;4][lCgB;4][lm pg;4][lgst;4][lqyg;4][lqgB;4][lgtv;4][ngsw;4][lnyB;4][lmyg;4][lnyg;4][lpyB;4][pvyg;4][pvyB;4][npyg;4][lmvB;4][clwB;4][lwyg;4][lprg;4][wygB;4][lvyg;4][lpvB;4][lpqg;4][lmCg;4][lmvg;4][cl CB;4][lmCB;4][lpCB;4][lpvg;4][lvyB;4][lwCg;4][dlyg;4][dwyg;4][lrgB;4][lwyB;4][clyg;4][lryg; 4][lqCB;4][dlwB;4][cdlB;4][clwg;4][cwyg;4][dlCB;4][clgB;4][lygi;4][lwgB;4][clyB;4][lnCB;4][lpqB;4][lyiB;4][cdlg;4][dlgB;4][lnCg;4][wCyg;4][lmyi;4][dlyB;4][lmqg;4][nwCg;4][dlCg;4][lqC g;4][lsxB;4][npqg;4][lmrB;4][dlwg;4][clCg;4][lpyi;4][lpCg;4][lmrg;4][lpgi;4][mvyg;4][dwyB;4][lmqB;4][lvgB;4][lryB;4][lwCB;4][lrxB;3][nqvB;3][lmvi;3][nvyB;3][lpvi;3][lnwB;3][rsyg;3][clr g;3][rvyg;3][lmCi;3][lpwB;3][lrvB;3][lmxB;3][clmg;3][lrsg;3][pqvg;3][vxyg;3][lrgi;3][lCiB;3][d lrB;3][uxyg;3][dlng;3][dlpg;3][svyg;3][elwB;3][e1CB;3][clxB;3][celg;3][muyg;3][lmri;3][ruyB;3][lpxB;3][lriB;3][suyg;3][delg;3][lovg;3][puyB;3][rxyg;3][clpg;3][lsvB;3][nryg;3][dlmg;3][nqrg; 3][nwyB;3][puyg;3][lnvg;3][rwyg;3][lnrg;3][nqwB;3][lvxB;3][luyg;3][nqwg;3][pxyg;3][lnyi;3][1 ugB;3][dnyg;3][lpuB;3][lpwg;3][lmqi;3][pvyi;3][lpqi;3][uvyB;3][lCyi;3][lqyi;3][elyB;3][lgrB;3][nwyg;3][lsug;3][loyg;3][lryi;3][lmug;3][uxyB;3][lvgi;3][loqt;3][clsB;3][ruyg;3][lrug;3][delB;3][elyg;3][lpCi;3][elwg;3][lrwg;3][clqB;3][lsyg;3][luxB;3][luvB;3][lrxg;3][luxg;3][lovB;3][lruB;3][clrB;3][lvxg;3][loyB;3][dlpB;3][lmwg;3][lvCB;3][lrsB;3][pqvB;3][mwyg;3][nryB;3][dgwg;3][1 mog;3][dlmB;3][lsyB;3][lsuB;3][lnvB;3][lqiB;3][lqwB;3][lxyg;3][lqvB;3][lmuB;3][svyB;3][lpxg ;3][nqvg;3][lpug;3][lmwB;3][lmxg;3][clng;3][lqgi;3][lmsg;3][dlqB;3][elCg;3][uvyg;3][qvyg;3][l uyB;3][lrCg;3][lviB;3][lsxg;3][lqvg;3][lrwB;3][lpsg;3][mqvg;3][lqwg;3][lvyi;3][vxyB;3][lgrg;3][mqvB;3][lnqi;3][dlqg;3][vCyg;3][lnwg;3][lxyB;3][rwyB;3][lrCB;3][dryg;3][clqg;3][lsvg;3][nvy g;3][pwyg;3][lrvg;3][psyg;3][lCgi;3][qwyg;3][rvyB;3][luvg;3][lvCg;3][lxgB;3][dlrg;3][suyB;3][mqvi;3][cuyg;3][lpyj;3][mqwg;3][duyB;3][lgrj;3][qruB;3][qrxB;3][cxyg;3][nxyB;3][dlri;3][lmxi; 3][cvyB;3][nwCi;3][qrwg;3][lrjB;3][fvyg;3][clgi;3][oqvg;3][lpsi;3][ouyB;3][svyi;3][rvyi;3][clmi ;3][dwyi;3][cljB;3][ruCg;3][dvyg;3][fwyg;3][lpxi;3][dsyg;3][qvxB;3][ngxg;3][nryi;3][rxyi;3][dx yg;3][quxg;3][rwyi;3][nqug;3][suyi;3][vwyB;3][nuvg;3][uwCg;3][cflB;3][lnCi;3][flpB;3][puyi;3][nari;3][lnyj;3][lovi;3][uvCB;3][nvCg;3][elxB;3][pquB;3][lryj;3][asvB;3][wygi;3][pawg;3][lox B;3][qsug;3][dlpi;3][qrvg;3][fryg;3][qrwB;3][elrB;3][clri;3][fwyB;3][qrsg;3][dvyB;3][lrsi;3][cli B;3][duyg;3][pqvi;3][pqxg;3][lnvi;3][elpg;3][rsyi;3][uxyi;3][cdli;3][fvyB;3][lngj;3][clpi;3][eflB; 3][elsg;3][qvCg;3][flsB;3][wyiB;3][flmg;3][vxyi;3][dlmi;3][lxjB;3][swCg;3][lxiB;3][lrgj;3][lpgj; 3][dlsB;3][qrxg;3][lsvi;3][elqg;3][flvg;3][lrxi;3][lsCB;3][cflg;3][loxg;3][elxg;3][dlyi;3][flug;3][1 oCB;3][lmui;3][lvxi;3][lmwi;3][dlCi;3][flCg;3][nuyg;3][lrwi;3][dlsg;3][dlwi;3][lvwB;3][lwxB;3][elug;3][flxB;3][flpg;3][dlgi;3][loug;3][luCB;3][clug;3][lgsg;3][flwg;3][lnuB;3][nvyi;3][lwCi;3][luwB;3][flrB;3][clyi;3][luvi;3][ouyg;3][dlug;3][dlvB;3][vwyg;3][dflB;3][uwyB;3][quvB;3][lvCi; 3][loqB;3][lvwg;3][lwxg;3][flwB;3][lpui;3][flxg;3][lyjB;3][eluB;3][lnug;3][clvg;3][flvB;3][uwy g;3][fluB;3][flrg;3][lswg;3][lqgj;3][luxi;3][lxCB;3][cluB;3][dluB;3][lsui;3][dflg;3][lsCg;3][louB; 3][dlxg;3][loyi;3][elqB;3][lwiB;3][lygj;3][lgjB;3][swyg;3][quvg;3][lugi;3][lswB;3][lgsB;3][lqCi; 3][dlvg;3][elvg;3][lsyi;3][clCi;3][clxg;3][uvyi;3][loCg;3][lwgi;3][lrui;3][flCB;3][lrCi;3][nqvi;3][luiB;3][qrug;3][lqug;3][nxyg;3][luwg;3][clwi;3][ruyi;3][wxyg;3][lsxi;3][flsg;3][clsg;3][dlxB;3][l qxB;3][lxyi;3][uvCg;3][logg;3][elrg;3][flyB;3][qsvg;3][lorg;3][lxCg;3][luCg;3][nuyB;3][lqxg;3][luyi;3][lnxg;3][flyg;3][elvB;3][pqug;3][eflg;3][swyB;3][lxgi;3][qvxg;3][lwyi;3][lqvi;3][lquB;3][l rvi;3][lpwi;3][cvyg;3][clvB;3][lgri;3][dliB;3][lgtB;2][elCi;2][luCi;2][lygz;2][ngxi;2][lswi;2][dlqj ;2][qvwB;2][lCzB;2][elpi;2][lqwj;2][lwyj;2][pqui;2][wxyi;2][lwyz;2][qtwg;2][wygj;2][luyj;2][lpt g;2][lCgz;2][ltCB;2][oquB;2][lsCi;2][lvyz;2][floB;2][lvyj;2][dltB;2][lwgz;2][dltg;2][elui;2][clog; 2][nwyi;2][ltwg;2][qvxi;2][dlui;2][lvwi;2][luzB;2][lqui;2][lwxi;2][vwyi;2][qrxi;2][flvi;2][loqj;2][lnxi;2][flwi;2][fvyi;2][ltyg;2][quwB;2][cfli;2][flCi;2][luyz;2][lxgj;2][flqB;2][fwyi;2][lqwz;2][flui ;2][celi;2][cvyi;2][lori;2][nwyj;2][uvCi;2][lxyj;2][efli;2][loui;2][lCjB;2][lvzB;2][clui;2][lvjB;2][l uvj;2][twyg;2][lowg;2][elyi;2][lujB;2][lwgj;2][fnyg;2][fqvB;2][lxyz;2][qrwi;2][nqui;2][cqvg;2][l xCi;2][lwCj;2][lwzB;2][lqgz;2][clgz;2][lqwi;2][elxi;2][uwyi;2][lugz;2][fqvg;2][elvi;2][lyij;2][dlx i;2][swyi;2][lwjB;2][luwi;2][lqij;2][flyi;2][qrui;2][flsi;2][lugj;2][lrtg;2][cltB;2][nuCg;2][elog;2][f lri;2][qswB;2][lvgj;2][logi;2][ltwB;2][flog;2][clvi;2][lqxj;2][lCgj;2][flqg;2][lqvj;2][dloB;2][lquj; 2][nuwg;2][dlsi;2][lnwi;2][nxyi;2][qvwg;2][fqwg;2][quvi;2][cltg;2][lmtg;2][lrgz;2][quwg;2][dlo g;2][lqzB;2][lquz;2][flgz;2][clyj;2][lowB;2][oqug;2][clni;2][lnui;2][clgj;2][lvgz;2][dlgj;2][flng;2][loCi;2][lrtB;2][lgsj;2][dlvi;2][dlyj;2][flxi;2][lgtg;2][owyg;2][ouyi;2][clsi;2][dvyi;2][ltCg;2]

[0369] 5 Phage Combinations

[0370] 5 phage combinations were analyzed in silico for their ability to lyse the 352 different strains of Klebsiella pneumoniae bacteria as classified by MLST, based on the ability of the single phage to lyse a bacteria of a particular capsule type as assessed by a liquid media assay.

[0371] The combinations that lyse the highest number of bacterial strains (as classified by MLST) are provided herein below. This trait is referred to as “at least 1 phage % coverage”. The number following each combination refers to the Percent trait performance—in this case the percent of bacteria strains as profiled by their capsule type that are targeted by the phage combination. The combinations are listed in descending performance grade.

[0372] [luvyg;90][luwyg;89][lquvg;89][lquwg;88][luvyi;88][lruyg;88][luvyB;88][louyg;88][flwy g;88][luxyg;88][flvyg;88][lqvxg;88][lquvi;88][flxyg;88][fluyg;88][cluyg;88][lwxyg;88][flqvg;88][lquvB;88][lrxyg;87][lgtxg;87][lgrug;87][lqvwg;87][loqug;87][luvCg;87][lqwxg;87][lvwyg;87][lquxg;87][eluyg;87][flqwg;87][luygi;87][ltvyg;87][ltxyg;87][lgrxg;87][lsuyg;87][lpuyg;87][lwyg i;87][luwyi;87][lgtvg;87][luwyB;87][lvxyg;87][dluyg;87][lmuyg;86][flqug;86][lswyg;86][lgtwg; 86][luyiB;86][flqxg;86][clqug;86][lqwgi;86][lpqug;86][lgswg;86][lquwi;86][flqvi;86][lqvgi;86][l uygj;86][flwyi;86][lvygi;86][flvyi;86][lquwB;86][ltuyg;86][ltwyg;86][elqug;86][luxyB;86][lwyg j;86][lqvxi;86][lqviB;86][loqxg;86][lpxyg;86][lruyi;86][luwCg;86][clqvg;86][flxyi;86][lquyg;86][elwyg;86][flqvB;86][lgsug;86][elqvg;86][lqwiB;86][flqwi;86][luxyi;86][fivyB;86][dlqug;86][lr vyg;86][lwyiB;86][lgswi;86][lruyB;86][louyi;86][lpqxg;86][lgrwg;86][lqvyg;86][luygz;86][lnuy g;86][luCyg;86][lgsvg;86][luygB;86][lrwyg;86][clvyg;86][flryg;86][lsvyg;86][luygh;86][louyB; 86][lmwyg;86][flwyB;86][lqwyg;86][clxyg;86][lwCyg;85][lgrvg;85][dlqvg;85][cluyB;85][flqxi; 85][flqwB;85][lqvgj;85][lvyiB;85][lgtug;85][lpwyg;85][fluyB;85][elqwg;85][lgruB;85][lvCyg;85][luyjB;85][lgsxg;85][dlwyg;85][lquxi;85][lwxyi;85][lgrui;85][loqui;85][lsuyi;85][luygA;85][lu ygk;85][eluyi;85][loquB;85][lqwgj;85][lquxB;85][cluyi;85][lqxgi;85][dlvyg;85][lmxyg;85][fluyi ;85][lowyg;85][lqvwi;85][clqxg;85][lqugi;85][lwygB;85][lwygz;85][lqwCg;85][lqvxB;85][elvyg ;85][lmqwg;85][lqwxi;85][lmvyg;85][lswyi;85][flxyB;85][lgrxi;85][lxygi;85][loxyg;85][lvygj;85][loqwg;85][dlxyg;85][lnwyg;85][lqvCg;85][lpqwg;85][lgsvi;85][flqrg;85][lquiB;85][lwygh;85][lqxiB;85][lnvyg;85][lmqug;85][dlqxg;85][luxCg;85][dluyB;85][dluyi;85][lpvyg;85][elqvi;85][lru Cg;85][louCg;85][lgsxi;85][lgtxi;85][lquCg;85][lgtvi;85][elqxg;85][lrxyi;85][dlqwg;85][elxyg;85][lqwgh;85][clwyg;85][lqwgz;85][lmqxg;85][fltyg;85][loqvg;85][lgsui;85][clqvi;85][logtg;85][clqui;85][clquB;85][lqwgB;85][luvCB;85][lgtxB;85][elqui;85][luvCi;85][lsxyg;85][lmqvg;85][fl vCg;85][lpuyB;85][lpqui;85][lqxyg;85][lnqvg;85][lqvgz;85][lnqwg;85][lqvgh;85][flqxB;85][lpq uB;85][lwygA;85][lvxCg;85][lvwyi;85][flygi;85][lqvwB;85][dflyg;85][lwxyB;85][lwygk;85][lo vyg;85][lvxyi;85][lsuyB;85][lgrxB;85][lpqvg;85][flqui;85][lqugj;85][eluyB;85][lgtvB;85][lgswB ;85][floyg;85][lqwxB;85][lpuyi;85][lvygB;85][lvygz;85][lvygh;85][lsvyi;85][lqvgB;85][flquB;85][flpyg;85][lqwgk;84][luyih;84][lqvjB;84][lvxyB;84][lquyB;84][lnuyi;84][lquyi;84][lqvgk;84][f lqtg;84][lmwyi;84][lqugh;84][lqvgA;84][cflyg;84][ltuyB;84][lsuCg;84][dluCg;84][lotyg;84][lsu wg;84][lqxCg;84][lngxg;84][flryi;84][lqwjB;84][lpuCg;84][lrxCg;84][lqvyi;84][clqwg;84][clqxi; 84][lqxgj;84][clqvB;84][lqwyi;84][dlqui;84][dlquB;84][flyiB;84][lrygi;84][flsyg;84][lqwgA;84][lxygj;84][lrxyB;84][lxyiB;84][lxCyg;84][lwyjB;84][lgrwi;84][ltvCg;84][flqri;84][loqxi;84][lgtwi ;84][ltvyB;84][cluCg;84][lmuyi;84][ltxyB;84][elwyi;84][nuvyg;84][llmuyB;84][lrtyg;84][ltxCg;8 4][lgtwB;84][flwCg;84][lnxyg;84][lvygA;84][lwxCg;84][lvygk;84][flogg;84][lnqug;84][lqrtg;84][elqwi;84][ltxyi;84][lpqtg;84][flpqg;84][ltuyi;84][lswCg;84][lvwCg;84][lswyB;84][suvyg;84][lv wyB;84][lgsvB;84][lmqwi;84][lqujB;84][clvyi;84][lqugB;84][lgsuB;84][clxyi;84][lqugz;84][ltvy i;84][lpqxi;84][elquB;84][clqtg;84][luCyB;84][clvyB;84][lpqwi;84][luCyi;84][lqvCi;84][lgsxB;84][lpqxB;84][elvyi;84][eluCg;84][lgstg;84][dluvg;84][lqugk;84][flxCg;84][lmqvi;84][lruwg;84][clxyB;84][dlqtg;84][lnuyB;84][lgrgi;84][cltyg;84][lpxyi;84][lwyih;84][clqxB;84][luyzB;84][luv wg;84][loqxB;84][loqwi;84][lqxgz;84][lqxgB;84][lqrvi;84][flygj;84][lqxgh;84][fluvg;84][luyiA; 84][lmqxi;84][luyiz;84][luyij;84][firyB;84][lqwCi;84][lmwyB;84][lrsyg;84][dltyg;84][lnqvi;84][luykB;84][dlqvi;84][flnyg;84][eltyg;84][lvyjB;84][luwCB;84][ltwyi;84][ltwyB;84][lxygB;84][lq vyB;84][lptyg;84][lrvyi;84][lxygh;84][lmvyi;84][lqugA;84][lngwi;84][lsvCg;84][flqsg;84][lxygz ;84][ltwCg;84][lmqwB;84][lwCgi;84][lnwyi;84][lsuvg;84][flqrB;84][lrwyi;84][luwCi;84][lmxyi; 84][lsxyi;84][luyhB;84][lsvyB;84][elqvB;84][elqtg;84][fluCg;84][dflgg;84][lvCgi;84][lgtui;84][l oryg;84][lgtuB;84][lgrwB;84][eluvg;84][lqwyB;84][elqxi;84][ltygi;83][lmryg;83][clryg;83][loxC g;83][lrygj;83][flygB;83][luwgi;83][lgtyg;83][flvCi;83][eflyg;83][lqvij;83][lpwyi;83][lngxi;83][l oqvi;83][lgtgi;83][xygA;83][elwyB;83][lmqxB;83][lswCi;83][lqwCB;83][dflyi;83][lpqwB;83][d lqxi;83][elryg;83][lruxg;83][lruvg;83][loxyi;83][flpqi;83][lgrsg;83][lpxyB;83][nuwyg;83][lqwiA ;83][lquCB;83][lvCyi;83][flqyg;83][dlqvB;83][lmuCg;83][ltuvg;83][cluvg;83][lwyij;83][flygz;83][lmqvB;83][flmyg;83][lwCyi;83][qxjB;83][floyi;83][ryiB;83][flsyi;83][lvyih;83][lowyi;83][c lqwi;83][lpxCg;83][eluwg;83][lgrvB;83][loqwB;83][lqxgk;83][logrg;83][lqvih;83][lqviz;83][lqx yi;83][flogi;83][lstyg;83][dlwyi;83]

[0373] The percent of host bacterial strains (as classified by MLST) that are infected by two phages of a phage combination are provided below. This trait is referred to as “at least 2 phage % coverage”. The phage combinations are ordered in descending performance grade.

[0374] [lnwyB;51][lqwyB;51][lwygB;51][luwgB;51][lnwyg;51][lqwyg;51][lngwg;50][lnwyi;50][lqwyi;50][lnuwg;50][lnryg;50][lgryg;50][luwgi;50][dlryg;50][lrygB;50][dlnyg;50][dlygB;50][lq wgB;50][lnqwB;50][lnwCg;49][lqvyB;49][luvgB;49][lnuCg;49][lnqrg;49][dlwyB;49][lngwi;49][lqvyg;49][lwygi;49][lvwyB;49][lgryi;49][luwyB;49][lqugB;49][luygB;49][luwyg;49][lnuyg;49][lqrgB;49][dlwyg;49][dlqyg;49][lnvyB;49][lnqug;49][lnvyg;49][lvygB;49][lqvyi;49][lnuvg;49][lv wyi;49][lrCyg;49][dlwyi;49][lrwyB;49][lvwyg;49][lpqyg;49][luwyi;49][lwCyB;49][lqvwB;48][1 rwyg;48][dlsyg;48][luwiB;48][lwCyg;48][lnuyB;48][lrygi;48][dlpyg;48][lwyiB;48][lnuyi;48][lu CgB;48][lrwyi;48][dlvyB;48][dlygi;48][lqvwg;48][lnvyi;48][lqwgi;48][luvgi;48][lgswg;48][lwC yi;48][lswyg;48][lquwg;48][lqvgB;48][luwCB;48][dlqwg;48][dlvyi;48][luwCi;48][dlqwB;48][lq vwi;48][luwCg;48][lnquB;48][luygi;48][lnqui;48][lswyB;48][lquwB;48][lvCyB;48][lquwi;48][l wCgB;48][dlvyg;48][larCg;48][dlarg;48][lqugi;48][lnavg;48][laxyg;48][luCgi;47][dlpag;47][lqv Cg;47][lgswB;47][lryiB;47][lnvCg;47][dlqsg;47][lvCyg;47][dlyiB;47][lqwCB;47][lqwCg;47][lp Cyg;47][lswyi;47][lvCyi;47][lgrwg;47][lgrgi;47][lqxyi;47][lnpyg;47][dlsyi;47][lqxyB;47][lrugi;47][dlqwi;47][lquyg;47][lgrwB;47][lvwCB;47][lqygi;47][lqvCB;47][lnqvB;47][lvygi;47][luviB;46][lqwCi;46][clqyg;46][dlqvg;46][lgswi;46][lqvCi;46][lquyi;46][lgrwi;46][lvwCg;46][lquyB;46][lpygB;46][lqwiB;46][lpwyB;46][dlCyg;46][dlqvB;46][lnqvi;46][lvwCi;46][lnxyg;46][lswCg;46][clwyg;46][lpqvg;46][luvwB;46][lsuwB;46][clnyg;46][lquCg;46][lnxyB;46][luvwi;46][lwCgi;46][lpvyB;46][lruyB;46][lruyg;46][clryg;46][lpwyi;46][lpqwB;46][dlwCg;46][dlqgi;46][lqvgi;46][lsuwg;46][dluwg;46][luyiB;46][luCyB;46][luCyg;46][luCyi;46][luvwg;46][lvCgB;46][lvyiB;46][lpqvB;46][lnpqg;46][lpwyg;46][lpqwg;46][dlqvi;46][lsuwi;46][lruyi;46][lsuCg;45][lsuCB;45][clwyi;45][lgrsg;45][lpqvi;45][lpvyg;45][dluyi;45][lquCB;45][lrwCg;45][dluyB;45][luCiB;45][in xyi;45][cdlyg;45][lpvyi;45][lsuCi;45][luvCi;45][luvCB;45][lgriB;45][clqwg;45][dloyg;45][lswC B;45][lxygB;45][lpqCg;45][clwyB;45][lpqwi;45][lquCi;45][luvyg;45][lgsug;45][lgrug;45][clryi; 45][iquiB;45][cingg;45][luxyi;45][clygB;45][clvyg;45][luvCg;45][lpryg;45][lquxg;45][dluyg;45][lpuyg;45][luxyg;45][luvyB;45][luvyi;45][lpqgB;45][lquvg;45][lpuyB;45][dlqsi;45][lpuyi;45][lq uvB;45][lsuyg;45][lgrvg;45][lgruB;45][clvyB;45][lquxi;45][lruCg;45][lwyij;45][lgrui;45][lsuyi;45][lpygi;45][lrsyg;45][clvyi;45][lgsuB;45][lwxyi;45][lvxyB;45][lwxyB;45][lxCyg;45][dlqug;45][lwxyg;45][lruCB;45][ixCyB;45][clqrg;45][lruCi;45][lquvi;45][lowyB;45][luxyB;45][clqvg;45][it wyB;45][ltwyi;45][iwCiB;45][iswCi;45][lgsvg;45][lvxyi;45][logyg;45][dlvCg;45][xCyi;45][lqs ui;45][ciCyg;45][lqwxg;45][dlsug;45][lpqug;45][lvxyg;45][lrvyB;45][lpqrg;45][grvB;45][suyB; 45][flqyg;44][iqviB;44][cluwg;44][dlqui;44][dlquB;44][dlxyi;44][dloqg;44][dlxyg;44][loqwg;44][clqwB;44][dflyB;44][clygi;44][luwxg;44][lqwxi;44][lxygi;44][ivCgi;44][lwygj;44][lrvyi;44][lo qwB;44][dlqiB;44][lowyg;44][lrsyB;44][lpqsg;44][flnyg;44][dlqCg;44][ingxg;44][lrvyg;44][lsvy g;44][clsyg;44][dflyg;44][clqsg;44][lowyi;44][lgrvi;44][lpqui;44][iquxB;44][pvCg;44][grsB;44][ltwyg;44][clqwi;44][ipquB;44][iqwxB;44][isuvB;44][dlxyB;44][lsuvg;44][loqCg;44][flngg;44][cluyi;44][cdlqg;44][clsyi;44][lgrsi;44][lruwB;44][luvxg;44][lgtwg;44][lpqgi;44][clqCg;44][lou wg;44][lmwyg;44][imwyB;44][flwyB;44][clqrB;44][lpuwg;44][lrsyi;44][lrvCg;44][lruwi;44][loq wi;44][lpsyg;44][clwCg;44][luxCi;44][dluvg;44][isvyB;44][loCyg;44][dluvB;44][clpqg;44][puC i;44][lruwg;44][finyB;44][clpyg;44][clqri;44][iqxCg;44][ipwCg;44][cluCi;44][figyB;44][pyiB;44][elryg;44][igtwB;44][cluyB;44][dluvi;44][ipuCB;44][luwgj;44][dflyi;44][flwyg;44][gsvB;44][dlmyg;44][lgtwi;44][lmryg;44][ingxB;44][cluyg;44][lsuvi;44][luxCg;44][ipuCg;44][dlqxg;44][cl qvi;44][clqvB;44][isvCg;44][fluwg;44][lqvxg;44][dlrug;43][cluCg;43][delyg;43][cluCB;43][clqu g;43][flqwg;43][iqxCi;43][lsvyi;43][lmuyi;43][lpuvg;43][imuyB;43][nuwyg;43][flgyi;43][clqui; 43][clqsi;43][clvCg;43][ingxi;43][lrsug;43][clqgi;43][flwyi;43][lmryi;43][qxCB;43][elryi;43][el wyB;43][cluvg;43][lavxB;43][flnyi;43][lawij;43][ltuwg;43][lavxi;43][lmuwg;43][svCB;43][vC iB;43][lgsvi;43][luxCB;43][dltyg;43][flCyg;43][lwyjB;43][dluxg;43][dluCB;43][dlqxi;43][dluCg ;43][lmwyi;43][dlygj;43][dlqxB;43][lqwgj;43][dluCi;43][dloug;43][nuwyi;43][lrxyg;43][fluCi;43][lmquB;43][lwxCi;43][dflqg;43][lmqvg;43][lwxCg;43][lwxCB;43][elwyg;43][elygi;43][loqvB ;43][lmqwg;43][lsvCi;43][ltwCg;43][flvwg;43][lowCg;43][lmqug;43][lpsyi;43][lrxyB;43][lxyiB; 43][flngi;43][clpqi;43][lrxyi;43][flqwB;43][flryg;43][clvCi;43][ltuCg;43][lmqui;43][fluCB;43][1 muyg;43][clquB;43][lqxgB;43][clrug;43][lmgrg;43][loqvg;43][loqug;43][firyB;43][lpqsi;43][lsx yg;43][lsuxg;42][dlxCg;42][flygB;42][luwjB;42][lntyg;42][flwCB;42][eluwg;42][elpyg;42][dflq B;42]

[0375] The percent of host bacterial strains (as classified by MLST) that are infected by three phages of a phage combination are provided below. This trait is referred to as “at least 3 phage % coverage”. The phage combinations are ordered in descending performance grade.

[0376] [lruvg;31][cluwg;31][dluwg;31][lruwB;30][lruwg;30][luvwg;30][dluvB;30][luvwB;30][dl uvg;30][lruwi;30][dluvi;28][luvwi;28][luwxg;28][dlwyB;28][dluyi;28][dlrug;28][dluyB;28][cluv g;28][dlwyg;28][dlwyi;28][dluyg;28][lrwCg;28][dluCg;28][dlqwB;28][lrwyi;28][dlqwi;28][dlqw g;28][lrwyg;28][lpuwg;28][dluCB;28][dluCi;28][lrwyB;28][lquwi;28][lquyB;28][dluxg;28][clwy B;28][luCyg;28][lwCyB;28][lwCyg;28][dlCyg;28][lquwB;28][lquyi;28][clrug;28][luwyg;28][dlq ug;28][lwxyB;28][dlqui;28][lquwg;28][dlquB;28][lwCyi;28][luwyB;28][lrvyg;28][luCyB;28][lrv yB;28][luwyi;28][luCyi;28][lquyg;28][dlqCg;27][lrvyi;27][lgrwi;27][luwCg;27][lgrwg;27][clqw B;27][luwCB;27][lwxyi;27][lrvCg;27][lwxyg;27][clwyg;27][clwCg;27][lmuwg;27][luwCi;27][lq rwB;27][clwyi;27][dlwCg;26][lruxg;26][dlvyi;26][clqwi;26][lpuvg;26][cdlyg;26][dlqyg;26][elu wi;26][clqwg;26][cluxg;26][eluwg;26][dlvyB;26][dlvyg;26][dlxyB;26][lqwCg;26][lpwyg;26][lq uCg;26][lwxCB;26][elrug;26][lruCg;26][cluyB;26][lgrvg;26][lpwyB;26][lvwyB;26][clquB;26]l[1 vwCg;26][lruCB;26][lvwCi;26][dlxyg;26][cdlqg;26][lvwyi;26][lqwCi;26][lquCB;26][lvwyg;26][lqwyg;26][flrwg;26][lpwyi;26][lvwCB;26][lgrvB;26][dlxyi;26][clqug;26][lqwyB;26][lqwyi;26][clCyg;26][lqwCB;26][lquCi;26][cluyg;26][dlqvi;25][lqwxB;25][lruyg;25][luvyB;25][lqrvi;25][cl uCg;25][lpuxg;25][dlqvg;25][lquvB;25][clqui;25][elwyi;25][clqyg;25][dlvCg;25][lruCi;25][elwy B;25][lgrug;25][lwxCg;25][lgruB;25][luvyg;25][lquvg;25][cluCB;25][lmuvg;25][dflwg;25][lwx Ci;25][lrxyB;25][cluyi;25][elwyg;25][lruyB;25][louwg;25][dlqvB;25][luvxg;25][clsug;25][lqwxi ;25][lqvwi;25][lqvwB;25][luvyi;25][lruyi;25][lrxyg;25][lgryi;25][lgryg;25][luvCB;25][lpwCg;25][lvCyi;25][lquvi;25][lnuwg;25][luxyB;25][lqwxg;25][luvCg;25][lpryg;25][clryi;25][lqvwg;25][dlqrg;25][dlryg;25][lvCyB;25][delyg;25][clryg;25][lgrui;25][lmwCg;25][lmwCi;25][lvCyg;25][c luCi;25][eluyB;24][lpxyB;24][dlmyg;24][dlqxB;24][lrxyi;24][nuwyg;24][lmwyi;24][luxCB;24][clvCg;24][luvCi;24][clxyB;24][fluwg;24][lsuwg;24][lrCyg;24][clxyi;24][lmwyB;24][lxCyB;24][dlmag;24][flvwg;24][dlnyg;24][delag;24][flrug;24][clxyg;24][lmwyg;24][lmuyg;24][lrxCB;24][clqrB;24][clvCi;24][dloug;24][nuwyi;24][dlsug;24][luxyg;24][eluyg;24][lsuwB;24][clqCg;24][el uyi;24][ltuwg;24][lxCyg;24][lorug;24][lpuyg;24][eluvB;24][nvwyg;24][lpqrg;24][clmyg;24][lnu yB;24][lvxyB;24][clxCg;24][lpqwg;24][luxyi;24][dlxCg;24][clqri;24][elqwi;24][elqwg;24][lmuy B;24][flqug;24][fluyg;24][lrxCg;24][elqwB;24][dlqxi;24][lpuyB;24][lpqwB;24][clvyB;24][celyg ;24][lpqwi;24][luxCg;24][dlqxg;24][clqrg;24][eluvg;24][lpuCB;24][lnquB;24][dflvg;24][lpxyg;24][lpuCg;24][lxCyi;24][lmuCg;23][clvyg;23][lqvyg;23][lpuCi;23][lpqug;23][elqug;23][lnqug;23][lnqui;23][lqvyi;23][lqvyB;23][lmryg;23][lnuyi;23][lnuyg;23][lmvyg;23][lmqwg;23][elvyg;23][lmqwi;23][lpuyi;23][lmqwB;23][lpquB;23][eluvi;23][lqxyB;23][lvxyg;23][lsuwi;23][nruyg;23][1 quxB;23][elvyi;23][lmvyB;23][clpyg;23][lmuyi;23][elqui;23][lpxyi;23][lmqug;23][lpvyg;23][lrx Ci;23][flquB;23][dlpyg;23][lpvyB;23][luxCi;23][clvyi;23][lpqyg;23][lvxCB;23][fluyB;23][elqu B;23][elvyB;23][elryi;23][lpCyg;23][lpxCg;23][lqxyg;23][lvxyi;23][flwyB;23][lvxCg;23][flqui; 23][lgrxB;23][eluCB;23][lmvyi;23][eluxg;23][flwyg;23][lquxg;23][lnuvg;23][elryg;23][fluvg;23][lqxyi;23][clqvB;23][clnyg;23][lnwyB;23][lpvyi;23][lowyg;23][lowCg;23][elxyB;23][lmquB;23][lowyB;23][flwyi;23][lmryi;23][clmqg;23][lgrCg;23][fluyi;23][eluCg;23][eluCi;23][lpqui;23][is uyB;23][lowyi;23][lsuyg;23][elxyi;22][celqg;22][lqvCB;22][lmqui;22][lqvCi;22][lgrxg;22][clqx B;22][clqxg;22][lqxCB;22][lnwyg;22][lpvCg;22][lrsug;22][lnuCg;22][clqvi;22][nuvyB;22][elxy g;22][lvxCi;22][lquxi;22][nuvyg;22][dlpqg;22][lrsyB;22][lmgrg;22][lnryg;22][elxCg;22][clqxi;22][lqvCg;22][clqvg;22][lnwyi;22][fluvB;22][flwxg;22][elwCg;22][fluvi;22][lnwCg;22][loqwB;22][dlsyg;22][flpyB;22][lopyg;22][lovyB;22][louvg;22][elgri;22][loqwi;22][lnvyB;22][lmpyg;22][clngg;22][lswCB;22][lmxyB;22][elvCi;22][flgyi;22][flgyg;22][elvCg;22][nuvyi;22][lmvCg;22][figyB;22][dlsyi;22][elqrg;22][lqxCi;22][lpqCg;22][lnqwB;22][lmgri;22][lmuxg;22][loqwg;22][is wyB;22][elqvi;22][flpyg;22][loryg;22][flqwg;22][lsuyi;22][flqwB;22][elqvB;22][lgrxi;22][lqvxB ;22][lovyg;22][lqxCg;22][flqwi;22][lrsyg;22][elqvg;22][lswCg;21][cflyg;21][lngwi;21][flpyi;21][lnxyg;21][lnqvB;21][dflyB;21][lpqvB;21][lnvCg;21][dflgg;21][lnvyg;21][lnvyi;21][clpqg;21][fl wCg;21][dflqi;21][lgsuB;21][flCyg;21][lsuCg;21][flwCi;21][logrg;21][lnxyi;21][lrsyi;21][clsyg; 21][elqxB;21][lovyi;21][dflyi;21][flrCg;21][lswCi;21][lmqxB;21][lmoyg;21][lqvxg;21][lsuCB;21][logyg;21][cloyg;21][clpqi;21][nquvg;21][lnxyB;21][lswyi;21][cflyB;21][lmxCg;21][flmqg;21][suwyg;21][dflyg;21][dflqB;21][loryi;21][flpCg;21][lgsug;21][lnqwg;21][lpqvg;21][flwCB;21][lswyg;21][lmxyg;21][lmpqg;21][lnqrg;21][dflCg;21][ltuyB;21][louCB;21][lpsyg;21][rsuyg;21][l qvxi;21][flryg;21][logri;21]

[0377] The percent of host bacterial strains (as classified by MLST) that are infected by four phages of a phage combination are provided below. This trait is referred to as “at least 4 phage % coverage”. The phage combinations are ordered in descending performance grade.

[0378] [dlrug;15][lruwi;15][lruwg;15][lruwB;15][dluwg;15][lpuwg;15][dlwCg;14][cluwg;14][clr ug;14][clpyg;13][lnuwg;13][lpwCg;13][dlqyg;13][dlpyg;13][elwCg;13][luwxg;12][dlCyg;12][cl uyB;12][lnpyg;12][dluCg;12][lpwyB;12][lpwyg;12][dluCB;12][dlxCg;12][clqyg;12][clnyg;12][l uvwB;12][clwyB;12][dlryg;12][clwCg;12][cluyg;12][luvwg;12][clwyg;12][dluyg;12][dluyB;12][lruxg;12][clwyi;12][luvwi;12][cdlyg;12][dluxg;12][clmyg;12][lpryg;12][lquyB;12][lruyB;12][dl qug;12][dlquB;12][lruyi;12][dlpqg;12][lnwyi;12][lquyg;12][lmuwg;12][cluyi;12][dluCi;12][dlm yg;12][clpqg;12][clryg;12][dluyi;12][lnwyg;12][lpuyB;12][lpwyi;12][lpuyi;12][lnwCg;12][lnwy B;12][clCyg;12][dlqCg;12][lruyg;12][lpCyg;12][lpuyg;12][luCyB;11][dlwyB;11][clryi;11][cdlqg ;11][elpyg;11][lpqwg;11][lpuvg;11][lpuCB;11][dluvi;11][lrCyg;11][dluvg;11][lmwyB;11][lnuyB ;11][dlqrg;11][clmqg;11][dlwyi;11][cluCg;11][dlnyg;11][lmpyg;11][lpuxg;11][lvwyg;11][dluvB; 11][dlwyg;11][dlqui;11][lpuCg;11][lpqwB;11][cluCB;11][lnuyg;11][luCyg;11][clpqi;11][eluwg; 11][lpxCg;11][clvyB;11][clvyg;11][luwyB;11][lruvg;11][lmwyg;11][lpuCi;11][luwyg;11][lwxC B;11][dlmqg;11][lwxCg;11][lvwyB;11][lmwCg;11][lquyi;11][clqCg;11][lvwCB;11][clquB;11][1 ruCi;11][lmwyi;11][lgryg;11][lrxCi;11][dlvCg;11][loryi;11][clqwi;11][lquCB;11][clqrg;11][lquC g;11][lruCg;11][clqrB;11][clqwB;11][lgrCg;11][lmwCi;11][lrwCg;11][dloyg;11][lvwyi;11][lnry g;11][lrwyB;11][clxCg;11][luwyi;11][lpqwi;11][lmqwg;11][lqwyi;11][luwCg;11][lpqyg;11][clq wg;11][lrxCg;11][lnuCg;11][luwCB;11][lruCB;11][eluwi;11][clqug;11][lqwyB;11][lorug;11][clu xg;11][loryg;11][lpqCg;11][elxCg;11][lwxCi;11][luCyi;11][clngg;11][lnuyi;11][lrxCB;11][clxy B;11][lnxyB;11][lrwyg;11][lqwyg;11][lmqwB;11][lvwCg;11][lnuvg;11][cluCi;11][elpqg;11][clv yi;11][lmqwi;10][lxCyg;10][lqxCg;10][elvCg;10][dlqxg;10][lnvyg;10][lpvyg;10][lngwi;10][luw Ci;10][lmuyi;10][dlqwg;10][lquCi;10][lrwyi;10][dlqwi;10][clqui;10][lgryi;10][lmuyB;10][eluCg; 10][clqxB;10][lnxyg;10][lpqui;10][lmuxg;10][lwCyg;10][celyg;10][lpqrg;10][dlqxB;10][lpvyB;10][lvwCi;10][lgrui;10][dlvyB;10][clqri;10][lmpqg;10][lgruB;10][lxCyB;10][lwCyB;10][lnqwB;10][dlqwB;10][dlvyg;10][lgrug;10][dflwg;10][lpvCg;10][fluxg;10][dlxyg;10][lnvyB;10][elrug;10][lnpqg;10][eluxg;10][dlxyB;10][lopyg;10][lmuyg;10][flwxg;10][nuwyg;10][lwCyi;10][cloyg;10][clxyg;10][lqxCB;10][lmuCg;10][dflCg;10][lpqug;10][nvwyg;10][delyg;10][eluCB;10][lpvyi;10][lpquB;10][luvxg;10][lmxCg;10][lnqwg;10][eluvB;10][lxCyi;10][firug;10][eluCi;10][eluvi;10][lr vyi;10][lqvyB;10][lgrwB;10][lngxB;10][lrsug;10][nuwyi;10][clqvB;10][eluvg;10][lmryg;10][lnv Cg;10][elvCi;10][lqwCB;10][dlqxi;10][elryg;10][celqg;10][cluvg;10][lpxyB;10][dlxyi;10][lowy B;10][fluwg;10][delqg;10][lmquB;10][lnvyi;10][loCyg;10][lqxCi;10][rsuyg;10][dlvyi;10][lmqui; 10][lnxyi;10][clvCg;10][lrvyB;10][luxCi;10][luxCB;10][lpxyi;10][lqxyB;10][lqwCi;10][elwyB;10][flrwg;10][lpqxB;10][lmryi;10][luvyg;10][lowyg;10][louyi;10][lmqug;10][lqvwg;10][lquwB;10][clxyi;10][lqwCg;10][clqxg;10][Irvyg;10][lpqxg;10][lwxyB;10][lgrwg;10][lqvyg;10][elwyg;10][lclavg;10][louyB;10][lpxyg;10][elwyi;10][luxCg;10][lpaxi;10][lavwB;10][louyg;10][lquwg;10][lwxyg;10][luvyi;10][luvyB;10][lqxyg;10][flwCB;9][flqyg;9][lqvwi;9][luxyi;9][lnqrg;9][logyg;9][dlqvB;9][lgrxB;9][suvyi;9][eluyB;9][lowyi;9][lmxyg;9][flqCg;9][nruyg;9][lgtyg;9][lmxyi;9][lu xyB;9][suvyB;9][lqwxB;9][flwCg;9][elqwB;9][louvg;9][lqxyi;9][lvCyg;9][elqrg;9][lmuvg;9][lou wg;9][lmgrg;9][lmxyB;9][lrxyi;9][lrvCg;9][lwxyi;9][lvCyB;9][lmvCg;9][lgrxi;9][flCyg;9][lsuvi; 9][elqwg;9][ltCyg;9][dlqvg;9][lqvyi;9][lvxCg;9][clqvi;9][lvxCi;9][lnquB;9][lvxCB;9][lgrwi;9][s uvyg;9][lsuvg;9][eluyg;9][lrxyg;9][lgrxg;9][lqwxg;9][lsuvB;9][lngxg;9][lmgri;9][lquwi;9][figyB; 9][elryi;9][lnqug;9][clvCi;9][clqxi;9][dloug;9][luxyg;9][lrxyB;9][elqwi;9][flwCi;9][lquxi;9][luv Cg;9][nuvyi;9][elquB;9][dltCg;9][lqvCB;9][elqxB;9][luvCi;9][lmvyB;9][dflyB;9][elvyB;9][clsy g;9][luvCB;9][lquxg;9][lquxB;9][loxCg;9][fluCi;9][lmqxB;9][cflyg;9][lmqvB;9][lmqvg;9][lvCyi ;9][lpqvi;9][elqxg;9][lnqui;9][lowCg;9][flpCg;9][fluCB;9][dflyg;9][flvwg;9][eluyi;9][lngxi;9][dl ogg;9][lmvyi;9][lmvyg;9][lqwxi;9][elvyg;9][lmqxg;9][elgri;9][loqCg;9][lmqvi;9][nuvyB;9][suw yg;9][dlqvi;9][dltyg;9][flgyi;9][nuvyg;9][fluCg;9][elxyB;9][cflyB;9][elqug;9][elxyg;9][lpqvg;9][lqvCg;9][lpqvB;9][louxg;9][lmqxi;9][loxyg;8][clogg;8][lvxyi;8][clsyi;8][dlsug;8][flpyB;8][lgrvg ;8][fluvi;8][flxCB;8][ltuyg;8][flryg;8][lsvyg;8][dflqB;8][flmyg;8][lsuwB;8][flpyg;8][dlsyg;8][lsv yi;8][lgrvB;8][loxyi;8][eloyg;8][lnqvB;8][flnyB;8][ilnqvg;8][lpsyg;8][flxCi;8][lrtyB;8][cltyB;8][1 moyg;8][cflyi;8][lovyB;8][lrsyB;8][lovyi;8][clqsg;8][lrtyi;8][flrCg;8][fluvB;8][ltvyg;8][lntyg;8][flmyi;8][cflqB;8].

### Example 5

[0379] A 4-Phage Cocktail Selected to Target KPC-2 Strain

[0380] The in vivo efficacy evaluation in the peritonitis infection model was conducted with immunocompetent mice and measured the survival of a lethal infection. The phage cocktail was tested as a monotherapy and also in combination with tigecycline. The efficacy study included tigecycline tested alone as a quality control reference agent, and was administered once at 1 h post infection. The phage cocktail was administered twice (BID) per day with 12 h intervals (ql2h) starting at 1 h post-infection for a total of five days. The administration dosing routes included subcutaneous (SC), intraperitoneal (IP) and intravenous (IV). Biosamples, including serum, liver, kidneys and spleen tissues, were collected on Day 8 post-infection from all phage cocktail treated animals that survived the infection and three control animals that survived the infection.

[0381] The carbapenem resistant K. pneumoniae strain, BAA-1705 (also referred to herein as KPC-2 strain), was obtained from the American Type Culture Collection (ATCC). Susceptibility of the strain is summarized in FIG. 5 and was determined following the recommended assay conditions of the Clinical Laboratory Standards Institute (CLSI) M07-A10 microdilution procedure and the CLSI M100 interpretive criteria. The species identity was confirmed by 16S analysis. The antimicrobial resistance genes (AMR) of the K. pneumoniae strain BAA-1705) were identified from whole genome sequence analysis by CosmosID.

[0382] The following cocktail was generated to target the Klebsiella pneumonia strain BAA-1705: CT-227-KP4M1-20 (SEQ ID NO: 11), CT-227-KP4M1-11 (SEQ ID NO: 9), KP10-89 (SEQ ID NO: 24) and KPL6a-30 (SEQ ID NO: 30) and tested in the KPC-2 mouse peritonitis infection model.

[0383] Results

[0384] Animals treated with the cocktail showed 100% survival, as illustrated in FIG. 4.

### Example 6

[0385] Essential Genes for the Phage Lytic Cycle

[0386] Materials and Methods: Gene Analysis

[0387] According to certain embodiments, the phages' genomes are reduced to create synthetic phages with smaller genomes without significantly hampering their essential functionality (e.g., the ability to infect and lyse a host bacteria). According to certain embodiments, such a reduced genome can then more readily accommodate a heterogenous molecule of DNA that otherwise, if added to the original full genomic DNA, may be challenging due to the limited DNA encapsulation capacity of a phage (see for example Pires, D. P., Monteiro, R., Mil-Homens, D. et al. Designing P. aeruginosa synthetic phages with reduced genomes. Sci Rep 11, 2164 (2021). www(dot)doi(dot)org/10.1038/s41598-021-81580-2).

[0388] Additionally or alternatively, the genetic sequences of the selected phages can be modified or optimized, e.g. for expression in a suitable producer cell line, provided the essential genes are relatively conserved.

[0389] According to certain embodiments, the following exemplary method for finding the likely essential genes is used. A gene X was defined as essential if it was recognized and assigned a function by PATRIC (www(dot)docs(dot)patricbrc(dot)org/). In addition, if the gene's function is unknown by PATRIC (e.g. “hypothetical protein” or “phage protein”) the following test is performed: given a phage genome, for a gene X, count the number of homologs (global amino acid similarity of 30% or more using blastp) in all publicly available phage genomes infecting the same species (num.homologs(gene X)). Subsequently, the mean and standard deviation of number of homologs for each gene in the genomes that were found to contain gene X were computed, and the z-score for gene X was calculated as follows:

$$z ( gene X ) = \frac{\begin{matrix}[ num . homologs ( gene X ) ] - \\ [ mean num . homologs ( \begin{matrix}each gene in each genome \\ containing gene X\end{matrix} ) ]\end{matrix}}{\begin{matrix}standard deviation num . homologs \\ ( each gene in each genome containing gene X )\end{matrix}}$$

[0390] Genes with z-scores over −1 were defined essential. All other genes were defined non-essential.

[0391] Below, is a list of essential genes for each phage. Each gene is represented by square brackets, containing the following data fields separated by semi-columns: first, the gene's start coordinate, end coordinate, and strand to relate to with relation to the phage genome sequence as presented in the sequence listing (+ is the strand given in the sequence listing). Second, the gene's function. (“HP” denotes a hypothetical protein and “PP” denotes an unclassified phage protein).

[0392] Essential genes of phage CT-227-KP4M1-11: [66:561:−;Endolysin][589:898:−;HP][905:1352:−;HP][1348:1585:−;HP][1584:1911:−;HP][1907:2204:−;HP][2200:2563:−;HP][2559:3150:−;HP][3189:3783:−;HP][3812:4040:−;HP][4026:4290:−;HP][4308:4599:−;HP][5524:5974:−;HP][5973:6531:−;HP][6709:6934:−;HP][6988:7222:−;HP][7205:7574:−;HP][7570:7723:−;HP][9625:9976:−;HP][9992:10178:−;HP][10177:10357:−;HP][10343:10523:−;HP][10598:11054:−;HP][11053:11290:−;HP][11286:11961:−;Deoxynucleotide monophosphate kinase][12028:12631:−;Tail tube terminator protein][12630:13458:−;HP][13457:13907:−;HP][13956:14595:+;Baseplate wedge protein gp53][14591:16322:+;Baseplate central spike complex protein gp5][16324:16828:+;HP][16828:17122:+;Baseplate puncturing device gp5.4][17121:19089:+;Baseplate wedge protein gp6][19085:22184:+;Baseplate wedge protein gp7][22176:23202:+;Baseplate wedge protein gp8][23269:24181:+;Baseplate protein gp9][24180:26004:+;Baseplate wedge protein gp10][26005:26677:+;Baseplate wedge protein gp11][26676:28023:+;HP][28031:29798:+;HP][29854:30796:+;Neck protein gp13][30799:31576:+;Neck protein gp14][31617:32442:+;Tail completion protein gp15][32438:32948:+;Terminase %2C small subunit][32925:34764:+;Terminase %2C large subunit][34797:36771:+;Tail sheath protein][37584:38076:+;Tail tube protein gp19][38180:39749:+;Portal protein][39748:39973:+;HP][39972:40398:+;Prohead assembly protein gp68][40397:41048:+;Prohead core protein protease][41080:41893:+;Capsid assembly scaffolding protein][41913:43473:+;Major capsid protein][43554:44835:+;Capsid vertex protein][44864:45413:−;HP][45412:46420:−;RNA ligase 2][46430:46688:−;HP][46801:47128:−;HP][47127:47355:−;HP][47433:48558:−;Highly immunogenic outer capsid protein][48567:49362:−;HP][49939:50923:+;ATP-dependent DNA helicase uvsW][50919:51162:+;ATP-dependent DNA helicase uvsW][51221:51389:−;HP][51419:51836:−;Recombination protein uvsY][51877:52288:−;Baseplate wedge protein gp25][52284:52914:−;HP][52965:53724:+;HP][53720:54863:+;Baseplate central spike complex protein gp27][54834:55362:+;Baseplate hub assembly protein gp28][55358:57092:+;HP][57101:58154:+;Baseplate tail-tube junction protein gp48][58153:59080:+;Baseplate tail-tube junction protein gp54][59101:59380:−;HP][59443:61570:−;HP][61621:61801:−;HP][61797:63270:−;HP][63269:63476:−;HP][63517:64360:−;HP][64543:64744:−;HP][64740:64911:−;HP][64921:65200:−;HP][65212:65698:−;HP][65738:66098:−;HP][66191:66704:−;HP][66743:67112:−;HP][67233:67410:−;HP][67777:68026:−;Lysis inhibition accessory protein][68141:68465:−;Capsid assembly protein Gp31][68522:68831:−;HP][68827:69028:−;HP][69027:69597:−;Deoxycytidylate deaminase][69597:69942:−;HP][69941:70178:−;HP][70167:70452:−;HP][70463:71357:−;Polynucleotide kinase][71356:71569:−;HP][71579:71867:−;HP][71863:72217:−;HP][72204:72714:−;HP][72776:73928:−;T4 RNA ligase 1][73921:74338:−;Endonuclease II][74365:75508:−;HP][75564:77811:−;Ribonucleoside-diphosphate reductase large subunit][77801:78107:−;HP][78103:78310:−;HP][78306:79182:−;Thymidylate synthase][79174:79492:−;HP][79475:80075:−;Dihydrofolate reductase][80082:80247:−;HP][80329:80650:−;HP][80642:80732:−;HP][80728:81007:−;HP][81064:81343:−;HP][81433:81655:−;HP][81696:81954:−;HP][82080:82998:−;Single-stranded DNA-binding protein][83066:83729:−;Protein Gp59][83725:84025:−;RNA polymerase-associated protein Gp33][84005:84278:−;Double-stranded DNA-binding protein][84288:85215:−;Ribonuclease H][85290:89136:+;Long-tail fiber proximal subunit][89135:90272:+;Long-tail fiber protein gp35][90329:91022:+;Long-tail fiber protein gp36][91031:95660:+;HP][95696:96224:+;HP][96265:96922:+;Holin][96922:97195:−;10 kDa anti-sigma factor][97263:97530:−;HP][97526:97853:−;HP][97849:98128:−;HP][98217:98520:−;HP][98519:98882:−;HP][98869:99049:−;HP][99045:99387:−;HP][99386:100031:−;Middle transcription regulatory protein motA][100155:100419:−;HP][100646:102035:−;HP][102040:102181:−;HP][102177:102285:−;HP][102350:102806:−;Nucleoid disruption protein][102864:102954:−;HP][102950:103142:−;HP][103152:103269:−;HP][103329:103569:−;HP][103633:104212:−;Endonuclease IV][104153:104450:−;HP][104492:105404:−;HP][105404:107573:−;Protein rIIA][107583:107793:−;HP][108074:108227:−;HP][108267:110106:−;HP][110136:110505:−;HP][110583:110832:−;HP][110828:110918:−;HP][110917:111094:−;HP][111080:111416:−;HP][111409:111775:−;HP][111774:111990:−;HP][112054:112462:−;HP][112525:112693:−;HP][112692:113382:−;Exodeoxyribonuclease][113374:113629:−;HP][113635:114967:−;ATP-dependent DNA helicase dda][114963:115278:−;HP][115277:116033:−;HP][116112:116778:−;HP][116850:117024:−;HP][117525:117717:−;HP][117795:118023:−;Small outer capsid protein][118053:118191:−;HP][118190:118712:−;HP][118778:118970:+;HP][118988:120011:−;DNA primase][120049:120214:−;HP][120229:120439:−;HP][120435:120729:−;Protein spackle][120739:121018:−;HP][121083:121317:−;HP][121326:122700:−;ATP-dependent helicase 41][122775:123126:−;HP][123115:124291:−;Recombination and repair protein][124373:124595:−;HP][124621:125458:−;HP][125454:126189:−;Deoxycytidylate 5-hydroxymethyltransferase][126197:126404:−;Immunity protein][126414:126858:−;HP][126913:129622:−;DNA-directed DNA polymerase][129714:130077:−;Translation repressor protein][130079:130649:−;Sliding-clamp-loader gp44 subunit][130645:131608:−;Sliding-clamp-loader gp44 subunit][131656:132358:−;DNA polymerase clamp][132393:132771:−;15 kDa RNA polymerase-binding protein][132781:132976:−;HP][132972:134613:−;Exonuclease subunit 2][134651:135674:−;Exonuclease subunit 1][135744:136941:−;DNA alpha-glucosyltransferase][137010:137268:−;HP][137341:137539:−;HP][137516:137819:−;HP][137820:138051:−;HP][138034:138583:−;RNA polymerase sigma factor][138649:138895:−;HP][138891:139170:−;HP][139157:139382:−;HP][139374:139659:−;HP][139651:139909:−;HP][139905:140238:−;HP][140302:140545:−;HP][140541:140730:−;HP][140915:141218:−;HP][141214:141556:−;HP][141552:141765:−;HP][141773:141872:−;HP][141882:142353:−;HP][142324:142558:−;HP][142529:144368:−;Anaerobic ribonucleoside-triphosphate reductase][144364:144838:−;Recombination endonuclease VII][144874:145183:−;HP][145175:145628:−;HP][145611:145770:−;HP][145748:146138:−;HP][146139:146310:−;HP][146328:146517:−;HP][146509:146779:−;Glutaredoxin][146741:147032:−;HP][147021:147195:−;HP][147187:147700:−;HP][147696:148029:−;HP][148025:148340:−;HP][148336:148573:−;HP][148593:149568:−;HP][149638:150427:−;HP][150484:150751:−;HP][150747:150912:−;HP][151274:151472:−;HP][151474:151795:−;HP][151791:152127:−;HP][152123:152549:−;HP][152545:152692:−;HP][152734:153712:−;HP][153829:154069:−;HP][154258:155269:−;HP][155265:155688:−;HP][155880:156462:−;HP][156458:156950:−;HP][156952:157174:−;HP][157163:157355:−;HP][157357:157624:−;HP][157721:158204:−;HP][158308:158695:−;HP][158681:158969:−;Antiholin][158980:159193:−;HP][159239:159614:−;HP][160073:160673:−;HP][160672:160840:−;HP][160864:161332:−;HP][161340:161733:−;HP][161729:162050:−;HP][162049:162595:−;HP][162602:163061:−;Endoribonuclease RegB][163124:163400:−;HP][163399:163762:−;HP][163770:164262:−;HP][164243:164555:−;HP][164551:165085:−;HP][165164:165470:−;HP][165660:166233:−;Internal protein III][166314:166689:−;HP]

[0393] Essential genes of phage 395-D2-3-4: [2551:4477:−;Baseplate wedge protein gp6][4508:6575:−;HP][6576:8346:−;Baseplate central spike complex protein gp5][8342:8702:−;Baseplate wedge protein gp53][9055:9415:+;HP][9430:10285:+;HP][10321:11110:−;HP][11479:12010:+;Tail tube terminator protein][12009:12705:+;Deoxynucleotide monophosphate kinase][13031:13655:+;HP][13662:14202:+;HP][14266:14407:+;HP][14496:14637:+;HP][14647:14983:+;HP][14979:15273:+;HP][15265:15517:+;HP][15759:16167:+;HP][16177:16561:+;H P][16562:16820:+;HP][16848:17172:+;HP][17171:17699:+;HP][18686:18887:+;HP][20042:20300:+;HP][20383:20662:+;HP][20733:20985:+;HP][20981:21128:+;HP][21390:21645:+;HP][22378:23533:+;HP][23815:24181:+;HP][24161:24509:+;HP][24505:24937:+;HP][24938:25202:+; HP][25274:25538:+;HP][25574:25895:+;HP][25950:26349:+;HP][26416:26812:+;L-alanyl-D-glutamate peptidase][26843:27302:+;HP][27301:27469:+;HP][27527:28874:+;HP][28911:29109:+;HP][29121:29676:+;HP][29740:30382:+;HP][30449:30845:+;HP][30855:31002:+;HP][30998:31589:+; HP][31598:31922:+;HP][32370:32844:+;HP][32846:33134:+;HP][33126:33735:+;HP][33751:34144:+;HP][34250:34532:+;HP][34503:34926:+;HP][34997:35912:+;HP][36088:37147:+;HP][37215:37485:+;HP][38089:38317:+;HP][38313:38691:+;HP][39508:40516:+;HP][40512:40758: +;HP][40757:41015:+;HP][41011:41923:+;HP][41981:42260:+;HP][42680:42968:+;HP][43193: 43709:+;HP][43708:44029:+;HP][44036:46253:+;HP][46324:46942:+;HP][47093:47564:+;HP][47579:47864:+;HP][48221:48446:+;HP][48453:48909:+;HP][48943:49336:−;Baseplate wedge protein gp25][49336:49891:−;HP][49887:50628:−;HP][50656:51520:−;Baseplate tail-tube junction protein gp54][51529:52618:−;Baseplate tail-tube junction protein gp48][52627:54415:−;HP][54411:54987:−;HP][55056:56166:+;HP][56162:56540:−;HP][56848:57139:−;HP][57876:59406:−;HP][59386:59917:−;HP][59997:60219:−;HP][60220:60484:−;HP][60492:61011:−;HP][61007:61448:−;HP][62148:62442:−;HP][62567:62837:−;HP][62836:63199:−;HP][63209:63776:−;HP][63817:64237:−;HP][64246:64528:−;HP][64842:65094:−;HP][65104:65446:−;Capsid assembly protein Gp31][65461:66019:−;Deoxycytidylate deaminase][66234:66486:−;HP][66482:66770:−;HP][66822:67707:−;Polynucleotide kinase][67703:67877:−;HP][68172:68484:−;HP][68492:69650:−;T4 RNA ligase 1][69630:69999:−;Endonuclease II][70562:71738:−;Ribonucleoside-diphosphate reductase subunit beta][71774:74027:−;Ribonucleoside-diphosphate reductase large subunit][74066:74942:−;Thymidylate synthase][74943:75522:−;HP][75518:75776:−;HP][75772:76003:−;HP][75999:76290:−;HP][76349:78059:−;HP][78132:78324:−;HP][78323:80021:−;Exonuclease subunit 2][80278:81325:−;Exonuclease subunit 1][81680:81896:−;HP][81892:82420:−;RNA polymerase sigma factor][82724:83660:+;Ribonuclease H][83669:83933:+;Double-stranded DNA-binding protein][83936:84182:+;RNA polymerase-associated protein Gp33][84259:84838:+;Protein Gp59][84853:85825:+;HP][85880:86150:+;HP][86176:86842:+;DNA polymerase clamp][86900:87899:+;Sliding-clamp-loader gp44 subunit][87901:88465:+;Sliding-clamp-loader gp44 subunit][88468:88831:+;Translation repressor protein][88899:89187:+;HP][89559:92259:+;DNA-directed DNA polymerase][92333:93491:+;Recombination and repair protein][93528:93849:+;HP][93858:95295:+;ATP-dependent helicase 41][95693:95948:+;HP][96040:96277:+;HP][96646:97378:+;HP][97383:97872:+;HP][97868:98087:+;HP][98142:98403:+;HP][98406:99432:+;DNA primase][99439:99976:+;HP][100157:100448:+;HP][100444:101773:+;ATP-dependent DNA helicase dda][101797:102106:+;HP][102106:102391:+;HP][102387:103059:+;Exodeoxyribonuclease][103055:103337:+;HP][103553:103778:+;HP][103774:104077:+;HP][104786:105116:+;HP][105155:105752:+;HP][105748:106027:+;HP][106013:106598:+;HP][106620:107061:+;HP][107060: 107225:+;HP][107292:109191:+;HP][109190:110477:+;HP][110548:111103:+;HP][111106:111343:+;HP][111353:113615:+;HP][113614:114514:+;HP][114559:114934:+;HP][114908:115346:+;HP][115382:115631:+;HP][115675:115810:+;HP][115784:116117:+;HP][116113:116341:+; HP][116421:117219:+;HP][117218:117509:+;HP][117775:118423:−;Holin][118945:122659:−;HP][122667:123336:−;Long-tail fiber protein gp36][123385:124510:−;Long-tail fiber protein gp35][124509:128283:−;Long-tail fiber proximal subunit][128362:128662:−;HP][128658:128940:−;Glutaredoxin][128899:129568:−;HP][129610:130570:−;HP][130639:131131:−;HP][131795:131987:−;HP][132319:132526:−;HP][132525:133020:−;HP][133327:135451:−;Anaerobic ribonucleoside-triphosphate reductase][135770:136253:−;Recombination endonuclease VII][136285:136555:−;Glutaredoxin][136563:137415:−;DNA adenine methylase][137700:139134:−;HP][139161:139611:−;HP][139620:139881:−;HP][140470:141058:−;HP][141047:141566:−;HP][141569:142589:−;RNA ligase 2][142592:143117:−;HP][143116:143473:−;HP][143474:143801:−;HP][143797:143974:−;HP][143970:144288:−;HP][144320:145196:−;HP][145310:146150:+;HP][146199:146664:+;HP][146696:147215:−;HP][147223:147505:−;HP][147515:148049:−;Highly immunogenic outer capsid protein][148077:148647:−;HP][148686:148998:−;HP][149090:149714:−;HP][149943:151284:+;ATP-dependent DNA helicase uvsW][151292:151526:+;ATP-dependent DNA helicase uvsW][151827:152004:−;HP][152003:152423:−;Recombination protein uvsY][152727:154017:−;Capsid vertex protein][154049:154688:−;HP][154779:156354:−;Major capsid protein][156373:157162:−;Capsid assembly scaffolding protein][157194:157842:−;Prohead core protein protease][157844:158249:−;Prohead assembly protein gp68][158499:160074:−;Portal protein][160129:160615:−;Tail tube protein gp19][160663:162655:−;Tail sheath protein][162674:164504:−;Terminase %2C large subunit][164472:165012:−;Terminase %2C small subunit][165011:165788:−;Tail completion protein gp15][166526:167273:−;Neck protein gp14][167282:168209:−;Neck protein gp13][168247:169999:−;Fibritin][170012:171398:−;Short tail fiber protein gp12][171407:172076:−;Baseplate wedge protein gpl1][172075:173893:−;Baseplate wedge protein gp10][173889:174753:−;Baseplate protein gp9][174762:175755:−;Baseplate wedge protein gp8][175755:176415:−;Baseplate wedge protein gp7]

[0394] Essential genes of phage CT-120-2-11: [224:749:+;HP][758:2360:+;HP][2405:3716:+;HP][3705:4473:+;HP][4472:5603:+;HP][5654:6164:+;HP][6277:7237:+;HP][7328:7616:+;HP][7669:8086:+;HP][8091:8469:+;HP][8461:8899:+; HP][8888:9323:+;HP][9309:9996:+;HP][10048:10702:+;HP][10778:11105:+;HP][11455:14422: +;HP][14424:14769:+;HP][14839:15592:+;Tail tip protein L][15593:16331:+;HP][16305:16908:+;HP][16995:20442:+;HP][24262:24727:−;HP][24763:25420:−;HP][25479:26526:−;HP][27021:27981:−;HP][28056:28458:−;HP][28549:30586:+;HP][30582:30990:+;HP][31167:31896:+;HP][31899:32136:+;HP][32200:32437:+;HP][32433:32685:+;HP][32780:33911:+;HP][33949:34438:+;HP][34434:35016:+;HP][35142:35358:+;HP][35359:35842:+;Lysozyme][35838:36264:+;HP][36333:36795:−;HP][36798:38367:−;HP][38492:38930:−;HP][38930:39047:−;HP][39102:39312:−;HP][39384:40077:−;HP][40073:40301:−;HP][40373:40751:−;HP][40750:40990:−;HP][40986:41181:−;HP][41253:41535:−;HP][42199:42733:+;HP][42735:43041:+;HP][43113:43266:+;HP][44099:44312:+;HP][44324:44582:+;HP][44578:44776:+;HP][44849:45221:+;HP][45230:45533:+;HP][45532:45778:+;HP][45774:45960:+;HP][46040:46259:+;HP][46258:46747:+;HP][46822:47143:+;HP][47208:47400: +;HP][47511:47724:+;HP][47720:48296:+;HP][48365:48602:+;HP][48589:48823:+;HP]

[0395] Essential genes of phage KP10-85: [373:931:+;Deoxycytidylate deaminase][946:1288:+;Capsid assembly protein Gp31][1298:1550:+;HP][1865:2147:+;HP][2156:2579:+;HP][2853:3186:+;HP][3196:3559:+;HP][3558:3828:+;HP][3954:4248:+;HP][4877:5318:+;HP][5314:5578:+;HP][5579:5801:+;HP][5881:6412:+;HP][6392:7922:+;HP][8657:8930:+;HP][9343:9643:+;HP][9629:10007:+;HP][10003: 11113:−;HP][11182:11758:+;HP][11754:13536:+;HP][13546:14620:+;Baseplate tail-tube junction protein gp48][14629:15493:+;Baseplate tail-tube junction protein gp54][15521:16265:+;HP][16261:16816:+;HP][16816:17209:+;Baseplate wedge protein gp25][17243:17699:−;HP][17706:17931:−;HP][18288:18573:−;HP][18588:19059:−;HP][19210:19828:−;HP][19899:22116:−;HP][22123:22444:−;HP][22443:22959:−;HP][23184:23472:−;HP][23678:23957:−;HP][24015:24927:−;HP][24923:25181:−;HP][25180:25426:−;HP][25422:26430:−;HP][26429:26807:−;HP][26803:27031:−;HP][27635:27908:−;HP][28273:29335:−;HP][29511:30426:−;HP][30497:30920:−;HP][30891:31173:−;HP][31279:31672:−;HP][31688:32297:−;HP][32479:32695:−;HP][32687:32975:−;HP][32977:33451:−;HP][33757:34081:−;HP][34090:34681:−;HP][34834:35230:−;HP][35297:35939:−;HP][36003:36558:−;HP][36569:36767:−;HP][36803:38150:−;HP][38159:38684:−;HP][38683:39142:−;HP][39173:39569:−;L-alanyl-D-glutamate peptidase][39636:40038:−;HP][40092:40416:−;HP][40455:40719:−;HP][40788:41049:−;HP][41050:41482:−;HP][41662:42010:−;HP][41990:42356:−;HP][42638:43784:−;HP][43794:44001:−;HP][43997:44261:−;HP][44832:45084:−;HP][45155:45434:−;HP][45913:46171:−;HP][47326:47527:−;HP][48514:49042:−;HP][49041:49365:−;HP][49393:49651:−;HP][49652:50036:−;HP][50046:50454:−;HP][50696:50948:−;HP][50940:51234:−;HP][51230:51566:−;HP][51576:51717:−;HP][51806:51947:−;HP][52012:52552:−;HP][52559:53183:−;HP][53509:54205:−;Deoxynucleotide monophosphate kinase][54204:54735:−;Tail tube terminator protein][55104:55893:+;HP][55929:56784:−;HP][56799:57159:−;HP][57512:57872:+;Baseplate wedge protein gp53][57868:59638:+;Baseplate central spike complex protein gp5][59639:61706:+;HP][61737:63663:+;Baseplate wedge protein gp6][63743:66830:+;Baseplate wedge protein gp7][66830:67823:+;Baseplate wedge protein gp8][67832:68696:+;Baseplate protein gp9][68692:70510:+;Baseplate wedge protein gp10][70509:71178:+;Baseplate wedge protein gp11][71187:72573:+;Short tail fiber protein gp12][72583:74335:+;Fibritin][74373:75300:+;Neck protein gp13][75309:76056:+;Neck protein gp14][76135:76960:+;Tail completion protein gp15][76959:77499:+;Terminase %2C small subunit][77467:79297:+;Terminase %2C large subunit][79316:81308:+;Tail sheath protein][81356:81842:+;Tail tube protein gp19][81897:83472:+;Portal protein][83723:84128:+;Prohead assembly protein gp68][84130:84778:+;Prohead core protein protease][84810:85599:+;Capsid assembly scaffolding protein][85618:87187:+;Major capsid protein][87272:87908:+;HP][87940:89230:+;Capsid vertex protein][89534:89954:+;Recombination protein uvsY][89953:90130:+;HP][90734:90968:−;ATP-dependent DNA helicase uvsW][90976:92317:−;ATP-dependent DNA helicase uvsW][92546:93125:+;HP][93217:93529:+;HP][93568:94138:+;HP][94166:94700:+;Highly immunogenic outer capsid protein]194710:94986:+;Highly immunogenic outer capsid protein][94999:95518:+;HP][95550:96015:−;HP][96064:96904:−;HP][97018:97894:+;HP][97926:98244:+;HP][98240:98417:+;HP][98413:98740:+;HP][98741:99098:+;HP][99097:99622:+;HP][99625:100645:+;RNA ligase 2][100634:101216:+;HP][101805:102066:+;HP][102075:102525:+;HP][102552:103986:+;HP][104271:105123:+;DNA adenine methylase][105131:105407:+;Glutaredoxin][105438:105921:+;Recombination endonuclease VII][106240:108364:+;Anaerobic ribonucleoside-triphosphate reductase][108670:109168:+;HP][109167:109374:+;HP][109706:109901:+;HP][109897:110425:+;HP][110421:110913:+;HP][110982:111942:+;HP][111984:112653:+;HP][112612:112894:+; Glutaredoxin][112890:113190:+;HP][113269:117043:+;Long-tail fiber proximal subunit][117042:118167:+;Long-tail fiber protein gp35][118216:118885:+;Long-tail fiber protein gp36][118893:122622:+;HP][123303:123951:+;Holin][124217:124508:−;HP][124507:125305:−;HP][125385:125613:−;HP][125609:125939:−;HP][125913:126051:−;HP][126322:126571:−;HP][126607:127045:−;HP][127019:127394:−;HP][127439:128339:−;HP][128338:130600:−;HP][130610:130847:−;HP][130850:131405:−;HP][131476:132763:−;HP][132762:134661:−;HP][134728:134893:−;HP][134892:135333:−;HP][135355:135940:−;HP][135926:136205:−;HP][136201:136798:−;HP][136837:137167:−;HP][137875:138178:−;HP][138615:138897:−;HP][138893:139565:−;Exodeoxyribonuclease][139561:139846:−;HP][139846:140155:−;HP][140179:141508:−;ATP-dependent DNA helicase dda][141504:141795:−;HP][141976:142513:−;HP][142520:143546:−;DNA primase][143549:143810:−;HP][143865:144084:−;HP][144080:144569:−;HP][144574:145306:−;HP][145675:145912:−;HP][146003:146258:−;HP][146650:148087:−;ATP-dependent helicase 41][148096:148417:−;HP][148452:149610:−;Recombination and repair protein][149684:152384:−;DNA-directed DNA polymerase][152756:153044:−;HP][153112:153475:−;Translation repressor protein][153478:154042:−;Sliding-clamp-loader gp44 subunit][154044:155043:−;Sliding-clamp-loader gp44 subunit][155101:155767:−;DNA polymerase clamp][155793:156063:−;HP][156118:157090:−;HP][157105:157684:−;ProteinGp59][157761:158007:−;RNApolymerase-associated protein Gp33][158010:158274:−;Double-stranded DNA-binding protein][158283:159219:−;Ribonuclease H][159523:160051:+;RNA polymerase sigma factor][160047:160263:+;HP][160618:161665:+;Exonuclease subunit 1][161922:163614:+;Exonuclease subunit 2][164376:164571:+;HP][164644:166354:+;HP][166413:166704:+;HP][166700:166931:+;HP][166927:167185:+;HP][167181:167760:+;HP][167761:168637:+;Thymidylate synthase]1168676:170929:+;Ribonucleoside-diphosphate reductase large subunit][170965:172141:+;Ribonucleoside-diphosphate reductase subunit beta][172436:172802:+;Endonuclease II]1172782:173940:+;T4 RNA ligase 1][173948:174260:+;HP][174256:174574:+;HP][174558:174732:+;HP][174728:175613:+;Polyn ucleotide kinase][175665:175953:+;HP]

[0396] Essential genes of phage KP10-87: [236:860:−;HP][1186:1882:−;Deoxynucleotide monophosphate kinase][1881:2412:−;Tail tube terminator protein][2781:3570:+;HP][3606:4461:−;HP][4476:4944:−;HP][5189:5549:+;Baseplate wedge protein gp53][5545:7315:+;Baseplate central spike complex protein gp5][7319:9386:+;HP][9417:11343:+;Baseplate wedge protein gp6][11423:14510:+;Baseplate wedge protein gp7][14510:15503:+;Baseplate wedge protein gp8][15512:16376:+;Baseplate protein gp9][16372:18190:+;Baseplate wedge protein gp10][18189:18858:+;Baseplate wedge protein gp11][18867:20253:+;Short tail fiber protein gp12][20266:22018:+;Fibritin][22056:22983:+;Neck protein gp13][22992:23739:+;Neck protein gp14][23819:24644:+;Tail completion protein gp15][24643:25183:+;Terminase %2C small subunit][25151:26981:+;Terminase %2C large subunit][27000:28992:+;Tail sheath protein][29040:29526:+;Tail tube protein gp19][29581:31156:+;Portal protein][31406:31811:+;Prohead assembly protein gp68][31813:32461:+;Prohead core protein protease][32493:33282:+;Capsid assembly scaffolding protein][33301:34870:+;Major capsid protein][34955:35591:+;HP][35623:36913:+;Capsid vertex protein][37217:37637:+;Recombination protein uvsY][37636:37813:+;HP][38142:38376:−;ATP-dependent DNA helicase uvsW][38384:39725:−;ATP-dependent DNA helicase uvsW][39954:40578:+;HP][40670:40982:+;HP][41021:41591:+;HP][42691:42967:+;Highly immunogenic outer capsid protein][42980:43499:+;HP][43531:43996:−;HP][44045:44885:−;HP][44999:45875:+;HP][45907:46225:+;HP][46221:46398:+;HP][46394:46721:+;HP][46722:47079:+;HP][47078:47603:+;HP][47606:48626:+;RNA ligase 2][48615:49197:+;HP][49786:50047:+;HP][50056:50506:+;HP][50533:51967:+;HP][52252:53104:+;DNA adenine methylase][53112:53388:+;Glutaredoxin][53419:53902:+;Recombination endonuclease VII][53898:56022:+;Anaerobic ribonucleoside-triphosphate reductase][56328:56826:+;HP][56825:57032:+;HP][57364:57559:+;HP][57555:58083:+;HP][58079:58571:+;HP][58640:59600:+;HP][59642:60311:+;HP][60270:60552:+;Glutaredoxin][60548 :60848:+;HP][60927:64701:+;Long-tail fiber proximal subunit][64700:65825:+;Long-tail fiber protein gp35][65874:66543:+;Long-tail fiber protein gp36][66551:70517:+;HP][71199:71847:+;Holin][72113:72404:−;HP][72403:73201:−;HP][73281:73509:−;HP][73505:73838:−;HP][73812:73947:−;HP][73991:74240:−;HP][74276:74714:−;HP][74688:75063:−;HP][75108:76008:−;HP][76007:78269:−;HP][78279:78516:−;HP][78519:79074:−;HP][79145:80432:−;HP][80431:82330:−;HP][82397:82562:−;HP][82561:83002:−;HP][83024:83609:−;HP][83595:83874:−;HP][83870:84467:−;HP][84506:84836:−;HP][85545:85848:−;HP][85844:86069:−;HP][86285:86567:−;HP][86563:87235:−;Exodeoxyribonuclease][87231:87516:−;HP][87516:87825:−;HP][87849:89178:−;ATP-dependent DNA helicase dda][89174:89465:−;HP][90518:91055:−;HP][91062:92088:−;DNA primase][92091:92352:−;HP][92407:92626:−;HP][92622:93111:−;HP][93116:93848:−;HP][94211:94448:−;HP][94539:94794:−;HP][95384:96821:−;ATP-dependent helicase 41][96830:97151:−;HP][97187:98345:−;Recombination and repair protein][98419:101119:−;DNA-directed DNA polymerase][101491:101779:−;HP][101847:102210:−;Translation repressor protein][102213:102777:−;Sliding-clamp-loader gp44 subunit][102779:103778:−;Sliding-clamp-loader gp44 subunit][103836:104502:−;DNA polymerase clamp][104528:104798:−;HP][104853:105825:−;HP][105840:106419:−;Protein Gp59][106496:106742:−;RNA polymerase-associated protein Gp33][106745:107009:−;Double-stranded DNA-binding protein][107018:107954:−;Ribonuclease H][108258:108786:+;RNA polymerase sigma factor][108782:108998:+;HP][109353:110400:+;Exonuclease subunit 1][110657:112355:+;Exonuclease subunit 2][112354:112546:+;HP][112619:114329:+;HP][114388:114679:+;HP][114675:114906:+;HP][114902:115160:+;HP][115156:115735:+;HP][115736:116612:+;Thymidylate synthase][116651:118904:+;Ribonucleoside-diphosphate reductase large subunit][118940:120116:+;Ribonucleoside-diphosphate reductase subunit beta][120411:120777:+;Endonuclease H1][120757:121915:+;T4 RNA ligase 1][121923:122235:+;HP][122530:122704:+;HP][122700:123585:+;Polynucleotide kinase][123637:123925:+;HP][123921:124173:+;HP][124388:124946:+;Deoxycytidylate deaminase][124961:125303:+;Capsid assembly protein Gp31][125313:125565:+;HP][125879:126161:+;HP][126170:126593:+;HP][126634:127201:+; HP][127211:127574:+;HP][127573:127843:+;HP][127967:128261:+;HP][128890:129331:+;HP][129327:129591:+;HP][129592:129814:+;HP][129894:130425:+;HP][130405:131935:+;HP][133293:133584:+;HP][133892:134270:+;HP][134266:135376:−;HP][135445:136021:+;HP][136017:137799:+;HP][137809:138883:+;Baseplate tail-tube junction protein gp48][138892:139756:+;Baseplate tail-tube junction protein gp54][139784:140528:+;HP][140524:141079:+;HP][141079:141472:+;Baseplate wedge protein gp25][141506:141962:−;HP][141969:142194:−;HP][142551:142836:−;HP][142851:143322:−;HP][143473:144091:−;HP][144162:146379:−;HP][146386:146707:−;HP][146706:147222:−;HP][147447:147735:−;HP][147941:148220:−;HP][148278:148812:−;HP][148793:149717:−;HP][149713:149971:−;HP][149970:150216:−;HP][150212:151220:−;HP][151219:151597:−;HP][151593:151821:−;HP][152425:152695:−;HP][152763:153822:−;HP][153998:154913:−;HP][154984:155407:−;HP][155378:155660:−;HP][155766:156159:−;HP][156175:156784:−;HP][156966:157254:−;HP][157256:157730:−;HP][158178:158502:−;HP][158511:159102:−;HP][159098:159245:−;HP][159312:159954:−;HP][160018:160573:−;HP][160585:160783:−;HP][160820:162167:−;HP][162176:162701:−;HP][162700:163159:−;HP][163190:163586:−;L-alanyl-D-glutamate peptidase][163654:164056:−;HP][164110:164434:−;HP][164473:164737:−;HP][164806:165067:−;HP][165068:165500:−;HP][165947:166295:−;HP][166275:166620:−;HP][166616:167762:−;HP][167772:167979:−;HP][167975:168239:−;HP][168810:169062:−;HP][169133:169412:−;HP][169495:169753:−;HP][170908:171109:−;HP][172096:172624:−;HP][172623:172947:−;HP][172975:173233:−;HP][173234:173618:−;HP][173628:174036:−;HP][174278:174530:−;HP][174522:174816:−;HP][174812:175148:−;HP][175158:175299:−;HP][175594:175951:−;HP]

[0397] Essential genes of phage KP10-94: [1027:1675:+;Holin][1941:2232:−;HP][2231:3029:−;HP][3109:3337:−;HP][3333:3666:−;HP][3640:3778:−;HP][3822:4071:−;HP][4107:4545:−;HP][4519:4894:−;HP][4939:5839:−;HP][5838:8100:−;HP][8110:8347:−;HP][8350:8905:−;HP][8976:10263:−;HP][10262:12161:−;HP][12228:12393:−;HP][12392:12833:−;HP][12855:13449:−;HP][13435:13714:−;HP][13710:14307:−;HP][14346:14676:−;HP][15385:15688:−;HP][15684:15909:−;HP][16125:16407:−;HP][16403:17075:−;Exodeoxyribonuclease][17071:17356:−;HP][17356:17665:−;HP][17689:19018:−;ATP-dependent DNA helicase dda][19014:19305:−;HP][20358:20895:−;HP][20902:21928:−;DNA primase][21931:22192:−;HP][22247:22466:−;HP][22462:22951:−;HP][22956:23688:−;HP][24051:24288:−;HP][24381:24636:−;HP][25028:26465:−;ATP-dependent helicase 41][26474:26795:−;HP][26832:27990:−;Recombination and repair protein][28064:30764:−;DNA-directed DNA polymerase][31136:31424:−;HP][31492:31855:−;Translation repressor protein][31858:32422:−;Sliding-clamp-loader gp44 subunit][32424:33423:−;Sliding-clamp-loader gp44 subunit][33481:34147:−;DNA polymerase clamp][34173:34443:−;HP][34498:35470:−;HP][35485:36064:−;Protein Gp59][36141:36387:−;RNA polymerase-associated protein Gp33][36390:36654:−;Double-stranded DNA-binding protein][36663:37599:−;Ribonuclease H][37903:38431:+;RNA polymerase sigma factor][38427:38643:+;HP][38998:40045:+;Exonuclease subunit 1][40302:42000:+;Exonuclease subunit 2][41999:42191:+;HP][42264:43974:+;HP][44033:44324:+;HP][44320:44551:+;HP][44547:448 05:+;HP][44801:45380:+;HP][45381:46257:+;Thymidylate synthase][46296:48549:+;Ribonucleoside-diphosphate reductase large subunit][48585:49761:+;Ribonucleoside-diphosphate reductase subunit beta][50056:50422:+;Endonuclease II][50402:51560:+;T4 RNA ligase 1][51568:51880:+;HP][52175:52349:+;HP][52345:53230:+;Polynucleotide kinase][53283:53571:+;HP][53567:53819:+;HP][54034:54592:+;Deoxycytidylate deaminase][54607:54949:+;Capsid assembly protein Gp31][54959:55211:+;HP][55525:55807:+;HP][55816:56239:+;HP][56280:56847:+;HP][56857 :57220:+;HP][57219:57489:+;HP][57614:57908:+;HP][58537:58978:+;HP][58974:59238:+;HP][59239:59461:+;HP][59541:60072:+;HP][60052:61582:+;HP][62940:63231:+;HP][63539:63917:+;HP][63913:65023:−;HP][65092:65668:+;HP][65664:67446:+;HP][67456:68530:+;Baseplate tail-tube junction protein gp48][68539:69403:+;Baseplate tail-tube junction protein gp54][69431:70175:+;HP][70171:70726:+;HP][70726:71119:+;Baseplate wedge protein gp25][71153:71609:−;HP][71616:71841:−;HP][72198:72483:−;HP][72498:72969:−;HP][73120:73738:−;HP][73807:76024:−;HP][76031:76352:−;HP][76351:76867:−;HP][77092:77380:−;HP][77586:77865:−;HP][77923:78835:−;HP][78831:79089:−;HP][79088:79334:−;HP][79330:80338:−;HP][80337:80715:−;HP][80711:80939:−;HP][81543:81813:−;HP][81881:82940:−;HP][83116:84031:−;HP][84102:84525:−;HP][84496:84778:−;HP][84884:85277:−;HP][85293:85902:−;HP][86084:86372:−;HP][86374:86848:−;HP][87145:87469:−;HP][87478:88069:−;HP][88065:88212:−;HP][88222:88618:−;HP][88685:89327:−;HP][89391:89946:−;HP][89958:90156:−;HP][90191:91538:−;HP][91547:92072:−;HP][92071:92530:−;HP][92561:92957:−;L-alanyl-D-glutamate peptidase][93024:93426:−;HP][93480:93804:−;HP][93843:94107:−;HP][94176:94437:−;HP][94438:94870:−;HP][95050:95398:−;HP][95378:95723:−;HP][95719:96874:−;HP][97607:97862:−;HP][97861:98008:−;HP][98004:98256:−;HP][98327:98606:−;HP][98689:98947:−;HP][100102:100303:−;HP][101290:101818:−;HP][101817:102141:−;HP][102169:102427:−;HP][102428:102812:−;HP][102822:103230:−;HP][103472:103724:−;HP][103716:104010:−;HP][104006:104342:−;HP][104352:104493:−;HP][104788:105328:−;HP][105335:105959:−;HP][106285:106981:−;Deoxynucleotide monophosphate kinase][106980:107511:−;Tail tube terminator protein][107880:108669:+;HP][108705:109560:−;HP][109575:109935:−;HP][110288:110648:+;Baseplate wedge protein gp53][110644:112414:+;Baseplate central spike complex protein gp5][112415:114482:+;HP][114513:116439:+;Baseplate wedge protein gp6][116519:119606:+;Baseplate wedge protein gp7][119606:120599:+;Baseplate wedge protein gp8][120608:121472:+;Baseplate protein gp9][121468:123286:+;Baseplate wedge protein gp10][123285:123954:+;Baseplate wedge protein gp11][123963:125349:+;Short tail fiber protein gp12][125359:127111:+;Fibritin][127149:128076:+;Neck protein gp13][128085:128832:+;Neck protein gp14][129570:130347:+;Tail completion protein gp15][130346:130886:+;Terminase %2C small subunit][130854:132684:+;Terminase %2C large subunit][132703:134695:+;Tail sheath protein][134743:135229:+;Tail tube protein gp19][135284:136859:+;Portal protein][137110:137515:+;Prohead assembly protein gp68][137517:138165:+;Prohead core protein protease][138197:138986:+;Capsid assembly scaffolding protein][139005:140574:+;Major capsid protein][140659:141295:+;HP][141327:142617:+;Capsid vertex protein][142918:143338:+;Recombination protein uvsY][143337:143514:+;HP][143948:144179:−;ATP-dependent DNA helicase uvsW][144187:145528:−;ATP-dependent DNA helicase uvsW][145757:146336:+;HP][146428:146740:+;HP][146779:147349:+;HP][148449:148725:+; Highly immunogenic outer capsid protein][148738:149257:+;HP][149288:149753:−;HP][149802:150642:−;HP][150756:151632:+;HP][151664:151982:+;HP][151978:152155:+;HP][152151:152478:+;HP][152479:152836:+;HP][152835:153360:+;HP][153363:154383:+;RNA ligase 2][154386:154905:+;HP][154894:155482:+;HP][156071:156332:+;HP][156341:156791:+;HP][156818:158252:+;HP][158537:159389:+;DNA adenine methylase][159397:159673:+;Glutaredoxin][159704:160187:+;Recombination endonuclease VII][160183:162307:+;Anaerobic ribonucleoside-triphosphate reductase][162614:163109:+;HP][163108:163315:+;HP][164145:164340:+;HP][164336:164864:+;HP][164860:165352:+;HP][165421:166381:+;HP][166423:167092:+;HP][167051:167333:+; Glutaredoxin][167329:167635:+;HP][167707:171481:+;Long-tail fiber proximal subunit][171480:172605:+;Long-tail fiber protein gp35][172654:173323:+;Long-tail fiber protein gp36]

[0398] Essential genes of phage KP10-80: [231:432:+;HP][431:1562:+;HP][1613:2123:+;HP][2236:3205:+;HP][3681:3969:+;HP][4022:4439:+;HP][4444:4822:+;HP][4814:5252:+;HP][5241:5673:+;HP][5659:6346:+;HP][6398:7052:+; HP][7128:7455:+;HP][7805:10775:+;HP][10777:11122:+;HP][11191:11944:+;Tail tip protein L][11945:12683:+;HP][12657:13260:+;HP][13347:16773:+;HP][20590:21055:−;HP][21091:21748:−;HP][21807:22854:−;HP][23349:24309:−;HP][24384:24786:−;HP][24877:26914:+;HP][26910:27318:+;HP][27495:28224:+;HP][28227:28464:+;HP][28528:2 8765:+;HP][28761:29013:+;HP][29108:30239:+;HP][30277:30766:+;HP][30762:31344:+;HP][31470:31686:+;HP][31687:32170:+;Lysozyme][32166:32592:+;HP][32661:33123:−;HP][33126:34695:−;HP][34820:35258:−;HP][35258:35375:−;HP][35430:35640:−;HP][35712:36405:−;HP][36401:36629:−;HP][36701:37079:−;HP][37078:37318:−;HP][37314:37509:−;HP][37581:37863:−;HP][38527:39061:+;HP][39063:39369:+;HP][39441:39594:+;HP][40427:40640:+;HP][40652:40910:+;HP][40906:41104:+;HP][41177:41549:+;HP][41558:41861:+;HP][41860:42106:+;HP][42102:42288:+;HP][42368:42587:+;HP][42586:43075:+;HP][43150:43471:+;HP][43536:43728: +;HP][43839:44052:+;HP][44048:44624:+;HP][44693:44930:+;HP][44917:45151:+;HP][45467: 45731:+;HP][45810:46335:+;HP][46344:47946:+;HP][47991:49302:+;HP]

[0399] Essential genes of phage KP10-4: [68:713:+;HP][762:1227:+;HP][1259:1778:−;HP][1791:2067:−;Highly immunogenic outer capsid protein][2077:2611:−;Highly immunogenic outer capsid protein][2639:3209:−;HP][3248:3560:−;HP][3651:4230:−;HP][4459:5800:+;ATP-dependent DNA helicase uvsW][5808:6042:+;ATP-dependent DNA helicase uvsW][6369:6546:−;HP][6545:6965:−;Recombination protein uvsY][7269:8559:−;Capsid vertex protein][8646:10215:−;Major capsid protein][10234:11023:−;Capsid assembly scaffolding protein][11055:11703:−;Prohead core protein protease][11705:12110:−;Prohead assembly protein gp68][12361:13936:−;Portal protein][13991:14477:−;Tail tube protein gp19][14525:16517:−;Tail sheath protein][16536:18366:−;Terminase %2C large subunit][18334:18877:−;Terminase %2C small subunit][18873:19698:−;Tail completion protein gp15][19778:20525:−;Neck protein gp14][20534:21461:−;Neck protein gp13][21499:23251:−;Fibritin][23261:24647:−;Short tail fiber protein gp12][24656:25325:−;Baseplate wedge protein gp11][25324:27142:−;Baseplate wedge protein gp10][27138:28002:−;Baseplate protein gp9][28011:29004:−;Baseplate wedge protein gp8][29004:32091:−;Baseplate wedge protein gp7][32171:34097:−;Baseplate wedge protein gp6][34128:36195:−;HP][36196:37966:−;Baseplate central spike complex protein gp5][37962:38322:−;Baseplate wedge protein gp53][38675:39035:+;HP][39050:39905:+;HP][39941:40730:−;HP][41099:41630:+;Tail tube terminator protein][41629:42325:+;Deoxynucleotide monophosphate kinase][42652:43276:+;HP][43283:43823:+;HP][43888:44029:+;HP][44118:44259:+;HP][44269:44605:+;HP][44601:44895:+;HP][44887:45139:+;HP][45381:45789:+;HP][45799:46183:+;H P][46184:46442:+;HP][46470:46803:+;HP][46792:47320:+;HP][48307:48508:+;HP][49663:49924:+;HP][50404:50683:+;HP][50754:51006:+;HP][51758:52016:+;HP][52012:52219:+;HP][52229:53375:+;HP][53371:53719:+;HP][53696:54050:+;HP][54499:54931:+;HP][54932:55193:+; HP][55262:55526:+;HP][55565:55889:+;HP][55943:56345:+;HP][56412:56808:+;L-alanyl-D-glutamate peptidase][56839:57298:+;HP][57297:57822:+;HP][57831:59178:+;HP][59214:59412:+;HP][59423:59978:+;HP][60041:60683:+;HP][60750:61146:+;HP][61299:61890:+;HP][61899:62223:+; HP][62520:62994:+;HP][62996:63284:+;HP][63276:63492:+;HP][63674:64283:+;HP][64299:64692:+;HP][64798:65080:+;HP][65051:65474:+;HP][65545:66460:+;HP][66636:67695:+;HP][67762:68032:+;HP][68636:68864:+;HP][68860:69238:+;HP][69237:70245:+;HP][70241:70487: +;HP][70486:70750:+;HP][70746:71658:+;HP][71716:71995:+;HP][72201:72489:+;HP][72714: 73230:+;HP][73229:73550:+;HP][73557:75774:+;HP][75845:76463:+;HP][76614:77085:+;HP][77100:77385:+;HP][77742:77967:+;HP][77974:78430:+;HP][78464:78857:−;Baseplate wedge protein gp25][78857:79412:−;HP][79408:80152:−;HP][80180:81044:−;Baseplate tail-tube junction protein gp54][81053:82127:−;Baseplate tail-tube junction protein gp48][82137:83931:−;HP][83927:84503:−;HP][84572:85682:+;HP][85678:86056:−;HP][86364:86655:−;HP][88013:89543:−;HP][90624:90846:−;HP][90847:91111:−;HP][91107:91548:−;HP][92248:92542:−;HP][92668:92938:−;HP][92937:93300:−;HP][93310:93877:−;HP][93918:94341:−;HP][94350:94632:−;HP][94945:95197:−;HP][95207:95549:−;Capsid assembly protein Gp31][95564:96119:−;Deoxycytidylate deaminase][96337:96589:−;HP][96585:96873:−;HP][96925:97810:−;Polynucleotide kinase][97806:97980:−;HP][98275:98587:−;HP][98595:99753:−;T4 RNA ligase 1][99733:100099:−;Endonuclease II][100394:101570:−;Ribonucleoside-diphosphate reductase subunit beta][101606:103859:−;Ribonucleoside-diphosphate reductase large subunit][103898:104774:−;Thymidylate synthase][104775:105354:−;HP][105350:105608:−;HP][105604:105835:−;HP][105831:106122:−;HP][106181:107891:−;HP][107964:108156:−;HP][108155:109853:−;Exonuclease subunit 2][110110:111157:−;Exonuclease subunit 1][111512:111728:−;HP][111724:112252:−;RNA polymerase sigma factor][112556:113492:+;Ribonuclease H][113501:113765:+;Double-stranded DNA-binding protein][113768:114014:+;RNA polymerase-associated protein Gp33][114091:114670:+;Protein Gp59][114685:115657:+;HP][115712:115982:+;HP][116008:116674:+;DNA polymerase clamp][116732:117731:+;Sliding-clamp-loader gp44 subunit][117733:118297:+;Sliding-clamp-loader gp44 subunit][118300:118663:+;Translation repressor protein][118729:119017:+;HP][119389:122089:+;DNA-directed DNA polymerase][122163:123321:+;Recombination and repair protein][123358:123679:+;HP][123688:125125:+;ATP-dependent helicase 41][125517:125772:+;HP][125863:126100:+;HP][126469:127201:+;HP][127206:127695:+;HP][127691:127910:+;HP][127965:128226:+;HP][128229:129255:+;DNA primase][129262:129799:+;HP][129980:130271:+;HP][130267:131596:+;ATP-dependent DNA helicase dda][131620:131929:+;HP][131929:132214:+;HP][132210:132882:+;Exodeoxyribonuclease][132878:133160:+;HP][133597:133900:+;HP][134609:134939:+;HP][134978:135575:+;HP][135571:135850:+;HP][135836:136421:+;HP][136443:136884:+;HP][136883:137048:+;HP][137115: 139014:+;HP][139013:140300:+;HP][140371:140926:+;HP][140929:141166:+;HP][141176:143438:+;HP][143437:144337:+;HP][144382:144757:+;HP][144731:145169:+;HP][145205:145454:+;HP][145498:145729:+;HP][145725:145863:+;HP][145837:146167:+;HP][146163:146391:+; HP][146471:147269:+;HP][147268:147559:+;HP][147825:148473:−;Holin][149157:153174:−;HP][153182:153851:−;Long-tail fiber protein gp36][153900:155025:−;Long-tail fiber protein gp35][155024:158798:−;Long-tail fiber proximal subunit][158877:159177:−;HP][159173:159455:−;Glutaredoxin][159414:160083:−;HP][160125:161085:−;HP][161154:161646:−;HP][161642:162170:−;HP][162166:162361:−;HP][163191:163398:−;HP][163397:163895:−;HP][164201:166325:−;Anaerobic ribonucleoside-triphosphate reductase][166321:166804:−;Recombination endonuclease VII][166835:167111:−;Glutaredoxin][167119:167971:−;DNA adenine methylase][168256:169690:−;HP][169717:170167:−;HP][170176:170437:−;HP][171026:171608:−;HP][171597:172617:−;RNA ligase 2][172620:173145:−;HP][173144:173501:−;HP][173502:173829:−;HP][173825:174002:−;HP][173998:174316:−;HP][174348:175224:−;HP]

[0400] Essential genes of phage CT-227-KP4M1-7: [1474:2113:−;Baseplate wedge protein gp53][2220:2916:+;HP][2999:3356:+;HP][3355:4183:+;HP][4182:4785:+;Tail tube terminator protein][4852:5527:+;Deoxynucleotide monophosphate kinase][5523:5760:+;HP][5759:6215:+;HP][6290:6470:+;HP][6456:6636:+;HP][6635:6821:+;H P][6837:7188:+;HP][9563:9716:+;HP][9712:10081:+;HP][10064:10298:+;HP][10352:10577:+; HP][10755:11313:+;HP][11312:11762:+;HP][13575:13866:+;HP][13884:14148:+;HP][14134:14362:+;HP][14391:14985:+;HP][15024:15615:+;HP][15611:15974:+;HP][15970:16267:+;HP][16263:16590:+;HP][16589:16826:+;HP][16822:17269:+;HP][17276:17585:+;HP][17614:18109: +;Endolysin][18109:18589:+;HP][18670:19243:+;Internal protein III][19438:19741:+;HP][19927:20353:+;HP][20349:20661:+;HP][20642:20987:+;HP][20995:21358:+;HP][21357:21633:+;HP][21696:22155:+;Endoribonuclease RegB][22162:22708:+;HP][22707:23028:+;HP][23024:23417:+;HP][23425:23893:+;HP][23916 :24084:+;HP][24083:24683:+;HP][24663:24858:+;HP][25142:25526:+;HP][25572:25785:+;HP][25796:26084:+;Antiholin][26070:26457:+;HP][26561:27050:+;HP][27141:27408:+;HP][27410 :27602:+;HP][27591:27813:+;HP][27815:28316:+;HP][28508:28931:+;HP][28927:29938:+;HP][30488:30704:+;HP][30781:31759:+;HP][31801:31948:+;HP][31944:32370:+;HP][32366:32702:+;HP][32698:33019:+;HP][33392:33557:+;HP][33553:33820:+;HP][33877:34666:+;HP][34736:35711:+;HP][35731:35968:+;HP][35964:36279:+;HP][36275:36608:+;HP][36604:37117:+;H P][37109:37283:+;HP][37272:37563:+;HP][37525:37795:+;Glutaredoxin][37787:37976:+;HP][37994:38165:+;HP][38166:38556:+;HP][38676:39129:+;HP][39121:39430:+;HP][39466:39940: +;Recombination endonuclease VII][39936:41775:+;Anaerobic ribonucleoside-triphosphate reductase][41746:41986:+;HP][41951:42584:+;HP][42573:43044:+;HP][43054:43153:+;HP][43161:43374:+;HP][43370:43712:+;HP][43708:44011:+;HP][44196:44385:+;HP][44381:44624:+; HP][44688:45021:+;HP][45017:45275:+;HP][45267:45378:+;HP][45543:45768:+;HP][45755:46034:+;HP][46030:46276:+;HP][46342:46891:+;RNA polymerase sigma factor][46874:47105:+;HP][47106:47409:+;HP][47386:47584:+;HP][47657:47915:+;HP][47984 :49181:+;DNA alpha-glucosyltransferase][49251:50274:+;Exonuclease subunit 1][50312:51953:+;Exonuclease subunit 2][51949:52144:+;HP][52154:52532:+;15 kDa RNA polymerase-binding protein][52567:53269:+;DNA polymerase clamp][53317:54280:+;Sliding-clamp-loader gp44 subunit][54276:54846:+;Sliding-clamp-loader gp44 subunit][54848:55211:+;Translation repressor protein][56019:58728:+;DNA-directed DNA polymerase][58797:59241:+;HP][59251:59458:+;Immunity protein][59466:60201:+;Deoxycytidylate 5-hydroxymethyltransferase][60197:61034:+;HP][61060:61282:+;HP][61364:62540:+;Recombination and repair protein][62529:62880:+;HP][62955:64329:+;ATP-dependent helicase 41][64338:64572:+;HP][64637:64916:+;HP][64926:65220:+;Protein spackle][65216:65426:+;HP][65441:65606:+;HP][65644:66667:+;DNA primase][66685:66877:−;HP][66943:67465:+;HP][67464:67602:+;HP][67632:67860:+;Small outer capsid protein][67938:68130:+;HP][68631:68805:+;HP][68875:69577:+;HP][69657:70413:+;HP][70412:70727:+;HP][70723:72055:+;ATP-dependent DNA helicase dda][72061:72316:+;HP][72308:72998:+;Exodeoxyribonuclease][72997:73165:+;HP][73228:73669:+;HP][73733:73949:+;HP][73948:74314:+;HP][74307:74643:+;HP][74629:74806:+;HP][74805:74895:+;HP][74891:75140:+;HP][75218:75584:+;HP][75614:77453:+;HP][77500:77653:+; HP][77792:77999:+;HP][78009:80178:+;Protein rIIA][80178:81090:+;HP][81132:81429:+;HP][81370:81949:+;Endonuclease IV][82578:83370:+;DNA adenine methylase][83427:83544:+;HP][83554:83746:+;HP][83742:83832:+;HP][83890:84346:+;Nucleoid disruption protein][84411:84519:+;HP][84515:84656:+;HP][84661:86050:+;HP][86290:86935:+;Middle transcription regulatory protein motA][86934:87276:+;HP][87272:87452:+;HP][87439:87802:+;HP][87801:88104:+;HP][88468 :88795:+;HP][88791:89058:+;HP][89125:89398:+;10 kDa anti-sigma factor][89398:90055:−;Holin][90096:90624:−;HP][90661:95098:−;HP][95107:95770:−;Long-tail fiber protein gp36][95827:96964:−;Long-tail fiber protein gp35][96963:100809:−;Long-tail fiber proximal subunit][100884:101811:+;Ribonuclease H][101821:102094:+;Double-stranded DNA-binding protein][102074:102374:+;RNA polymerase-associated protein Gp33][102370:103033:+;Protein Gp59][103100:104018:+;Single-stranded DNA-binding protein][104144:104402:+;HP][104443:104665:+;HP][104755:105034:+;HP][105090:105369:+; HP][105365:105455:+;HP][105447:105768:+;HP][105862:106462:+;Dihydrofolate reductase][106445:106763:+;HP][106755:107631:+;Thymidylate synthase][107627:107834:+;HP][107830:108136:+;HP][108126:110373:+;Ribonucleoside-diphosphate reductase large subunit][110429:111572:+;HP][111599:112016:+;Endonuclease II][112012:112627:+;HP][112620:113772:+;T4 RNA ligase 1][113834:114344:+;HP][114331:114685:+;HP][114681:114969:+;HP][114979:115192:+;HP][115191:116085:+;Polynucleotide kinase][116096:116381:+;HP][116370:116607:+;HP][116606:116951:+;HP][116951:117521:+; Deoxycytidylate deaminase][117520:117721:+;HP][117717:118026:+;HP][118083:118407:+;Capsid assembly protein Gp31][118522:118771:+;Lysis inhibition accessory protein][118966:119110:−;HP][119138:119315:+;HP][119436:119805:+;HP][119845:120328:+;HP][120340:120619:+;HP][120629:120800:+;HP][120796:120997:+;HP][121180:122023:+;HP][122064:122271:+;HP][122270:123743:+;HP][123739:123919:+;HP][123970:126097:+;HP][126160:126439:+;HP][126460:127387:−;Baseplate tail-tube junction protein gp54][127386:128439:−;Baseplate tail-tube junction protein gp48][128448:130182:−;HP][130178:130706:−;Baseplate hub assembly protein gp28][130677:131820:−;Baseplate central spike complex protein gp27][131816:132575:−;HP][132626:133256:+;HP][133252:133663:+;Baseplate wedge protein gp25][133704:134121:+;Recombination protein uvsY][134151:134319:+;HP][134378:134621:−;ATP-dependent DNA helicase uvsW][134617:135601:−;ATP-dependent DNA helicase uvsW][136178:136973:+;HP][136982:137825:+;Highly immunogenic outer capsid protein][137903:138131:+;HP][138127:138457:+;HP][138562:138820:+;HP][138830:139838:+; RNA ligase 2][139837:140386:+;HP][140416:141697:−;Capsid vertex protein][141778:143338:−;Major capsid protein][143358:144171:−;Capsid assembly scaffolding protein][144203:144854:−;Prohead core protein protease]1144853:145279:−;Prohead assembly protein gp68][145278:145503:−;HP][145502:147071:−;Portal protein][147175:147667:−;Tail tube protein gp19][148480:150454:−;Tail sheath protein][150487:152326:−;Terminase %2C large subunit][152303:152813:−;Terminase %2C small subunit][152809:153634:−;Tail completion protein gp15][153675:154452:−;Neck protein gp14][154455:155397:−;Neck protein gp13][155453:157220:−;HP][157228:158575:−;HP][158574:159246:−;Baseplate wedge protein gp11][159247:161071:−;Baseplate wedge protein gp10][161070:161982:−;Baseplate protein gp9][162048:163074:−;Baseplate wedge protein gp8][163066:166165:−;Baseplate wedge protein gp7][166161:168129:−;Baseplate wedge protein gp6][168128:168422:−;Baseplate puncturing device gp5.4][168422:168926:−;HP][168928:169258:−;Baseplate central spike complex protein gp5]

[0401] Essential genes of phage 395-D2-3-3: [319:1063:+;HP][1059:1614:+;HP][1614:2007:+;Baseplate wedge protein gp25][2041:2497:−;HP][2504:2729:−;HP][3086:3371:−;HP][3386:3857:−;HP][4008:4626:−;HP][4695:6912:−;HP][6919:7240:−;HP][7239:7755:−;HP][7980:8268:−;HP][8474:8753:−;HP][8811:9345:−;HP][9326:10250:−;HP][10246:10504:−;HP][10503:10749:−;HP][10745:11753:−;HP][11752:12130:−;HP][12126:12354:−;HP][12958:13228:−;HP][13296:14355:−;HP][14531:15446:−;HP][15517:15940:−;HP][15911:16193:−;HP][16299:16692:−;HP][16708:17317:−;HP][17499:17787:−;HP][17789:18263:−;HP][18711:19035:−;HP][19044:19635:−;HP][19631:19778:−;HP][19845:20487:−;HP][20551:21106:−;HP][21118:21316:−;HP][21353:22700:−;HP][22709:23234:−;HP][23233:23692:−;HP][23723:24119:−;L-alanyl-D-glutamate peptidase][24187:24589:−;HP][24643:24967:−;HP][25006:25270:−;HP][25339:25600:−;HP][25601:26033:−;HP][26480:26828:−;HP][26808:27153:−;HP][27149:28295:−;HP][28305:28512:−;HP][28508:28772:−;HP][29343:29595:−;HP][29666:29945:−;HP][30028:30286:−;HP][31441:31642:−;HP][32629:33157:−;HP][33156:33480:−;HP][33508:33766:−;HP][33767:34151:−;HP][34161:34569:−;HP][34811:35063:−;HP][35055:35349:−;HP][35345:35681:−;HP][35691:35832:−;HP][36127:36667:−;HP][36674:37298:−;HP][37624:38320:−;Deoxynucleotide monophosphate kinase][38319:38850:−;Tail tube terminator protein][39219:40008:+;HP][40044:40899:−;HP][40914:41382:−;HP][41627:41987:+;Baseplate wedge protein gp53][41983:43753:+;Baseplate central spike complex protein gp5][43757:45824:+;HP][45855:47781:+;Baseplate wedge protein gp6][47861:50948:+;Baseplate wedge protein gp7][50948:51941:+;Baseplate wedge protein gp8][51950:52814:+;Baseplate protein gp9][52810:54628:+;Baseplate wedge protein gp10][54627:55296:+;Baseplate wedge protein gp11][55305:56691:+;Short tail fiber protein gp12][56704:58456:+;Fibritin][58494:59421:+;Neck protein gp13][59430:60177:+;Neck protein gp14][60257:61082:+;Tail completion protein gp15][61081:61621:+;Terminase %2C small subunit][61589:63419:+;Terminase %2C large subunit][63438:65430:+;Tail sheath protein][65478:65964:+;Tail tube protein gp19][66019:67594:+;Portal protein][67844:68249:+;Prohead assembly protein gp68][68251:68899:+;Prohead core protein protease][68931:69720:+;Capsid assembly scaffolding protein][69739:71308:+;Major capsid protein][71399:72038:+;HP][72070:73360:+;Capsid vertex protein][73664:74084:+;Recombination protein uvsY][74083:74260:+;HP][74694:74928:−;ATP-dependent DNA helicase uvsW][74936:76277:−;ATP-dependent DNA helicase uvsW][76506:77085:+;HP][77177:77489:+;HP][77528:78098:+;HP][79198:79474:+;Highly immunogenic outer capsid protein][79487:80006:+;HP][80038:80503:−;HP][80552:81392:−;HP][81506:82382:+;HP][82414:82732:+;HP][82728:82905:+;HP][82901:83228:+;HP][83229:83586:+;HP][83585:84110:+;HP][84113:85133:+;RNA ligase 2][85122:85704:+;HP][86293:86554:+;HP][86563:87013:+;HP][87040:88474:+;HP][88759:89611:+;DNA adenine methylase][89619:89895:+;Glutaredoxin][89926:90409:+;Recombination endonuclease VII][90405:92529:+;Anaerobic ribonucleoside-triphosphate reductase][92835:93333:+;HP][93332:93539:+;HP][93871:94066:+;HP][94062:94590:+;HP][94586:95078:+;HP][95147:96107:+;HP][96149:96818:+;HP][96777:97059:+;Glutaredoxin][97055 :97355:+;HP][97434:101208:+;Long-tail fiber proximal subunit][101207:102332:+;Long-tail fiber protein gp35][102381:103050:+;Long-tail fiber protein gp36][103058:107024:+;HP][107706:108354:+;Holin][108620:108911:−;HP][108910:109708:−;HP][109788:110016:−;HP][110012:110345:−;HP][110319:110454:−;HP][110498:110747:−;HP][110783:111221:−;HP][111195:111570:−;HP][111615:112515:−;HP][112514:114776:−;HP][114786:115023:−;HP][115026:115581:−;HP][115652:116939:−;HP][116938:118837:−;HP][118904:119069:−;HP][119068:119509:−;HP][119531:120116:−;HP][120102:120381:−;HP][120377:120974:−;HP][121013:121343:−;HP][122052:122355:−;HP][122351:122576:−;HP][122792:123074:−;HP][123070:123742:−;Exodeoxyribonuclease][123738:124023:−;HP][124023:124332:−;HP][124356:125685:−;ATP-dependent DNA helicase dda][125681:125972:−;HP][127025:127562:−;HP][127569:128595:−;DNA primase][128598:128859:−;HP][128914:129133:−;HP][129129:129618:−;HP][129623:130355:−;HP][130718:130955:−;HP][131046:131301:−;HP][131891:133328:−;ATP-dependent helicase 41][133337:133658:−;HP][133694:134852:−;Recombination and repair protein][134926:137626:−;DNA-directed DNA polymerase][137998:138286:−;HP][138354:138717:−;Translation repressor protein][138720:139284:−;Sliding-clamp-loader gp44 subunit][139286:140285:−;Sliding-clamp-loader gp44 subunit][140343:141009:−;DNA polymerase clamp][141035:141305:−;HP][141360:142332:−;HP][142347:142926:−;Protein Gp59][143003:143249:−;RNA polymerase-associated protein Gp33][143252:143516:−;Double-stranded DNA-binding protein][143525:144461:−;Ribonuclease H][144765:145293:+;RNA polymerase sigma factor][145289:145505:+;HP][145860:146907:+;Exonuclease subunit 1][147164:148856:+;Exonuclease subunit 2][149618:149813:+;HP][149886:151596:+;HP][151655:151946:+;HP][151942:152173:+;HP][152169:152427:+;HP][152423:153002:+;HP][153003:153879:+;Thymidylate synthase][153918:156171:+;Ribonucleoside-diphosphate reductase large subunit][156207:157383:+;Ribonucleoside-diphosphate reductase subunit beta][157678:158044:+;Endonuclease H]1158024:159182:+;T4 RNA ligase 1][159190:159502:+;HP][159797:159971:+;HP][159967:160852:+;Polynucleotide kinase][160904:161192:+;HP][161188:161440:+;HP][161655:162213:+;Deoxycytidylate deaminase][162228:162570:+;Capsid assembly protein Gp31][162580:162832:+;HP][163147:163429:+;HP][163438:163858:+;HP][163899:164466:+; HP][164476:164839:+;HP][164838:165108:+;HP][165232:165526:+;HP][166155:166596:+;HP][166592:166856:+;HP][166857:167079:+;HP][167159:167690:+;HP][167670:169200:+;HP][170558:170849:+;HP][171157:171535:+;HP][171531:172641:−;HP][172710:173286:+;HP][173282:175064:+;HP][175074:176148:+;Baseplate tail-tube junction protein gp48]

[0402] Essential genes of phage KP10-61: [531:1101:−;HP][1140:1452:−;HP][1544:2123:−;HP][2352:3693:+;ATP-dependent DNA helicase uvsW][3701:3935:+;ATP-dependent DNA helicase uvsW][4262:4439:−;HP][4438:4858:−;Recombination protein uvsY][5162:6452:−;Capsid vertex protein][6539:8108:−;Major capsid protein][8127:8916:−;Capsid assembly scaffolding protein][8948:9596:−;Prohead core protein protease][9598:10003:−;Prohead assembly protein gp68][10254:11829:−;Portal protein][11884:12370:−;Tail tube protein gp19][12418:14410:−;Tail sheath protein][14429:16259:−;Terminase %2C large subunit][16227:16767:−;Terminase %2C small subunit][16766:17591:−;Tail completion protein gp15][17671:18418:−;Neck protein gp14][18427:19354:−;Neck protein gp13][19392:21144:−;Fibritin][21154:22540:−;Short tail fiber protein gp12][22549:23218:−;Baseplate wedge protein gp11][23217:25035:−;Baseplate wedge protein gp10][25031:25895:−;Baseplate protein gp9][25904:26897:−;Baseplate wedge protein gp8][26897:29984:−;Baseplate wedge protein gp7][30064:31990:−;Baseplate wedge protein gp6][32021:34088:−;HP][34092:35862:−;Baseplate central spike complex protein gp5][35858:36218:−;Baseplate wedge protein gp53][36571:36931:+;HP][36946:37801:+;HP][37837:38626:−;HP][38995:39526:+;Tail tube terminator protein][39525:40221:+;Deoxynucleotide monophosphate kinase][40547:41171:+;HP][41178:41718:+;HP][41783:41924:+;HP][42013:42154:+;HP][42164:42500:+;HP][42496:42790:+;HP][42782:43034:+;HP][43276:43684:+;HP][43694:44078:+;H P][44079:44337:+;HP][44365:44689:+;HP][44688:45216:+;HP][46203:46404:+;HP][48297:48576:+;HP][48647:48899:+;HP][49470:49734:+;HP][49730:49937:+;HP][49947:51093:+;HP][51375:51741:+;HP][51721:52069:+;HP][52249:52681:+;HP][52682:52943:+;HP][53012:53276:+; HP][53315:53639:+;HP][53693:54095:+;HP][54162:54558:+;L-alanyl-D-glutamate peptidase][54589:55048:+;HP][55047:55428:+;HP][55582:56929:+;HP][56966:57164:+;HP][57175:57730:+;HP][57794:58436:+;HP][58503:58899:+;HP][59052:59643:+;HP][59652:59976:+; HP][60282:60756:+;HP][60758:61046:+;HP][61038:61254:+;HP][61436:62045:+;HP][62061:62454:+;HP][62560:62842:+;HP][62813:63236:+;HP][63307:64222:+;HP][64398:65460:+;HP][65824:66097:+;HP][66701:66929:+;HP][66925:67303:+;HP][67302:68310:+;HP][68306:68552: +;HP][68551:68809:+;HP][68805:69732:+;HP][69775:70054:+;HP][70260:70545:+;HP][70572: 71088:+;HP][71087:71408:+;HP][71415:73632:+;HP][74075:74321:+;HP][74472:74943:+;HP][74958:75243:+;HP][75600:75825:+;HP][75832:76288:+;HP][76322:76715:−;Baseplate wedge protein gp25][76715:77270:−;HP][77266:78010:−;HP][78038:78902:−;Baseplate tail-tube junction protein gp54][78911:79985:−;Baseplate tail-tube junction protein gp48][79995:81777:−;HP][81773:82349:−;HP][82418:83528:+;HP][83524:83902:−;HP][83888:84188:−;HP][84613:84886:−;HP][85621:87151:−;HP][87131:87662:−;HP][87742:87964:−;HP][87965:88229:−;HP][88225:88666:−;HP][89295:89589:−;HP][89715:89985:−;HP][89984:90347:−;HP][90357:90924:−;HP][90965:91388:−;HP][91397:91679:−;HP][91994:92246:−;HP][92256:92598:−;Capsid assembly protein Gp31][92613:93171:−;Deoxycytidylate deaminase][93386:93638:−;HP][93634:93922:−;HP][93975:94860:−;Polynucleotide kinase][94856:95030:−;HP][95014:95332:−;HP][95328:95832:−;HP][95821:96139:−;HP][96147:97305:−;T4 RNA ligase 1][97285:97651:−;Endonuclease II][97946:99122:−;Ribonucleoside-diphosphate reductase subunit beta][99158:101411:−;Ribonucleoside-diphosphate reductase large subunit][101450:102326:−;Thymidylate synthase][102327:102906:−;HP][102902:103160:−;HP][103156:103387:−;HP][103383:103674:−;HP][103733:105443:−;HP][105516:105711:−;HP][106473:108165:−;Exonuclease subunit 2][108422:109469:−;Exonuclease subunit 1][109824:110040:−;HP][110036:110564:−;RNA polymerase sigma factor][110868:111804:+;Ribonuclease H][111813:112077:+;Double-stranded DNA-binding protein][112080:112326:+;RNA polymerase-associated protein Gp33]1112403:112982:+;Protein Gp59][112997:113969:+;HP][114024:114294:+;HP][114320:114986:+;DNA polymerase clamp][115044:116043:+;Sliding-clamp-loader gp44 subunit][116045:116609:+;Sliding-clamp-loader gp44 subunit][116612:116975:+;Translation repressor protein][117043:117331:+;HP][117703:120403:+;DNA-directed DNA polymerase][120477:121635:+;Recombination and repair protein][121670:121991:+;HP][122000:123437:+;ATP-dependent helicase 41][123829:124084:+;HP][124178:124415:+;HP][124784:125516:+;HP][125521:126010:+;HP][126006:126225:+;HP][126280:126541:+;HP][126544:127570:+;DNA primase][127577:128114:+;HP][128295:128586:+;HP][128582:129911:+;ATP-dependent DNA helicase dda][129935:130244:+;HP][130244:130529:+;HP][130525:131197:+;Exodeoxyribonuclease][131193:131475:+;HP][131912:132215:+;HP][132924:133254:+;HP][133293:133890:+;HP][133886:134165:+;HP][134151:134736:+;HP][134758:135199:+;HP][135198:135363:+;HP][135430: 137329:+;HP][137328:138615:+;HP][138686:139241:+;HP][139244:139481:+;HP][139491:141753:+;HP][141752:142652:+;HP][142697:143072:+;HP][143046:143484:+;HP][143520:143769:+;HP][144040:144178:+;HP][144152:144482:+;HP][144478:144706:+;HP][144786:145584:+; HP][145583:145874:+;HP][146140:146788:−;Holin][147471:151299:−;HP][151307:151976:−;Long-tail fiber protein gp36][152025:153150:−;Long-tail fiber protein gp35][153149:156923:−;Long-tail fiber proximal subunit][157002:157302:−;HP][157298:157580:−;Glutaredoxin][157539:158208:−;HP][158250:159210:−;HP][159279:159771:−;HP][159767:160295:−;HP][160291:160486:−;HP][160818:161025:−;HP][161024:161522:−;HP][161828:163952:−;Anaerobic ribonucleoside-triphosphate reductase][164271:164754:−;Recombination endonuclease VII][164785:165061:−;Glutaredoxin][165069:165921:−;DNA adenine methylase][166206:167640:−;HP][167667:168117:−;HP][168126:168387:−;HP][168976:169558:−;HP][169547:170567:−;RNA ligase 2][170570:171095:−;HP][171094:171451:−;HP][171452:171779:−;HP][171775:171952:−;HP][171948:172266:−;HP][172298:173174:−;HP][173288:174128:+;HP][174177:174642:+;HP][174674:175193:−;HP][175206:175482:−;Highly immunogenic outer capsid protein]

[0403] Essential genes of phage KP10-3: [1787:3854:−;HP][3858:5628:−;Baseplate central spike complex protein gp5][5624:5984:−;Baseplate wedge protein gp53][6229:6697:+;HP][6712:7567:+;HP][7603:8392:−;HP][8761:9292:+;Tail tube terminator protein][9291:9987:+;Deoxynucleotide monophosphate kinase][10313:10937:+;HP][10944:11484:+;HP][11549:11690:+;HP][11779:11920:+;HP][11930:12266:+;HP][12262:12556:+;HP][12548:12800:+;HP][13042:13450:+;HP][13460:13844:+;H P][13845:14103:+;HP][14131:14455:+;HP][14454:14982:+;HP][15969:16170:+;HP][17325:17583:+;HP][17666:17945:+;HP][18016:18268:+;HP][18264:18411:+;HP][18410:18665:+;HP][19398:20553:+;HP][20549:20894:+;HP][20874:21222:+;HP][21669:22101:+;HP][22102:22363:+; HP][22432:22696:+;HP][22735:23059:+;HP][23113:23515:+;HP][23583:23979:+;L-alanyl-D-glutamate peptidase][24010:24469:+;HP][24468:24993:+;HP][25002:26349:+;HP][26386:26584:+;HP][26596:27151:+;HP][27215:27857:+;HP][27924:28071:+;HP][28067:28658:+;HP][28667:28991:+; HP][29439:29913:+;HP][29915:30203:+;HP][30385:30994:+;HP][31010:31403:+;HP][31509:31791:+;HP][31762:32185:+;HP][32256:33171:+;HP][33347:34409:+;HP][34582:34777:+;HP][34773:35046:+;HP][35650:35878:+;HP][35874:36252:+;HP][36251:37259:+;HP][37255:37501: +;HP][37500:37758:+;HP][37754:38666:+;HP][38724:39003:+;HP][39423:39711:+;HP][39936: 40452:+;HP][40451:40772:+;HP][40779:42996:+;HP][43065:43683:+;HP][43834:44305:+;HP][44320:44605:+;HP][44962:45187:+;HP][45194:45650:+;HP][45684:46077:−;Baseplate wedge protein gp25][46077:46632:−;HP][46628:47372:−;HP][47400:48264:−;Baseplate tail-tube junction protein gp54][48273:49347:−;Baseplate tail-tube junction protein gp48][49357:51139:−;HP][51135:51711:−;HP][51780:52890:+;HP][52886:53264:−;HP][53572:53863:−;HP][55221:56751:−;HP][56731:57262:−;HP][57342:57564:−;HP][57565:57829:−;HP][57825:58266:−;HP][58895:59189:−;HP][59313:59583:−;HP][59582:59945:−;HP][59955:60522:−;HP][60563:60983:−;HP][60992:61274:−;HP][61589:61841:−;HP][61851:62193:−;Capsid assembly protein Gp31][62208:62766:−;Deoxycytidylate deaminase][62981:63233:−;HP][63229:63517:−;HP][63569:64454:−;Polynucleotide kinase][64450:64624:−;HP][64919:65231:−;HP][65239:66397:−;T4 RNA ligase 1][66377:66743:−;Endonuclease H1][67038:68214:−;Ribonucleoside-diphosphate reductase subunit beta][68250:70503:−;Ribonucleoside-diphosphate reductase large subunit][70542:71418:−;Thymidylate synthase][71419:71998:−;HP][71994:72252:−;HP][72248:72479:−;HP][72475:72766:−;HP][72825:74535:−;HP][74608:74803:−;HP][75565:77257:−;Exonuclease subunit 2][77514:78561:−;Exonuclease subunit 1][78916:79132:−;HP][79128:79656:−;RNA polymerase sigma factor][79960:80896:+;Ribonuclease H][80905:81169:+;Double-stranded DNA-binding protein][81172:81418:+;RNA polymerase-associated protein Gp33][81495:82074:+;Protein Gp59][82089:83061:+;HP][83116:83386:+;HP][83412:84078:+;DNA polymerase clamp][84136:85135:+;Sliding-clamp-loader gp44 subunit][85137:85701:+;Sliding-clamp-loader gp44 subunit][85704:86067:+;Translation repressor protein][86135:86423:+;HP][86795:89495:+;DNA-directed DNA polymerase][89569:90727:+;Recombination and repair protein][90764:91085:+;HP][91094:92531:+;ATP-dependent helicase 41][92923:93178:+;HP][93269:93506:+;HP][93872:94604:+;HP][94609:95098:+;HP][95094:95313:+;HP][95368:95629:+;HP][95632:96658:+;DNA primase][96665:97202:+;HP][97383:97674:+;HP][97670:98999:+;ATP-dependent DNA helicase dda][99023:99332:+;HP][99332:99617:+;HP][99613:100285:+;Exodeoxyribonuclease][100281: 100563:+;HP][100779:101004:+;HP][101000:101303:+;HP][102012:102342:+;HP][102381:102978:+;HP][102974:103253:+;HP][103239:103824:+;HP][103846:104287:+;HP][104286:104451:+;HP][104518:106417:+;HP][106416:107703:+;HP][107774:108329:+;HP][108332:108569:+; HP][108579:110841:+;HP][110840:111740:+;HP][111785:112160:+;HP][112134:112572:+;HP][112608:112857:+;HP][112901:113039:+;HP][113013:113346:+;HP][113342:113570:+;HP][113650:114448:+;HP][114447:114738:+;HP][115004:115652:−;Holin][116332:120154:−;HP][120162:120831:−;Long-tail fiber protein gp36][120880:122005:−;Long-tail fiber protein gp35][122004:125778:−;Long-tail fiber proximal subunit][125857:126157:−;HP][126153:126435:−;Glutaredoxin][126394:127063:−;HP][127105:128065:−;HP][128134:128626:−;HP][128622:129150:−;HP][129146:129341:−;HP][129673:129880:−;HP][129879:130377:−;HP][130682:132812:−;Anaerobic ribonucleoside-triphosphate reductase][133131:133614:−;Recombination endonuclease VHJ][133645:133921:−;Glutaredoxin][133929:134781:−;DNA adenine methylase][135066:136500:−;HP][136527:136977:−;HP][136986:137247:−;HP][137824:138406:−;HP][138395:139415:−;RNA ligase 2][139418:139943:−;HP][139942:140299:−;HP][140300:140627:−;HP][140623:140800:−;HP][140796:141114:−;HP][141146:142022:−;HP][142136:142976:+;HP][143025:143490:+;HP][143522:144041:−;HP][144054:144330:−;Highly immunogenic outer capsid protein][144340:144874:−;Highly immunogenic outer capsid protein][144902:145472:−;HP][145511:145823:−;HP][145915:146494:−;HP][146723:148064:+;ATP-dependent DNA helicase uvsW][148072:148306:+;ATP-dependent DNA helicase uvsW][148909:149086:−;HP][149085:149505:−;Recombination protein uvsY][149809:151099:−;Capsid vertex protein][151131:151767:−;HP][151852:153421:−;Major capsid protein][153440:154229:−;Capsid assembly scaffolding protein][154261:154909:−;Prohead core protein protease][154911:155316:−;Prohead assembly protein gp68][155566:157141:−;Portal protein][157196:157682:−;Tail tube protein gp19][157730:159722:−;Tail sheath protein][159741:161571:−;Terminase %2C large subunit][161539:162079:−;Terminase %2C small subunit][162078:162903:−;Tail completion protein gp15][162983:163730:−;Neck protein gp14][163739:164666:−;Neck protein gp13][164704:166456:−;Fibritin][166469:167855:−;Short tail fiber protein gp12][167864:168533:−;Baseplate wedge protein gp11][168532:170350:−;Baseplate wedge protein gp10][170346:171210:−;Baseplate protein gp9][171219:172212:−;Baseplate wedge protein gp8][172212:175299:−;Baseplate wedge protein gp7]

[0404] Essential genes of phage 395-D2-3-1: [121:400:−;HP][396:993:−;HP][1032:1362:−;HP][2071:2374:−;HP][2811:3093:−;HP][3089:3761:−;Exodeoxyribonuclease][3757:4042:−;HP][4042:4351:−;HP][4375:5704:−;ATP-dependent DNA helicase dda][5700:5991:−;HP][7044:7581:−;HP][7588:8614:−;DNA primase][8617:8878:−;HP][8933:9152:−;HP][9148:9637:−;HP][9642:10374:−;HP][10740:10977:−;HP][11068:11323:−;HP][11715:13152:−;ATP-dependent helicase 41][13161:13482:−;HP][13519:14677:−;Recombination and repair protein][14751:17451:−;DNA-directed DNA polymerase][17823:18111:−;HP][18179:18542:−;Translation repressor protein][18545:19109:−;Sliding-clamp-loader gp44 subunit][19111:20110:−;Sliding-clamp-loader gp44 subunit][20168:20834:−;DNA polymerase clamp][20860:21130:−;HP][21185:22157:−;HP][22172:22751:−;Protein Gp59][22828:23074:−;RNA polymerase-associated protein Gp33][23077:23341:−;Double-stranded DNA-binding protein][23350:24286:−;Ribonuclease H][24590:25118:+;RNA polymerase sigma factor][25114:25330:+;HP][25685:26732:+;Exonuclease subunit 1][26989:28687:+;Exonuclease subunit 2][28686:28878:+;HP][28951:30661:+;HP][30720:31011:+;HP][31007:31238:+;HP][31234:31492:+;HP][31488:32067:+;HP][32068:32944:+;Thymidylate synthase][32983:35236:+;Ribonucleoside-diphosphate reductase large subunit][35272:36448:+;Ribonucleoside-diphosphate reductase subunit beta][36743:37109:+;Endonuclease H1][37089:38247:+;T4 RNA ligase 1][38453:38780:+;HP][38748:39084:+;HP][39080:39398:+;HP][39546:40431:+;Polynucleotide kinase][40483:40771:+;HP][40767:41019:+;HP][41234:41792:+;Deoxycytidylate deaminase][41807:42149:+;Capsid assembly protein Gp31][42159:42411:+;HP][42726:43008:+;HP][43017:43440:+;HP][43481:44048:+;HP][44058 :44421:+;HP][44420:44690:+;HP][44815:45109:+;HP][45809:46250:+;HP][46246:46765:+;HP][46773:47037:+;HP][47038:47260:+;HP][47340:47871:+;HP][47851:49381:+;HP][50739:51030:+;HP][51338:51716:+;HP][51712:52822:−;HP][52891:53467:+;HP][53463:55251:+;HP][55261:56344:+;Baseplate tail-tube junction protein gp48][56353:57217:+;Baseplate tail-tube junction protein gp54][57245:57986:+;HP][57982:58537:+;HP][58537:58930:+;Baseplate wedge protein gp25][58964:59420:−;HP][59427:59652:−;HP][60008:60293:−;HP][60308:60779:−;HP][60930:61548:−;HP][61617:63834:−;HP][63841:64162:−;HP][64161:64677:−;HP][64902:65190:−;HP][65610:65889:−;HP][65947:66859:−;HP][66855:67113:−;HP][67112:67358:−;HP][67354:68362:−;HP][68361:68739:−;HP][68735:68963:−;HP][69567:69840:−;HP][69836:70031:−;HP][70205:71267:−;HP][71443:72358:−;HP][72429:72852:−;HP][72823:73105:−;HP][73211:73604:−;HP][73620:74229:−;HP][74221:74509:−;HP][74511:74985:−;HP][75433:75757:−;HP][75766:76357:−;HP][76353:76500:−;HP][76567:77209:−;HP][77273:77828:−;HP][77840:78038:−;HP][78075:79422:−;HP][79480:79648:−;HP][79647:80106:−;HP][80137:80533:−;L-alanyl-D-glutamate peptidase][80601:81003:−;HP][81057:81381:−;HP][81420:81684:−;HP][81753:82014:−;HP][82015:82447:−;HP][82627:82825:−;HP][82945:83311:−;HP][83593:84748:−;HP][85481:85736:−;HP][85998:86145:−;HP][86141:86393:−;HP][86464:86743:−;HP][86826:87084:−;HP][88239:88440:−;HP][88824:89358:−;HP][89350:89686:−;HP][89693:89954:−;HP][89950:90331:−;HP][90327:90741:−;HP][91250:91547:−;HP][91806:92145:−;HP][92155:92296:−;HP][92385:92526:−;HP][92592:93132:−;HP][93153:93780:−;HP][94106:94802:−;Deoxynucleotide monophosphate kinase][94801:95332:−;Tail tube terminator protein][95701:96490:+;HP][96526:97381:−;HP][97396:97756:−;HP][98109:98469:+;Baseplate wedge protein gp53][98465:100235:+;Baseplate central spike complex protein gp5][100239:102306:+;HP][102337:104263:+;Baseplate wedge protein gp6][104343:107430:+;Baseplate wedge protein gp7][107430:108423:+;Baseplate wedge protein gp8][108432:109296:+;Baseplate protein gp9][109292:111110:+;Baseplate wedge protein gp10][111109:111778:+;Baseplate wedge protein gp11][111787:113173:+;Short tail fiber protein gp12][113183:114935:+;Fibritin][114973:115900:+;Neck protein gp13][116516:117263:+;Neck protein gp14][117342:118167:+;Tail completion protein gp15][118166:118706:+;Terminase %2C small subunit][118674:120504:+;Terminase %2C large subunit][120523:122515:+;Tail sheath protein][122563:123049:+;Tail tube protein gp19][123104:124679:+;Portal protein][124929:125334:+;Prohead assembly protein gp68][125336:125984:+;Prohead core protein protease][126016:126805:+;Capsid assembly scaffolding protein][126824:128393:+;Major capsid protein][128484:129123:+;HP][129155:130445:+;Capsid vertex protein][130741:131161:+;Recombination protein uvsY][131160:131337:+;HP][131796:132030:−;ATP-dependent DNA helicase uvsW][132038:133379:−;ATP-dependent DNA helicase uvsW][133608:134232:+;HP][134324:134636:+;HP][134675:135245:+;HP][135273:135807:+; Highly immunogenic outer capsid protein][135817:136093:+;Highly immunogenic outer capsid protein][136106:136625:+;HP][136656:137121:−;HP][137170:138010:−;HP][138124:139000:+;HP][139032:139350:+;HP][139346:139523:+;HP][139519:139846:+;HP][139847:140204:+;HP][140203:140728:+;HP][140731:141751:+;RNA ligase 2][141754:142273:+;HP][142262:142850:+;HP][143438:143699:+;HP][143708:144158:+;HP][144185:145619:+;HP][145904:146756:+;DNA adenine methylase][146762:147032:+;Glutaredoxin][147064:147547:+;Recombination endonuclease VII][147866:149990:+;Anaerobic ribonucleoside-triphosphate reductase][150295:150793:+;HP][150792:150999:+;HP][151331:151526:+;HP][151522:152050:+;HP][152046:152538:+;HP][152607:153567:+;HP][153609:154278:+;HP][154237:154519:+; Glutaredoxin][154515:154815:+;HP][154894:158668:+;Long-tail fiber proximal subunit][158667:159792:+;Long-tail fiber protein gp35][159841:160510:+;Long-tail fiber protein gp36][160518:164223:+;HP][164744:165392:+;Holin][165658:165949:−;HP][165948:166746:−;HP][166826:167054:−;HP][167050:167383:−;HP][167357:167492:−;HP][167536:167785:−;HP][167821:168259:−;HP][168233:168608:−;HP][168653:169553:−;HP][169552:171814:−;HP][171824:172061:−;HP][172064:172619:−;HP][172690:173977:−;HP][173976:175875:−;HP][175942:176107:−;HP][176106:176547:−;HP]

[0405] Essential genes of phage CT-227-KP4M1-8: [45:318:+;HP][1129:2137:+;HP][2133:2379:+;HP][2378:2636:+;HP][2632:3544:+;HP][3602:3881:+;HP][4301:4589:+;HP][4814:5330:+;HP][5329:5650:+;HP][5657:7874:+;HP][7943:8561:+; HP][8712:9183:+;HP][9198:9483:+;HP][9840:10065:+;HP][10072:10528:+;HP][10562:10955:−;Baseplate wedge protein gp25][10955:11510:−;HP][11506:12250:−;HP][12278:13142:−;Baseplate tail-tube junction protein gp54][13151:14225:−;Baseplate tail-tube junction protein gp48][14235:16017:−;HP][16013:16589:−;HP][16658:17768:+;HP][17764:18142:−;HP][18450:18741:−;HP][20097:21627:−;HP][22708:22930:−;HP][22931:23195:−;HP][23203:23722:−;HP][23718:24159:−;HP][24801:25095:−;HP][25220:25490:−;HP][25489:25852:−;HP][25862:26429:−;HP][26470:26893:−;HP][26902:27184:−;HP][27499:27751:−;HP][27761:28103:−;Capsid assembly protein Gp31][28118:28676:−;Deoxycytidylate deaminase][28891:29143:−;HP][29139:29427:−;HP][29479:30364:−;Polynucleotide kinase][30360:30534:−;HP][30518:30836:−;HP][30832:31168:−;HP][31136:31463:−;HP][31669:32827:−;T4 RNA ligase 1][32807:33176:−;Endonuclease II][33739:34915:−;HP][34953:37200:−;Ribonucleoside-diphosphate reductase large subunit][37240:38116:−;Thymidylate synthase][38117:38696:−;HP][38692:38950:−;HP][38946:39177:−;HP][39173:39464:−;HP][39523:41233:−;HP][41306:41504:−;HP][42044:43742:−;Exonuclease subunit 2][43999:45046:−;Exonuclease subunit 1][45401:45617:−;HP][45613:46141:−;RNA polymerase sigma factor][46445:47381:+;Ribonuclease H][47390:47654:+;Double-stranded DNA-binding protein][47657:47903:+;RNA polymerase-associated protein Gp33][47980:48559:+;Protein Gp59][48574:49546:+;HP][49601:49871:+;HP][49897:50563:+;DNA polymerase clamp][50621:51620:+;Sliding-clamp-loader gp44 subunit][51622:52186:+;Sliding-clamp-loader gp44 subunit][52189:52552:+;Translation repressor protein][52620:52908:+;HP][53280:55980:+;DNA-directed DNA polymerase][56054:57212:+;Recombination and repair protein][57249:57570:+;HP][57579:59016:+;ATP-dependent helicase 41][59408:59663:+;HP][59754:59991:+;HP][60357:61089:+;HP][61094:61583:+;HP][61579:61798:+;HP][61853:62114:+;HP][62117:63143:+;DNA primase][63150:63687:+;HP][63868:64159:+;HP][64155:65484:+;ATP-dependent DNA helicase dda][65508:65817:+;HP][65817:66102:+;HP][66098:66770:+;Exodeoxyribonuclease][66766:67048:+;HP][67485:67788:+;HP][68496:68826:+;HP][68865:69462:+;HP][69458:69737:+;HP][69723:70308:+;HP][70330:70771:+;HP][70770:70935:+;HP][71002:72901:+;HP][72900:74187:+; HP][74258:74813:+;HP][74816:75053:+;HP][75063:77325:+;HP][77324:78224:+;HP][78269:78644:+;HP][78618:79056:+;HP][79092:79341:+;HP][79385:79523:+;HP][79497:79830:+;HP][79826:80054:+;HP][80134:80932:+;HP][80931:81222:+;HP][81488:82136:−;Holin][82819:86842:−;HP][86850:87519:−;Long-tail fiber protein gp36][87568:88693:−;Long-tail fiber protein gp35][88692:92466:−;Long-tail fiber proximal subunit][92545:92845:−;HP][92841:93123:−;Glutaredoxin][93082:93751:−;HP][93793:94753:−;HP][94822:95314:−;HP][95350:95554:−;HP][95886:96093:−;HP][96092:96587:−;HP][96894:99018:−;Anaerobic ribonucleoside-triphosphate reductase][100123:100396:−;Glutaredoxin][100404:101256:−;DNA adenine methylase][101541:102975:−;HP][103002:103452:−;HP][103461:103722:−;HP][104311:104899:−;HP][104888:105407:−;HP][105410:106430:−;RNA ligase 2][106433:106958:−;HP][106957:107314:−;HP][107315:107642:−;HP][107638:107815:−;HP][107811:108129:−;HP][108161:109037:−;HP][109151:109991:+;HP][110040:110505:+;HP][110537:111056:−;HP][111069:111345:−;Highly immunogenic outer capsid protein][111355:111889:−;Highly immunogenic outer capsid protein][111917:112487:−;HP][112526:112838:−;HP][112929:113508:−;HP][113737:115078:+;ATP-dependent DNA helicase uvsW][115086:115320:+;ATP-dependent DNA helicase uvsW][115780:115957:−;HP][115956:116376:−;Recombination protein uvsY][116680:117970:−;Capsid vertex protein][118002:118638:−;HP][118723:120292:−;Major capsid protein][120311:121100:−;Capsid assembly scaffolding protein][121132:121780:−;Prohead core protein protease][121782:122187:−;Prohead assembly protein gp68][122438:124013:−;Portal protein][124068:124554:−;Tail tube protein gp19][124602:126594:−;Tail sheath protein][126613:128443:−;Terminase %2C large subunit][128411:128951:−;Terminase %2C small subunit][128950:129775:−;Tail completion protein gp15][129854:130601:−;Neck protein gp14][131217:132144:−;Neck protein gp13][132182:133934:−;Fibritin][133944:135330:−;Short tail fiber protein gp12][135339:136008:−;Baseplate wedge protein gp11][136007:137825:−;Baseplate wedge protein gp10][137821:138685:−;Baseplate protein gp9][138694:139687:−;Baseplate wedge protein gp8][139687:142774:−;Baseplate wedge protein gp7][142854:144780:−;Baseplate wedge protein gp6][144811:146878:−;HP][146882:148652:−;Baseplate central spike complex protein gp5][148648:149008:−;Baseplate wedge protein gp53][149253:149721:+;HP][149736:150591:+;HP][150627:151416:−;HP][151785:152316:+;Tail tube terminator protein][152315:153011:+;Deoxynucleotide monophosphate kinase][153337:153961:+;HP][153968:154508:+;HP][154573:154693:+;HP][154793:154934:+; HP][154944:155280:+;HP][155276:155570:+;HP][155562:155814:+;HP][156056:156464:+;HP][156474:156858:+;HP][156859:157117:+;HP][157145:157469:+;HP][157468:157996:+;HP][159055:159436:+;HP][159410:159764:+;HP][159944:160376:+;HP][160377:160638:+;HP][160707:160971:+;HP][161010:161334:+;HP][161388:161790:+;HP][161857:162253:+;L-alanyl-D-glutamate peptidase][162284:162743:+;HP][162742:163267:+;HP][163276:164623:+;HP][164659:164857:+;HP][164868:165423:+;HP][165487:166129:+;HP][166196:166343:+;HP][166339:166930:+; HP][166939:167263:+;HP][167569:168043:+;HP][168045:168333:+;HP][168325:168541:+;HP][168723:169332:+;HP][169348:169741:+;HP][169847:170129:+;HP][170100:170523:+;HP][170594:171509:+;HP][171685:172747:+;HP]

[0406] Essential genes of phage KP10-95: [203:566:−;HP][553:733:−;HP][729:1071:−;HP][1070:1715:−;Middle transcription regulatory protein motA][1839:2103:−;HP][2330:3719:−;HP][3724:3865:−;HP][3861:3969:−;HP][4034:4490:−;Nucleoid disruption protein][4548:4638:−;HP][4634:4826:−;HP][4836:4953:−;HP][5013:5253:−;HP][5317:5896:−;Endonuclease IV][5837:6134:−;HP][6176:7088:−;HP][7088:9257:−;Protein rIIA][9267:9477:−;HP][9759:9912:−;HP][9952:11791:−;HP][11821:12190:−;HP][12268:12517:−;HP][12513:12603:−;HP][12602:12779:−;HP][12765:13101:−;HP][13094:13460:−;HP][13459:13675:−;HP][13739:14180:−;HP][14243:14411:−;HP][14410:15100:−;Exodeoxyribonuclease][15092:15347:−;HP][15353:16685:−;ATP-dependent DNA helicase dda][16681:16996:−;HP][16995:17751:−;HP][17831:18497:−;HP][18569:18743:−;HP][19244:19436:−;HP][19514:19742:−;Small outer capsid protein][19772:19910:−;HP][19909:20431:−;HP][20497:20689:+;HP][20707:21730:−;DNA primase][21768:21933:−;HP][21948:22158:−;HP][22154:22448:−;Protein spackle][22458:22737:−;HP][22802:23036:−;HP][23045:24419:−;ATP-dependent helicase 41][24494:24845:−;HP][24834:26010:−;Recombination and repair protein][26092:26314:−;HP][26340:27177:−;HP][27173:27908:−;Deoxycytidylate 5-hydroxymethyltransferase][27916:28123:−;Immunity protein][28133:28577:−;HP][28632:31341:−;DNA-directed DNA polymerase][31433:31796:−;Translation repressor protein][31798:32368:−;Sliding-clamp-loader gp44 subunit][32364:33327:−;Sliding-clamp-loader gp44 subunit][33375:34077:−;DNA polymerase clamp][34112:34490:−;15 kDa RNA polymerase-binding protein][34500:34695:−;HP][34691:36332:−;Exonuclease subunit 2][36370:37393:−;Exonuclease subunit 1][37463:38660:−;DNA alpha-glucosyltransferase][38729:38987:−;HP][39060:39258:−;HP][39235:39538:−;HP][39539:39770:−;HP][39753:40302:−;RNA polymerase sigma factor][40368:40614:−;HP][40610:40889:−;HP][40876:41101:−;HP][41093:41378:−;HP][41370:41628:−;HP][41624:41957:−;HP][42021:42264:−;HP][42260:42449:−;HP][42634:42937:−;HP][42933:43275:−;HP][43271:43484:−;HP][43492:43591:−;HP][43601:44072:−;HP][44043:44277:−;HP][44248:46087:−;Anaerobic ribonucleoside-triphosphate reductase][46083:46557:−;Recombination endonuclease VII][46593:46902:−;HP][46894:47347:−;HP][47330:47489:−;HP][47467:47857:−;HP][47858:48029:−;HP][48047:48236:−;HP][48228:48498:−;Glutaredoxin][48460:48751:−;HP][48740:48914:−;HP][48906:49419:−;HP][49415:49748:−;HP][49744:50059:−;HP][50055:50292:−;HP][50312:51287:−;HP][51357:52146:−;HP][52203:52470:−;HP][52466:52631:−;HP][52993:53191:−;HP][53193:53514:−;HP][53510:53846:−;HP][53842:54268:−;HP][54264:54411:−;HP][54453:55431:−;HP][55548:55788:−;HP][55977:56988:−;HP][56984:57407:−;HP][57599:58181:−;HP][58177:58669:−;HP][58671:58893:−;HP][58882:59074:−;HP][59076:59343:−;HP][59440:59923:−;HP][60027:60414:−;HP][60400:60688:−;Antiholin][60699:60912:−;HP][60958:61333:−;HP][61617:61812:−;HP][61792:62392:−;HP][62391:62559:−;HP][62583:63051:−;HP][63059:63452:−;HP][63448:63769:−;HP][63768:64314:−;HP][64321:64780:−;Endoribonuclease RegB][64843:65119:−;HP][65118:65481:−;HP][65489:65981:−;HP][65962:66274:−;HP][66270:66804:−;HP][66883:67189:−;HP][67379:67952:−;Internal protein III][68033:68513:−;HP][68513:69008:−;Endolysin][69036:69345:−;HP][69352:69799:−;HP][69795:70032:−;HP][70031:70358:−;HP][70354:70651:−;HP][70647:71010:−;HP][71006:71597:−;HP][71636:72230:−;HP][72259:72487:−;HP][72473:72737:−;HP][72755:73046:−;HP][73971:74421:−;HP][74420:74978:−;HP][75156:75381:−;HP][75435:75669:−;HP][75652:76021:−;HP][76017:76170:−;HP][78072:78423:−;HP][78439:78625:−;HP][78624:78804:−;HP][78790:78970:−;HP][79045:79501:−;HP][79500:79737:−;HP][79733:80408:−;Deoxynucleotide monophosphate kinase][80475:81078:−;Tail tube terminator protein][81077:81905:−;HP][81904:82354:−;HP][82403:83042:+;Baseplate wedge protein gp53][83038:84769:+;Baseplate central spike complex protein gp5][84771:85275:+;HP][85275:85569:+;Baseplate puncturing device gp5.4][85568:87536:+;Baseplate wedge protein gp6][87532:90631:+;Baseplate wedge protein gp7][90623:91649:+;Baseplate wedge protein gp8][91716:92628:+;Baseplate protein gp9][92627:94451:+;Baseplate wedge protein gp10][94452:95124:+;Baseplate wedge protein gp11][95123:96470:+;HP][96478:98245:+;HP][98301:99243:+;Neck protein gp13][99246:100023:+;Neck protein gp14][100064:100889:+;Tail completion protein gp15][100885:101395:+;Terminase %2C small subunit][101372:103211:+;Terminase %2C large subunit][103244:105218:+;Tail sheath protein][106031:106523:+;Tail tube protein gp19][106627:108196:+;Portal protein][108195:108420:+;HP][108419:108845:+;Prohead assembly protein gp68][108844:109495:+;Prohead core protein protease][109527:110340:+;Capsid assembly scaffolding protein][110360:111920:+;Major capsidprotein][112001:113282:+;Capsidvertexprotein][113311:113860:−;HP][113859:114867:−;RNA ligase 2][114877:115135:−;HP][115248:115575:−;HP][115574:115802:−;HP][115880:117005:−;Highly immunogenic outer capsid protein][117014:117809:−;HP][118386:119370:+;ATP-dependent DNA helicase uvsW][119366:119609:+;ATP-dependent DNA helicase uvsW][119668:119836:−;HP][119866:120283:−;Recombination protein uvsY][120324:120735:−;Baseplate wedge protein gp25][120731:121361:−;HP][121412:122171:+;HP][122167:123310:+;Baseplate central spike complex protein gp27][123281:123809:+;Baseplate hub assembly protein gp28][123805:125539:+;HP][125548:126601:+;Baseplate tail-tube junction protein gp48][126600:127527:+;Baseplate tail-tube junction protein gp54][127548:127827:−;HP][127890:130017:−;HP][130068:130248:−;HP][130244:131717:−;HP][131716:131923:−;HP][131964:132807:−;HP][132990:133191:−;HP][133187:133358:−;HP][133368:133647:−;HP][133659:134145:−;HP][134185:134545:−;HP][134638:135151:−;HP][135190:135559:−;HP][135680:135857:−;HP][136224:136473:−;Lysis inhibition accessory protein][136588:136912:−;Capsid assembly protein Gp31][136969:137278:−;HP][137274:137475:−;HP][137474:138044:−;Deoxycytidylate deaminase][138044:138389:−;HP][138388:138625:−;HP][138614:138899:−;HP][138910:139804:−;Polynucleotide kinase][139803:140016:−;HP][140026:140314:−;HP][140310:140664:−;HP][140651:141161:−;HP][141223:142375:−;T4 RNA ligase 1][142368:142785:−;Endonuclease 11][142812:143955:−;HP][144011:146258:−;Ribonucleoside-diphosphate reductase large subunit][146248:146554:−;HP][146550:146757:−;HP][146753:147629:−;Thymidylate synthase][147621:147939:−;HP][147922:148522:−;Dihydrofolate reductase][148529:148694:−;HP][148776:149097:−;HP][149089:149179:−;HP][149175:149454:−;HP][149511:149877:−;HP][149880:150102:−;HP][150143:150401:−;HP][150527:151445:−;Single-stranded DNA-binding protein][151513:152176:−;Protein Gp59][152172:152472:−;RNA polymerase-associated protein Gp33][152452:152725:−;Double-stranded DNA-binding protein][152735:153662:−;Ribonuclease H][153737:157583:+;Long-tail fiber proximal subunit][157582:158719:+;Long-tail fiber protein gp35][158776:159469:+;Long-tail fiber protein gp36][159478:164107:+;HP][164143:164671:+;HP][164712:165369:+;Holin][165369:165642:−; 10 kDa anti-sigma factor][165710:165977:−;HP][165973:166300:−;HP][166296:166575:−;HP]

[0407] Essential genes of phage PKP-33: [36:180:+;HP][1798:2665:−;HP][2720:3041:−;HP][3053:3563:−;HP][3575:3977:−;HP][4430:4619:−;HP][4670:4958:−;HP][4969:5359:−;HP][5318:5786:−;HP][5769:5997:−;HP][5989:6331:−;HP][6327:6576:−;HP][6572:6854:−;HP][6853:7159:−;HP][7241:7670:−;HP][7733:7853:−;HP][7855:8224:−;HP][8232:8466:−;HP][8476:9307:−;Serine/threonine-protein phosphatase][9306:9669:−;HP][9668:10073:−;HP][10174:10459:−;HP][10451:10856:−;HP][11403:11817:−;L-alanyl-D-glutamate peptidase][11813:12476:−;Holin][12633:13245:−;HP][13254:14016:−;Deoxynucleoside-5′-monophosphate kinase][14012:14132:−;HP][14254:14716:−;HP][14681:15395:−;HP][15503:15896:−;HP][16015:16450:−;HP][16442:16715:−;HP][16707:17031:−;HP][17077:17515:−;HP][17516:17726:−;HP][17722:18028:−;HP][18017:18284:−;HP][18252:18621:−;HP][18607:18835:−;HP][18821:19364:−;HP][19363:19636:−;HP][19639:19837:−;HP][19949:20120:−;HP][20281:20662:−;HP][20652:21009:−;HP][21106:21298:−;HP][21416:21518:−;HP][21855:22365:−;HP][22596:22935:−;HP][22937:23132:−;HP][24659:24773:−;HP][24844:25060:−;HP][25059:25437:−;HP][25457:25598:−;HP][26612:26792:−;HP][26778:26970:−;HP][28680:29175:−;HP][29185:29395:−;HP][29394:29592:−;HP][29721:30015:−;HP][30243:30408:−;HP][31723:32185:−;HP][32249:33254:−;HP][33253:33664:−;HP][33793:34078:−;HP][34067:34229:−;HP][34228:34711:−;HP][34710:34986:−;HP][35322:36003:−;Thymidylate synthase][36173:36737:−;Dihydrofolate reductase][36736:37897:−;HP][37993:40318:−;Ribonucleoside-diphosphate reductase large subunit][40446:40656:−;HP][40670:40784:−;HP][40785:41535:−;HP][41844:43674:+;Anaerobic ribonucleoside-triphosphate reductase][43734:43947:+;HP][43946:44780:+;HP][44763:44928:+;HP][44914:45316:+;HP][45312:45708:+;HP][46306:49096:+;Putative replication origin binding protein][49082:49367:+;HP][49399:50095:+;HP][50381:50786:+;HP][50798:51095:+;HP][51145:51454:+;HP][51537:51699:+;HP][51655:51931:+;HP][51930:52893:+;DNA ligase][53092:53842:+;HP][53844:54603:+;Putative transcription factor D5][54687:56166:+;HP][56162:57047:+;HP][57114:59685:+;DNA polymerase][60171:61530:+;putative helicase D10][61732:62086:+;HP][62088:62862:+;putative ssDNA-binding protein][62901:63894:+;putative exonuclease subunit 1][63877:65713:+;putative exonuclease subunit 2][65712:66195:+;Protein D14][66191:67070:+;T5 flap endonuclease][67069:67513:+;Deoxyuridine 5′-triphosphate nucleotidohydrolase][67554:69597:−;HP][69596:70016:−;L-shaped tail fiber protein p132][70019:78383:−;HP][78410:81257:−;putative baseplate hub protein][81253:81868:−;Distal tail protein][81982:86440:−;putative tape measure protein][86524:86851:−;HP][86924:87347:−;HP][87350:88238:−;Minor tail protein][88247:89381:−;Tail tube protein][89404:89890:−;Tail tube terminator protein][89889:90600:−;Tail completion protein][90650:91163:−;HP][91221:92604:−;Major capsid protein][92617:93214:−;Prohead protease][93412:94132:−;HP][94128:95340:−;Portal protein][95339:95780:−;Nicking endonuclease][96013:97330:−;Terminase %2C large subunit][97329:97803:−;putative terminase %2C small subunit][97813:99790:−;Receptor-binding protein][99903:100128:+;HP][100727:101444:−;5′-deoxynucleotidase][101516:101969:−;HP][102032:103715:−;Protein A1][103798:104026:−;HP][104022:104292:−;HP][104359:104764:−;Protein A2][105062:105323:−;HP][105490:105679:−;HP][105694:105862:−;HP][106702:106933:−;HP][106932:107280:−;HP][107276:107804:−;HP][107858:108353:−;HP][108418:109384:−;HP][109456:109795:−;HP][109940:110054:+;HP][110053:110224:+;HP]

[0408] Essential genes of phage 395-D2-3-2: [257:905:+;HP][947:1616:+;HP][1575:1857:+;Glutaredoxin][1853:2153:+;HP][2232:6006:+;Lo ng-tail fiber proximal subunit][6005:7130:+;Long-tail fiber protein gp35][7179:7848:+;Long-tail fiber protein gp36][7856:11585:+;HP][12266:12914:+;Holin][13180:13471:−;HP][13470:14268:−;HP][14348:14576:−;HP][14572:14902:−;HP][14876:15014:−;HP][15010:15241:−;HP][15285:15534:−;HP][15570:16008:−;HP][15982:16357:−;HP][16402:17302:−;HP][17301:19563:−;HP][19573:19810:−;HP][19813:20368:−;HP][20439:21726:−;HP][21725:23624:−;HP][23691:23856:−;HP][23855:24296:−;HP][24318:24903:−;HP][24889:25168:−;HP][25164:25761:−;HP][25800:26130:−;HP][26839:27142:−;HP][27579:27861:−;HP][27857:28529:−;Exodeoxyribonuclease][28525:28810:−;HP][28810:29119:−;HP][29143:30472:−;ATP-dependent DNA helicase dda][30468:30759:−;HP][30940:31477:−;HP][31484:32510:−;DNA primase][32513:32774:−;HP][32829:33048:−;HP][33044:33533:−;HP][33538:34270:−;HP][34639:34876:−;HP][34968:35223:−;HP][35615:37052:−;ATP-dependent helicase 41][37061:37382:−;HP][37420:38578:−;Recombination and repair protein][38652:41352:−;DNA-directed DNA polymerase][41724:42012:−;HP][42080:42443:−;Translation repressor protein][42446:43010:−;Sliding-clamp-loader gp44 subunit][43012:44011:−;Sliding-clamp-loader gp44 subunit][44069:44735:−;DNA polymerase clamp][44761:45031:−;HP][45086:46058:−;HP][46073:46652:−;Protein Gp59][46729:46975:−;RNA polymerase-associated protein Gp33][46978:47242:−;Double-stranded DNA-binding protein][47251:48187:−;Ribonuclease H][48491:49019:+;RNA polymerase sigma factor][49015:49231:+;HP][49586:50633:+;Exonuclease subunit 1][50890:52582:+;Exonuclease subunit 2][53344:53539:+;HP][53612:55322:+;HP][55381:55672:+;HP][55668:55899:+;HP][55895:56153:+;HP][56149:56728:+;HP][56729:57605:+;Thymidylate synthase][57644:59897:+;Ribonucleoside-diphosphate reductase large subunit][59933:61109:+;Ribonucleoside-diphosphate reductase subunit beta][61404:61770:+;Endonuclease II][61750:62908:+;T4 RNA ligase 1][63114:63441:+;HP][63409:63745:+;HP][63741:64059:+;HP][64043:64211:+;HP][64207:65092:+;Polynucleotide kinase][65144:65432:+;HP][65428:65680:+;HP][65895:66453:+;Deoxycytidylate deaminase][66468:66810:+;Capsid assembly protein Gp31][66820:67072:+;HP][67387:67669:+;HP][67678:68101:+;HP][68142:68709:+;HP][68719 :69082:+;HP][69081:69351:+;HP][69476:69770:+;HP][70399:70840:+;HP][70836:71100:+;HP][71101:71323:+;HP][71403:71934:+;HP][71914:73444:+;HP][74179:74452:+;HP][74865:75165:+;HP][75151:75529:+;HP][75525:76635:−;HP][76704:77280:+;HP][77276:79058:+;HP][79068:80142:+;Baseplate tail-tube junction protein gp48][80151:81015:+;Baseplate tail-tube junction protein gp54][81043:81787:+;HP][81783:82338:+;HP][82338:82731:+;Baseplate wedge protein gp25][82765:83221:−;HP][83228:83453:−;HP][83810:84095:−;HP][84110:84581:−;HP][84732:85350:−;HP][85421:87638:−;HP][87645:87966:−;HP][87965:88481:−;HP][88706:88994:−;HP][89200:89479:−;HP][89537:90449:−;HP][90445:90703:−;HP][90702:90948:−;HP][90944:91952:−;HP][91951:92329:−;HP][92325:92553:−;HP][93157:93430:−;HP][93794:94856:−;HP][95032:95947:−;HP][96018:96441:−;HP][96412:96694:−;HP][96800:97193:−;HP][97209:97818:−;HP][98000:98216:−;HP][98208:98496:−;HP][98498:98972:−;HP][99278:99602:−;HP][99611:100202:−;HP][100355:100751:−;HP][100818:101460:−;HP][101524:102079:−;HP][102090:102288:−;HP][102324:103671:−;HP][103680:104205:−;HP][104204:104663:−;HP][104694:105090:−;L-alanyl-D-glutamate peptidase][105157:105559:−;HP][105613:105937:−;HP][105976:106240:−;HP][106309:106570:−;HP][106571:107003:−;HP][107183:107531:−;HP][107511:107877:−;HP][108159:109305:−;HP][109315:109522:−;HP][109518:109782:−;HP][110353:110605:−;HP][110676:110955:−;HP][111435:111693:−;HP][112848:113049:−;HP][114036:114564:−;HP][114563:114887:−;HP][114915:115173:−;HP][115174:115558:−;HP][115568:115976:−;HP][116218:116470:−;HP][116462:116756:−;HP][116752:117088:−;HP][117098:117239:−;HP][117328:117469:−;HP][117534:118074:−;HP][118081:118705:−;HP][119031:119727:−;Deoxynucleotide monophosphate kinase][119726:120257:−;Tail tube terminator protein][120626:121415:+;HP][121451:122306:−;HP][122321:122681:−;HP][123034:123394:+;Baseplate wedge protein gp53][123390:125160:+;Baseplate central spike complex protein gp5][125164:127231:+;HP][127262:129188:+;Baseplate wedge protein gp6][129268:132355:+;Baseplate wedge protein gp7][132355:133348:+;Baseplate wedge protein gp8][133357:134221:+;Baseplate protein gp9][134217:136035:+;Baseplate wedge protein gp10][136034:136703:+;Baseplate wedge protein gp11][136712:138098:+;Short tail fiber protein gp12][138108:139860:+;Fibritin][139898:140825:+;Neck protein gp13][140834:141581:+;Neck protein gp14][141660:142485:+;Tail completion protein gp15][142484:143024:+;Terminase %2C small subunit][142992:144822:+;Terminase %2C large subunit][144841:146833:+;Tail sheath protein][146881:147367:+;Tail tube protein gp19][147422:148997:+;Portal protein][149248:149653:+;Prohead assembly protein gp68][149655:150303:+;Prohead core protein protease][150335:151124:+;Capsid assembly scaffolding protein][151143:152712:+;Major capsid protein][152797:153433:+;HP][153465:154755:+;Capsid vertex protein][155059:155479:+;Recombination protein uvsY][155478:155655:+;HP][156259:156493:−;ATP-dependent DNA helicase uvsW][156501:157842:−;ATP-dependent DNA helicase uvsW][158071:158650:+;HP][158742:159054:+;HP][159093:159663:+;HP][159691:160225:+; Highly immunogenic outer capsid protein][160235:160511:+;Highly immunogenic outer capsid protein][160524:161043:+;HP][161075:161540:−;HP][161589:162429:−;HP][162543:163419:+;HP][163451:163769:+;HP][163765:163942:+;HP][163938:164265:+;HP][164266:164623:+;HP][164622:165147:+;HP][165150:166170:+;RNA ligase 2][166159:166741:+;HP][167330:167591:+;HP][167600:168050:+;HP][168077:169511:+;HP][169796:170648:+;DNA adenine methylase][170656:170932:+;Glutaredoxin][170963:171446:+;Recombination endonuclease VII][171765:173889:+;Anaerobic ribonucleoside-triphosphate reductase][174195:174693:+;HP][174692:174899:+;HP][175231:175426:+;HP][175422:175950:+;HP][175946:176438:+;HP]

[0409] Essential genes of phage 395-D2-3-5: [1217:1670:−;Spanin %2C inner membrane subunit][1759:2026:−;Terminase %2C small subunit gp18][2029:2233:−;HP][4479:8442:−;Peptidoglycan transglycosylase gp16][8460:10704:−;Internal virion protein gp15][10706:11300:−;Internal virion protein gp14][11302:11692:−;HP][11678:12104:−;HP][12176:14582:−;Tail tubular protein gp12][14597:15188:−;Tail tubular protein gp11][15572:16616:−;Minor capsid protein][16772:17705:−;Capsid assembly scaffolding protein][17806:19414:−;Portal protein][19424:19745:−;HP][19771:20023:−;HP][20027:20273:−;HP][20366:20480:−;HP][20458:21373:−;Exonuclease][21548:21758:−;Fusion protein 5.5/5.7][21754:22060:−;Fusion protein 5.5/5.7][22078:24193:−;DNA-directed DNA polymerase][24557:24770:−;HP][24866:26381:−;DNA primase/helicase][26745:27201:−;Endolysin][27193:27655:−;Endonuclease I][27654:28353:−;Single-stranded DNA-binding protein gp2.5][29241:29499:−;HP][29667:30684:−;DNA ligase][30778:31054:−;Inhibitor of dGTPase][31879:34534:−;T7 RNA polymerase][34604:35714:−;Protein kinase 0.7][35885:36083:−;HP][36257:36458:−;HP][36522:36981:−;HP][38539:39172:−;Terminase %2C large subunit gp19]

[0410] Essential genes of phage KP10-93: [123:1185:−;HP][1361:2276:−;HP][2347:2770:−;HP][2741:3023:−;HP][3129:3522:−;HP][3538:4147:−;HP][4329:4545:−;HP][4537:4825:−;HP][4827:5301:−;HP][5607:5931:−;HP][5940:6531:−;HP][6527:6674:−;HP][6741:7383:−;HP][7447:8002:−;HP][8013:8211:−;HP][8247:9594:−;HP][9603:10128:−;HP][10127:10586:−;HP][10617:11013:−;L-alanyl-D-glutamate peptidase][11080:11482:−;HP][11536:11860:−;HP][11899:12163:−;HP][12232:12493:−;HP][12494:12926:−;HP][13106:13460:−;HP][13434:13815:−;HP][14874:15402:−;HP][15401:15725:−;HP][15753:16011:−;HP][16012:16396:−;HP][16406:16814:−;HP][17056:17308:−;HP][17300:17594:−;HP][17590:17926:−;HP][17936:18077:−;HP][18177:18297:−;HP][18362:18902:−;HP][18909:19533:−;HP][19859:20555:−;Deoxynucleotide monophosphate kinase][20554:21085:−;Tail tube terminator protein][21454:22243:+;HP][22279:23134:−;HP][23149:23509:−;HP][23862:24222:+;Baseplate wedge protein gp53][24218:25988:+;Baseplate central spike complex protein gp5][25992:28059:+;HP][28090:30016:+;Baseplate wedge protein gp6][30096:33183:+;Baseplate wedge protein gp7][33183:34176:+;Baseplate wedge protein gp8][34185:35049:+;Baseplate protein gp9][35045:36863:+;Baseplate wedge protein gp10][36862:37531:+;Baseplate wedge protein gp11][37540:38926:+;Short tail fiber protein gp12][38936:40688:+;Fibritin][40726:41653:+;Neck protein gp13][41662:42409:+;Neck protein gp14][42489:43314:+;Tail completion protein gp15][43313:43853:+;Terminase %2C small subunit][43821:45651:+;Terminase %2C large subunit][45670:47662:+;Tail sheath protein][47710:48196:+;Tail tube protein gp19][48251:49826:+;Portal protein][50077:50482:+;Prohead assembly protein gp68][50484:51132:+;Prohead core protein protease][51164:51953:+;Capsid assembly scaffolding protein][51972:53541:+;Major capsid protein][53626:54262:+;HP][54294:55584:+;Capsid vertex protein][55888:56308:+;Recombination protein uvsY][56307:56484:+;HP][56944:57178:−;ATP-dependent DNA helicase uvsW][57186:58527:−;ATP-dependent DNA helicase uvsW][58756:59335:+;HP][59426:59738:+;HP][59777:60347:+;HP][60375:60909:+;Highly immunogenic outer capsid protein][60919:61195:+;Highly immunogenic outer capsid protein][61208:61727:+;HP][61759:62224:−;HP][62273:63113:−;HP][63227:64103:+;HP][64135:64453:+;HP][64449:64626:+;HP][64622:64949:+;HP][64950:65307:+;HP][65306:65831:+;HP][65834:66854:+;RNA ligase 2][66857:67376:+;HP][67365:67953:+;HP][68542:68803:+;HP][68812:69262:+;HP][69289:70723:+;HP][71008:71860:+;DNA adenine methylase][71868:72141:+;Glutaredoxin][73246:75370:+;Anaerobic ribonucleoside-triphosphate reductase][75678:76173:+;HP][76172:76379:+;HP][76711:76915:+;HP][76951:77443:+;HP][77512:78472:+;HP][78514:79183:+;HP][79142:79424:+;Glutaredoxin][79420:79720:+;HP][79799 :83573:+;Long-tail fiber proximal subunit][83572:84697:+;Long-tail fiber protein gp35][84746:85415:+;Long-tail fiber protein gp36][85423:89254:+;HP][89934:90582:+;Holin][90848:91139:−;HP][91138:91936:−;HP][92016:92244:−;HP][92240:92573:−;HP][92547:92685:−;HP][92729:92978:−;HP][93014:93452:−;HP][93426:93801:−;HP][93846:94746:−;HP][94745:97007:−;HP][97017:97254:−;HP][97257:97812:−;HP][97883:99170:−;HP][99169:101068:−;HP][101135:101300:−;HP][101299:101740:−;HP][101762:102347:−;HP][102333:102612:−;HP][102608:103205:−;HP][103244:103574:−;HP][104283:104586:−;HP][105023:105305:−;HP][105301:105973:−;Exodeoxyribonuclease][105969:106254:−;HP][106254:106563:−;HP][106587:107916:−;ATP-dependent DNA helicase dda][107912:108203:−;HP][108384:108921:−;HP][108928:109954:−;DNA primase][109957:110218:−;HP][110273:110492:−;HP][110488:110977:−;HP][110982:111714:−;HP][112080:112317:−;HP][112408:112663:−;HP][113055:114492:−;ATP-dependent helicase 41][114501:114822:−;HP][114859:116017:−;Recombination and repair protein][116091:118791:−;DNA-directed DNA polymerase][119163:119451:−;HP][119519:119882:−;Translation repressor protein][119885:120449:−;Sliding-clamp-loader gp44 subunit][120451:121450:−;Sliding-clamp-loader gp44 subunit][121508:122174:−;DNA polymerase clamp][122200:122470:−;HP][122525:123497:−;HP][123512:124091:−;ProteinGp59][124168:124414:−;RNApolymerase-associated protein Gp33][124417:124681:−;Double-stranded DNA-binding protein][124690:125626:−;Ribonuclease H][125930:126458:+;RNA polymerase sigma factor][126454:126670:+;HP][127025:128072:+;Exonuclease subunit 1][128329:130027:+;Exonuclease subunit 2][130567:130765:+;HP][130838:132548:+;HP][132607:132898:+;HP][132894:133125:+;HP][133121:133379:+;HP][133375:133954:+;HP][133955:134831:+;Thymidylate synthase][134871:137118:+;Ribonucleoside-diphosphate reductase large subunit][137156:138332:+;HP][138895:139264:+;Endonuclease II][139244:140402:+;T4 RNA ligase 1][140608:140935:+;HP][140903:141239:+;HP][141235:141553:+;HP][141537:141711:+;HP][141707:142592:+;Polynucleotide kinase][142644:142932:+;HP][142928:143180:+;HP][143395:143953:+;Deoxycytidylate deaminase][143968:144310:+;Capsid assembly protein Gp31][144320:144572:+;HP][144887:145169:+;HP][145178:145598:+;HP][145780:146206:+; HP][146216:146579:+;HP][146578:146848:+;HP][146973:147267:+;HP][147909:148350:+;HP][148346:148865:+;HP][148873:149137:+;HP][149138:149360:+;HP][150441:151971:+;HP][153327:153618:+;HP][153926:154304:+;HP][154300:155410:−;HP][155479:156055:+;HP][156051:157833:+;HP][157843:158917:+;Baseplate tail-tube junction protein gp48][158926:159790:+;Baseplate tail-tube junction protein gp54][159818:160562:+;HP][160558:161113:+;HP][161113:161506:+;Baseplate wedge protein gp25][161540:161996:−;HP][162003:162228:−;HP][162585:162870:−;HP][162885:163356:−;HP][163507:164125:−;HP][164194:166411:−;HP][166418:166739:−;HP][166738:167254:−;HP][167479:167767:−;HP][168187:168466:−;HP][168524:169436:−;HP][169432:169690:−;HP][169689:169935:−;HP][169931:170939:−;HP][171750:172023:−;HP]

[0411] Essential genes of phage KP10-14: [1820:2108:−;HP][2176:2539:−;Translation repressor protein][2542:3106:−;Sliding-clamp-loader gp44 subunit][3108:4107:−;Sliding-clamp-loader gp44 subunit][4165:4831:−;DNA polymerase clamp][4857:5127:−;HP][5182:6154:−;HP][6169:6748:−;Protein Gp59][6825:7071:−;RNA polymerase-associated protein Gp33][7074:7338:−;Double-stranded DNA-binding protein][7347:8283:−;Ribonuclease H][8587:9115:+;RNA polymerase sigma factor][9111:9327:+;HP][9682:10729:+;Exonuclease subunit 1][10986:12678:+;Exonuclease subunit 2][13440:13635:+;HP][13708:15418:+;HP][15477:15768:+;HP][15764:15995:+;HP][15991:16249:+;HP][16245:16824:+;HP][16825:17701:+;Thymidylate synthase][17740:19993:+;Ribonucleoside-diphosphate reductase large subunit][20029:21205:+;Ribonucleoside-diphosphate reductase subunit beta][21500:21866:+;Endonuclease II][21846:23004:+;T4 RNA ligase 1][23012:23324:+;HP][23619:23793:+;HP][23789:24674:+;Polynucleotide kinase][24726:25014:+;HP][25010:25262:+;HP][25477:26035:+;Deoxycytidylate deaminase][26050:26392:+;Capsid assembly protein Gp31][26402:26654:+;HP][26969:27251:+;HP][27260:27680:+;HP][27721:28288:+;HP][28298 :28661:+;HP][28660:28930:+;HP][29055:29349:+;HP][29990:30431:+;HP][30427:30946:+;HP][30954:31218:+;HP][31219:31441:+;HP][31521:32052:+;HP][32032:33562:+;HP][34920:35211:+;HP][35519:35897:+;HP][35893:37003:−;HP][37072:37648:+;HP][37644:39432:+;HP][39442:40525:+;Baseplate tail-tube junction protein gp48][40534:41398:+;Baseplate tail-tube junction protein gp54][41426:42167:+;HP][42163:42718:+;HP][42718:43111:+;Baseplate wedge protein gp25][43145:43601:−;HP][43608:43833:−;HP][44190:44475:−;HP][44490:44961:−;HP][45112:45730:−;HP][45801:48018:−;HP][48025:48346:−;HP][48345:48861:−;HP][49086:49374:−;HP][49794:50073:−;HP][50131:51043:−;HP][51039:51297:−;HP][51296:51542:−;HP][51538:52546:−;HP][52545:52923:−;HP][52919:53147:−;HP][53751:54024:−;HP][54389:55451:−;HP][55627:56542:−;HP][56613:57036:−;HP][57007:57289:−;HP][57395:57788:−;HP][57804:58413:−;HP][58595:58883:−;HP][58885:59359:−;HP][59807:60131:−;HP][60140:60731:−;HP][60727:60874:−;HP][60941:61583:−;HP][61647:62202:−;HP][62214:62412:−;HP][62449:63796:−;HP][63805:64330:−;HP][64329:64788:−;HP][64819:65215:−;L-alanyl-D-glutamate peptidase][65282:65684:−;HP][65738:66062:−;HP][66101:66365:−;HP][66434:66695:−;HP][66696:67128:−;HP][67308:67662:−;HP][67636:68017:−;HP][68309:69479:−;HP][69489:69696:−;HP][69692:69953:−;HP][70215:70362:−;HP][70358:70610:−;HP][70681:70960:−;HP][72456:72657:−;HP][73644:74172:−;HP][74171:74495:−;HP][74523:74781:−;HP][74782:75166:−;HP][75176:75584:−;HP][75826:76078:−;HP][76070:76364:−;HP][76360:76696:−;HP][76706:76847:−;HP][76936:77077:−;HP][77142:77682:−;HP][77689:78313:−;HP][78639:79335:−;Deoxynucleotide monophosphate kinase][79334:79865:−;Tail tube terminator protein][80234:81023:+;HP][81059:81914:−;HP][81929:82397:−;HP][82642:83002:+;Baseplate wedge protein gp53][82998:84768:+;Baseplate central spike complex protein gp5][84769:86836:+;HP][86867:88793:+;Baseplate wedge protein gp6][88873:91960:+;Baseplate wedge protein gp7][91960:92953:+;Baseplate wedge protein gp8][92962:93826:+;Baseplate protein gp9][93822:95640:+;Baseplate wedge protein gp10][95639:96308:+;Baseplate wedge protein gp11][96317:97703:+;Short tail fiber protein gp12][97716:99468:+;Fibritin][99506:100433:+;Neck protein gp13][100442:101189:+;Neck protein gp14][101269:102094:+;Tail completion protein gp15][102093:102633:+;Terminase %2C small subunit][102601:104431:+;Terminase %2C large subunit][104450:106442:+;Tail sheath protein][106490:106976:+;Tail tube protein gp19][107031:108606:+;Portal protein][108856:109261:+;Prohead assembly protein gp68][109263:109911:+;Prohead core protein protease][109943:110732:+;Capsid assembly scaffolding protein][110751:112320:+;Major capsid protein][112405:113041:+;HP][113073:114363:+;Capsid vertex protein][114667:115087:+;Recombination protein uvsY][115086:115263:+;HP][115592:115826:−;ATP-dependent DNA helicase uvsW][115834:117175:−;ATP-dependent DNA helicase uvsW][117404:118028:+;HP][118120:118432:+;HP][118471:119041:+;HP][120141:120417:+; Highly immunogenic outer capsid protein][120430:120949:+;HP][120980:121445:−;HP][121494:122334:−;HP][122448:123324:+;HP][123356:123674:+;HP][123670:123847:+;HP][123843:124170:+;HP][124171:124528:+;HP][124527:125052:+;HP][125055:125271:+;RNA ligase 2][125300:126074:+;RNA ligase 2][126077:126596:+;HP][126585:127173:+;HP][127768:128029:+;HP][128038:128488:+;HP][128515:129949:+;HP][130234:131086:+;DNA adenine methylase][131094:131370:+;Glutaredoxin][131401:131884:+;Recombination endonuclease VII][131880:134004:+;Anaerobic ribonucleoside-triphosphate reductase][134311:134806:+;HP][134805:135012:+;HP][135344:135539:+;HP][135535:136063:+;HP][136059:136551:+;HP][136620:137580:+;HP][137622:138291:+;HP][138250:138532:+; Glutaredoxin][138528:138828:+;HP][138907:142681:+;Long-tail fiber proximal subunit][142680:143805:+;Long-tail fiber protein gp35][143854:144523:+;Long-tail fiber protein gp36][149181:149829:+;Holin][150095:150386:−;HP][150385:151183:−;HP][151263:151491:−;HP][151487:151820:−;HP][151794:151932:−;HP][151976:152225:−;HP][152261:152699:−;HP][152673:153048:−;HP][153093:153993:−;HP][153992:156254:−;HP][156264:156501:−;HP][156504:157059:−;HP][157130:158417:−;HP][158416:160315:−;HP][160382:160547:−;HP][160546:160987:−;HP][161009:161594:−;HP][161580:161859:−;HP][161855:162452:−;HP][162491:162821:−;HP][163530:163833:−;HP][163829:164054:−;HP][164270:164552:−;HP][164548:165220:−;Exodeoxyribonuclease][165216:165501:−;HP][165501:165810:−;HP][165834:167163:−;ATP-dependent DNA helicase dda][167159:167450:−;HP][167631:168168:−;HP][168175:169201:−;DNA primase][169204:169465:−;HP][169520:169739:−;HP][169735:170224:−;HP][170229:170961:−;HP][171327:171564:−;HP][171655:171910:−;HP][172302:173739:−;ATP-dependent helicase 41][173748:174069:−;HP][174106:175264:−;Recombination and repair protein][175338:176682:−;DNA-directed DNA polymerase]

[0412] Essential genes of phage KP10-91: [854:1196:+;HP][1372:1540:+;HP][1555:1744:+;HP][1912:2173:+;HP][2512:2917:+;Protein A2][2983:3253:+;HP][3249:3477:+;HP][3560:5243:+;Protein A1][5306:5759:+;HP][5832:6549:+;5′-deoxynucleotidase][7151:7376:−;HP][7489:9466:+;Receptor-binding protein][9476:9950:+;putative terminase %2C small subunit][9949:11266:+;Terminase %2C large subunit][11499:11940:+;Nicking endonuclease][11939:13151:+;Portal protein][13147:13618:+;HP][13814:14411:+;Prohead protease][14424:15807:+;Major capsid protein][15865:16378:+;HP][16428:17139:+;Tail completion protein][17138:17624:+;Tail tube terminator protein][17647:18775:+;Tail tube protein][18784:19672:+;Minor tail protein][19675:20098:+;HP][20171:20498:+;HP][20582:25631:+;HP][25745:26360:+;Distal tail protein][26356:29203:+;putative baseplate hub protein][29230:39601:+;HP][39604:40024:+;L-shaped tail fiber protein p132][40023:42063:+;HP][42108:42552:−;Deoxyuridine 5′-triphosphate nucleotidohydrolase][42551:43430:−;T5 flap endonuclease][43426:43909:−;Protein D14][43908:45744:−;putative exonuclease subunit 2][45727:46720:−;putative exonuclease subunit 1][46759:47533:−;putative ssDNA-binding protein][47535:47889:−;HP][48091:49450:−;putative helicase D10][49936:52507:−;DNA polymerase][52574:53459:−;HP][53455:54934:−;HP][55018:55777:−;Putative transcription factor D5][55779:56529:−;HP][56728:57691:−;DNA ligase][57690:57966:−;HP][57922:58084:−;HP][58139:58664:−;HP][58623:58926:−;HP][58976:59273:−;HP][59285:59690:−;HP][59768:60284:−;HP][60276:60972:−;HP][61004:61307:−;HP][61275:64065:−;Putative replication origin binding protein][64663:65059:−;HP][65055:65457:−;HP][65443:65608:−;HP][65594:66425:−;HP][66424:66637:−;HP][66697:68527:−;Anaerobic ribonucleoside-triphosphate reductase][68836:69586:+;HP][69587:69701:+;HP][69715:69925:+;HP][70053:72378:+;Ribonu cleoside-diphosphate reductase large subunit][72474:73761:+;HP][73760:74324:+;HP][74494:75175:+;Thymidylate synthase][75181:75415:+;HP][75512:75788:+;HP][75787:76270:+;HP][76269:76431:+;HP][76420:76705:+;HP][76834:77245:+;HP][77244:78249:+;HP][78313:78775:+;HP][80130:80457:+; HP][80459:80636:+;HP][80864:81158:+;HP][81291:81489:+;HP][81488:81698:+;HP][81708:82203:+;HP][84038:84230:+;HP][84237:84396:+;HP][85267:85549:+;HP][85569:85947:+;HP][85946:86162:+;HP][86233:86347:+;HP][87778:87973:+;HP][87975:88314:+;HP][88313:88463: +;HP][88687:89197:+;HP][89534:89636:+;HP][89754:89946:+;HP][90043:90400:+;HP][90390: 90771:+;HP][91061:91265:+;HP][91261:91525:+;HP][91524:92067:+;HP][92053:92281:+;HP][92273:92636:+;HP][92604:92871:+;HP][92860:93166:+;HP][93162:93372:+;HP][93373:93811: +;HP][93857:94181:+;HP][94173:94446:+;HP][94438:94873:+;HP][94992:95385:+;HP][95493: 96192:+;HP][96157:96619:+;HP][96741:96861:+;HP][96857:97619:+;Deoxynucleoside-5′-monophosphate kinase][97628:98240:+;HP][98397:99060:+;Holin][99056:99470:+;L-alanyl-D-glutamate peptidase][100019:100424:+;HP][100416:100701:+;HP][100802:101204:+;HP][101204:101567:+;HP][101566:102397:+;Serine/threonine-protein phosphatase][102407:102641:+;HP][102649:103018:+;HP][103020:103140:+;HP][103203:103632:+;HP][103713:104019:+;HP][104018:104300:+;HP][104296:104545:+;HP][104541:104883: +;HP][104875:105103:+;HP][105086:105554:+;HP][105513:105903:+;HP][105914:106202:+;H P][106895:107297:+;HP][107309:107819:+;HP][107831:108152:+;HP][108209:109076:+;HP][110791:110935:−;HP][110931:111111:−;HP][111107:111200:−;HP][111199:111313:−;HP][111508:112474:+;HP][112539:113034:+;HP][113143:113491:+;HP]

[0413] Essential genes of phage KLP6a-30: [23:173:+;HP][320:2849:+;HP][3002:7841:+;HP][7891:8140:+;HP][8123:8462:+;HP][8448:9201:+;HP][9229:9442:−;HP][9503:10145:+;Neck protein gp14][10147:10846:+;HP][10848:11535:+;HP][11515:13726:+;HP][13778:15674:+;Tail sheath protein][15699:16488:−;HP][16555:17011:+;HP][17045:17579:+;Tail tube protein][17646:19329:+;Portal protein][19374:19539:+;HP][19548:19857:+;HP][19867:20533:+;HP][20578:21439:+;HP][2153 3:22856:+;Major capsid protein][22939:23587:+;HP][23647:23893:+;HP][23889:24225:+;HP][24571:24778:+;HP][24758:24989:+;HP][25004:25442:+;HP][25441:25882:+;HP][25883:26120:+;HP][26223:26646:+;H P][26712:26994:+;HP][26990:27434:+;HP][27457:27625:+;HP][27659:28388:+;HP][28388:29003:−;HP][29077:29578:+;HP][29615:30077:+;HP][30066:30792:+;HP][30788:31535:+;HP][31562:33080:+;ATP-dependent DNA helicase uvsW][33064:33448:−;HP][33771:34440:+;DNA polymerase processivity component][34525:35515:+;Sliding-clamp-loader gp44 subunit][35517:35940:+;HP][35968:36433:+;HP][36449:37316:+;HP][37387:38608:+;HP][38604:38829:+;HP][41018:41390:+;HP][41454:41829:+;HP][41837:42710:+;HP][42860:43037:+; HP][43029:45228:+;HP][45272:45596:+;HP][45689:45935:+;HP][46224:46593:+;HP][46612:46792:+;HP][46904:47354:+;HP][47313:48189:+;HP][48277:48964:+;HP][48960:49308:+;HP][49357:50107:+;HP][50155:50848:+;HP][50844:51120:+;HP][51100:51427:+;HP][51423:51738: +;HP][51855:52134:+;Transcription factor 1][52380:53982:+;HP][53978:54746:−;HP][55084:55327:+;HP][55330:56101:+;HP][56087:57206:+;HP][57208:59536:+;HP][59538:59694:+;HP][59690:60011:+;HP][60000:60282:+;HP][60379:60997:+;HP][60996:61635:+;HP][61743:62019:+;HP][62095:64864:+;HP][64917:65484:+;HP][65493:65733:+;HP][65787:66141: +;HP][66196:66805:+;HP][66801:67473:+;HP][67472:67664:+;HP][67660:68524:+;DNA primase][68523:68736:+;HP][68916:69405:+;HP][69461:69659:+;HP][69651:69825:+;HP][69890:70685:+;HP][70791:71634:+;HP][71720:74003:+;Ribonucleoside-diphosphate reductase large subunit][74033:74768:+;HP][74831:75125:+;HP][75126:76233:+;HP][76242:76467:+;HP][76561:77014:+;HP][77020:77389:+;HP][77371:77752:−;Baseplate wedge protein gp25][77815:79426:−;HP][79930:80734:−;HP][80783:81314:+;HP][81285:81774:+;HP][81812:82424:+;HP][82416:82713:+;HP][82699:82945:+;HP][82937:83180:+;HP][83189:83429:+;HP][83525:84572:+;HP][84615:85023:+;HP][85045:85963:−;HP][86046:86754:+;HP][86820:87555:+;HP][87579:87891:+;HP][88028:88922:+;HP][88996:89659:+;HP][89658:90702:+;HP][90698:91265:+;HP][91261:91813:+;HP][91812:92331:+;HP][92315:93401:+;Recombination and repair protein][93378:93708:+;HP][93714:95142:+;ATP-dependent helicase 41][95204:95540:+;HP][95553:95868:+;HP][95986:97180:+;HP][97176:97317:+;HP][97316:97529:+;HP][97988:99410:+;HP][99411:99669:+;HP][99634:99895:+;HP][99884:100547:+;HP][100549:102535:−;HP][102545:103934:−;HP][103930:104488:−;HP][104502:105471:−;HP][105524:106265:+;HP][106264:106882:+;HP][107089:107497:−;HP][107507:108014:−;HP][108006:108351:−;HP][108413:108809:−;HP][108805:109378:−;HP][109367:109826:−;HP][109827:110499:−;HP][110501:110714:−;HP][110777:111074:−;HP][111073:111703:−;HP][111695:112301:−;HP][112297:112525:−;HP][112524:112767:−;HP][112810:113215:−;HP][113218:113533:−;HP][113532:113823:−;HP][113865:115197:−;HP][115198:117109:−;HP][117157:117784:−;HP][117780:118266:−;HP][118309:118501:−;HP][118547:119051:−;HP][119139:119361:−;HP][119362:120172:−;HP][120150:120462:−;HP][120574:120985:−;HP][120962:121259:−;HP][121311:122898:−;HP][122931:125688:−;HP][125790:126129:−;HP][126139:126307:−;HP][126303:126522:−;HP][126521:127175:−;HP][127171:127558:−;HP][127623:128046:−;HP][128050:128614:−;HP][128631:129723:−;HP][129719:130109:−;HP][130189:131407:−;HP][131410:131791:−;HP][131787:131991:−;HP][131993:132878:−;HP][132877:133126:−;HP][133187:133979:−;HP][133975:134326:−;HP][134393:137390:−;DNA-directed DNA polymerase][137468:138041:+;HP][138387:138915:+;HP][138996:139452:−;HP][139520:140900:−;HP][140968:141601:−;HP][142987:143188:−;HP][143601:143880:−;HP][146191:146761:−;HP][147115:148897:+;Baseplate wedge protein gp6][148880:149732:+;HP][149736:151062:+;HP][151113:154122:+;HP][154154:156686:+;HP]

[0414] Essential genes of phage CT-227-KP4M1-19: [3987:7434:−;HP][7521:8124:−;HP][8098:8836:−;HP][8837:9590:−;Tail tip protein L][9659:10004:−;HP][10006:13102:−;HP][13452:13779:−;HP][13855:14509:−;HP][14564:15260:−;HP][15246:15678:−;HP][15667:16105:−;HP][16097:16475:−;HP][16480:16897:−;HP][16950:17256:−;HP][17347:18307:−;HP][18417:18936:−;HP][18987:20118:−;HP][20117:20885:−;HP][20874:22185:−;HP][22230:23832:−;HP][23841:24366:−;HP][24445:24709:−;HP][24702:24822:−;HP][25026:25260:−;HP][25247:25484:−;HP][25553:26129:−;HP][26125:26338:−;HP][26449:26641:−;HP][26706:27030:−;HP][27105:27594:−;HP][27593:27812:−;HP][27891:28077:−;HP][28073:28319:−;HP][28318:28621:−;HP][28630:29002:−;HP][29075:29273:−;HP][29269:29527:−;HP][29613:29934:−;HP][29944:30157:−;HP][30225:30450:−;HP][31095:31248:−;HP][31400:31706:−;HP][32906:33188:+;HP][33260:33455:+;HP][33451:33691:+;HP][33690:34068:+;HP][34140:34368:+;HP][34364:35057:+;HP][35129:35333:+;HP][35329:35512:+;HP][35512:35950:+;HP][36075:37644:+;HP][37647:38109:+;HP][38178:38604:−;HP][38600:39083:−;Lysozyme][39084:39300:−;HP][39426:40008:−;HP][40004:40493:−;HP][40530:41661:−;HP][41756:42008:−;HP][42004:42241:−;HP][42305:42542:−;HP][42545:43274:−;HP][43451:43859:−;HP][43858:45892:−;HP][45983:46385:+;HP][46460:47420:+;HP][47915:48962:+;HP][49021:49678:+;HP]

[0415] Essential genes of phage KP10-48: [658:886:−;HP][882:1152:−;HP][1219:1624:−;Protein A2][1963:2224:−;HP][2390:2579:−;HP][2594:2762:−;HP][3615:3963:−;HP][3959:4484:−;HP][4538:5033:−;HP][5098:6064:−;HP][6136:6475:−;HP][6619:6733:+;HP][6732:6903:+;HP][6899:7043:+;HP][8774:9626:−;HP][9701:10016:−;HP][10028:10538:−;HP][10550:10952:−;HP][11645:11933:−;HP][11944:12334:−;HP][12293:12761:−;HP][12744:12972:−;HP][12964:13306:−;HP][13302:13551:−;HP][13547:13829:−;HP][13828:14134:−;HP][14215:14644:−;HP][14707:14827:−;HP][14829:15198:−;HP][15206:15440:−;HP][15450:16281:−;Serine/threonine-protein phosphatase][16280:16643:−;HP][16642:17047:−;HP][17148:17433:−;HP][17425:17830:−;HP][18379:18793:−;L-alanyl-D-glutamate peptidase][18789:19452:−;Holin][19609:20221:−;HP][20230:20992:−;Deoxynucleoside-5′-monophosphate kinase][20988:21108:−;HP][21230:21692:−;HP][21657:22371:−;HP][22479:22872:−;HP][22991:23426:−;HP][23418:23718:−;HP][23683:24007:−;HP][24053:24491:−;HP][24492:24702:−;HP][24698:25004:−;HP][24993:25260:−;HP][25228:25591:−;HP][25583:25811:−;HP][25797:26340:−;HP][26339:26612:−;HP][26615:26813:−;HP][26925:27096:−;HP][27257:27638:−;HP][27628:27985:−;HP][28082:28274:−;HP][28991:29141:−;HP][29140:29479:−;HP][29481:29676:−;HP][31285:31399:−;HP][31470:31686:−;HP][31685:32063:−;HP][32083:32365:−;HP][33084:33243:−;HP][33250:33442:−;HP][35410:35905:−;HP][35915:36125:−;HP][36124:36322:−;HP][36451:36760:−;HP][36988:37165:−;HP][37167:37494:−;HP][38756:39218:−;HP][39282:40287:−;HP][40286:40697:−;HP][40826:41111:−;HP][41100:41262:−;HP][41261:41744:−;HP][41743:42019:−;HP][42116:42296:−;HP][42302:42983:−;Thymidylate synthase][43153:43717:−;Dihydrofolate reductase][43716:44874:−;HP][44970:47295:−;Ribonucleoside-diphosphate reductase large subunit][47423:47633:−;HP][47647:47761:−;HP][47762:48512:−;HP][48821:50651:+;Anaerobic ribonucleoside-triphosphate reductase][50711:50921:+;HP][50922:51756:+;HP][51739:51904:+;HP][51890:52292:+;HP][52288:52684:+;HP][53282:56072:+;Putative replication origin binding protein][56058:56343:+;HP][56375:57071:+;HP][57356:57761:+;HP][57773:58070:+;HP][58120:58429:+;HP][58512:58650:+;HP][58630:58906:+;HP][58905:59868:+;DNA ligase][60067:60817:+;HP][60819:61578:+;Putative transcription factor D5][61662:63141:+;HP][63137:64022:+;HP][64089:66660:+;DNA polymerase][67146:68505:+;putative helicase D10][68707:69061:+;HP][69063:69837:+;putative ssDNA-binding protein][69876:70869:+;putative exonuclease subunit 1][70852:72688:+;putative exonuclease subunit 2][72687:73170:+;Protein D14][73166:74045:+;T5 flap endonuclease][74044:74488:+;Deoxyuridine 5′-triphosphatenucleotidohydrolase][74532:76572:−;HP][76571:76991:−;L-shaped tail fiber protein p132][76994:87374:−;HP][87401:90248:−;putative baseplate hub protein][90244:90859:−;Distal tail protein][90973:96052:−;HP][96136:96463:−;HP][96536:96959:−;HP][96962:97850:−;Minor tail protein][97859:98987:−;Tail tube protein][99010:99496:−;Tail tube terminator protein][99495:100206:−;Tail completion protein][100256:100769:−;HP][100827:102210:−;Major capsid protein][102223:102820:−;Prohead protease][103019:103739:−;HP][103735:104947:−;Portal protein][104946:105387:−;Nicking endonuclease][105620:106937:−;Terminase %2C large subunit][106936:107410:−;putative terminase %2C small subunit][107420:109397:−;Receptor-binding protein][109510:109735:+;HP][110338:111055:−;5′-deoxynucleotidase][111128:111581:−;HP][111649:112804:−;Protein A1]

[0416] Essential genes of phage KP10-2: [25:1132:+;HP][1195:1474:+;HP][1495:2422:−;Baseplate tail-tube junction protein gp54][2421:3474:−;Baseplate tail-tube junction protein gp48][3483:5217:−;HP][5213:5741:−;Baseplate hub assembly protein gp28][5712:6855:−;Baseplate central spike complex protein gp27][6851:7610:−;HP][7661:8291:+;HP][8287:8698:+;Baseplate wedge protein gp25][8739:9156:+;Recombination protein uvsY][9186:9354:+;HP][9413:9656:−;ATP-dependent DNA helicase uvsW][9652:10636:−;ATP-dependent DNA helicase uvsW][11213:12008:+;HP][12017:13424:+;HP][13502:13730:+;HP][13729:14056:+;HP][14169 :14427:+;HP][14437:15445:+;RNA ligase 2][15444:15993:+;HP][16839:18120:−;Capsid vertex protein][18201:19761:−;Major capsid protein][19781:20594:−;Capsid assembly scaffolding protein][20626:21277:−;Prohead core protein protease][21276:21702:−;Prohead assembly protein gp68][21701:21926:−;HP][21925:23494:−;Portal protein][23598:24090:−;Tail tube protein gp19][24218:26192:−;Tail sheath protein][26225:28064:−;Terminase %2C large subunit][28041:28551:−;Terminase %2C small subunit][28547:29372:−;Tail completion protein gp15][29413:30190:−;Neck protein gp14][30193:31135:−;Neck protein gp13][31191:32958:−;HP][32966:34313:−;HP][34312:34984:−;Baseplate wedge protein gp11][34985:36809:−;Baseplate wedge protein gp10][36808:37720:−;Baseplate protein gp9][37787:38813:−;Baseplate wedge protein gp8][38805:41904:−;Baseplate wedge protein gp7][41900:43859:−;Baseplate wedge protein gp6][43858:44152:−;Baseplate puncturing device gp5.4][44152:44656:−;HP][44658:46389:−;Baseplate central spike complex protein gp5][46385:47024:−;Baseplate wedge protein gp53][47073:47523:+;HP][47522:48350:+;HP][48349:48952:+;Tail tube terminator protein][49019:49694:+;Deoxynucleotide monophosphate kinase][49690:49927:+;HP][49926:50382:+;HP][50457:50637:+;HP][50623:50803:+;HP][50802:50988:+;HP][51004:51355:+;HP][53257:53410:+;HP][53406:53775:+;HP][53758:53992:+;H P][54046:54271:+;HP][54622:55180:+;HP][55179:55629:+;HP][56554:56845:+;HP][56863:57127:+;HP][57113:57341:+;HP][57370:57964:+;HP][58003:58594:+;HP][58590:58953:+;HP][58949:59246:+;HP][59242:59569:+;HP][59568:59805:+;HP][59801:60248:+;HP][60255:60564:+; HP][60593:61088:+;Endolysin][61088:61568:+;HP][61649:62222:+;Internal protein III][62415:62721:+;HP][62801:63335:+;HP][63331:63643:+;HP][63624:63969:+;HP][63977:64340:+;HP][64339:64615:+;HP][64678:65137:+;Endoribonuclease RegB][65144:65690:+;HP][65689:66010:+;HP][66006:66399:+;HP][66407:66875:+;HP][66899 :67067:+;HP][67066:67666:+;HP][67646:67841:+;HP][68125:68500:+;HP][68546:68759:+;HP][68770:69058:+;Antiholin][69044:69431:+;HP][69535:70024:+;HP][70115:70382:+;HP][70384 :70576:+;HP][70565:70787:+;HP][70789:71281:+;HP][71277:71859:+;HP][72051:72474:+;HP][72470:73481:+;HP][74028:74244:+;HP][74321:75299:+;HP][75341:75488:+;HP][75484:75910:+;HP][75906:76242:+;HP][76238:76559:+;HP][76561:76759:+;HP][77122:77287:+;HP][77283:77550:+;HP][77607:78396:+;HP][78466:79441:+;HP][79461:79698:+;HP][79694:80009:+;H P][80005:80338:+;HP][80334:80844:+;HP][80840:81008:+;HP][80997:81288:+;HP][81250:81520:+;Glutaredoxin][81512:81701:+;HP][81990:82161:+;HP][82162:82552:+;HP][82530:82689: +;HP][82672:83125:+;HP][83117:83426:+;HP][83462:83936:+;Recombination endonuclease VII][83932:85771:+;Anaerobic ribonucleoside-triphosphate reductase][85742:85982:+;HP][85947:86580:+;HP][86569:87040:+;HP][87157:87370:+;HP][87366:87708:+;HP][87704:88007:+;HP][88193:88382:+;HP][88378:88621:+;HP][88685:89018:+; HP][89014:89272:+;HP][89264:89549:+;HP][89541:89766:+;HP][89753:90032:+;HP][90028:90274:+;HP][90340:90889:+;RNA polymerase sigma factor][90872:91103:+;HP][91104:91407:+;HP][91384:91582:+;HP][91655:91913:+;HP][91982 :93179:+;DNA alpha-glucosyltransferase][93248:94271:+;Exonuclease subunit 1][94309:95950:+;Exonuclease subunit 2][95946:96141:+;HP][96151:96529:+;15 kDa RNA polymerase-binding protein][96565:97267:+;DNA polymerase clamp][97315:98278:+;Sliding-clamp-loader gp44 subunit][98274:98844:+;Sliding-clamp-loader gp44 subunit][98846:99209:+;Translation repressor protein][99301:102010:+;DNA-directed DNA polymerase][102079:102523:+;HP][102533:102740:+;Immunity protein][102748:103483:+;Deoxycytidylate 5-hydroxymethyltransferase][103479:104316:+;HP][104342:104564:+;HP][104646:105822:+;Rec ombination and repair protein][105811:106162:+;HP][106237:107611:+;ATP-dependent helicase 41][107620:107854:+;HP][107919:108198:+;HP][108208:108502:+;Protein spackle][108498:108708:+;HP][108723:108888:+;HP][108926:109949:+;DNA primase][109967:110159:−;HP][110225:110747:+;HP][110746:110884:+;HP][110914:111142:+;Small outer capsid protein][111220:111412:+;HP][111913:112087:+;HP][112160:112826:+;HP][112906:113662:+; HP][113661:113976:+;HP][113972:115304:+;ATP-dependent DNA helicase dda][115310:115565:+;HP][115557:116247:+;Exodeoxyribonuclease][116246:116414:+;HP][116477:116885:+;HP][116949:117165:+;HP][117164:117530:+;HP][117523:117859:+;HP][117845:118022:+;HP][118021:118111:+;HP][118107:118356:+;HP][118434:118803:+;HP][118833: 120672:+;HP][120719:120872:+;HP][121011:121218:+;HP][121228:123397:+;Protein rIIA][123397:124309:+;HP][124351:124648:+;HP][124589:125168:+;Endonuclease IV][125232:125472:+;HP][125532:125649:+;HP][125659:125851:+;HP][125847:125937:+;HP][125995:126451:+;Nucleoid disruption protein][126516:126624:+;HP][126620:126761:+;HP][126766:128155:+;HP][128382:128646:+; HP][128770:129415:+;Middle transcription regulatory protein motA][129414:129756:+;HP][129752:129932:+;HP][129919:130282:+;HP][130281:130584:+; HP][130767:130893:+;HP][130876:131155:+;HP][131151:131478:+;HP][131474:131741:+;HP][131808:132081:+;10 kDa anti-sigma factor][132081:132738:−;Holin][132766:133306:−;HP][133343:137990:−;HP][137999:138692:−;Long-tail fiber protein gp36][138749:139886:−;Long-tail fiber protein gp35][139885:143731:−;Long-tail fiber proximal subunit][143807:144734:+;Ribonuclease H][144744:145017:+;Double-stranded DNA-binding protein][144997:145297:+;RNA polymerase-associated protein Gp33][145293:145956:+;Protein Gp59][146023:146941:+;Single-stranded DNA-binding protein][147067:147325:+;HP][147366:147588:+;HP][147591:147957:+;HP][148013:148292:+; HP][148288:148378:+;HP][148370:148697:+;HP][148775:148940:+;HP][148947:149547:+;Dih ydrofolate reductase][149530:149848:+;HP][149840:150716:+;Thymidylate synthase][150712:150919:+;HP][150915:151221:+;HP][151211:153458:+;Ribonucleoside-diphosphate reductase large subunit][153514:154657:+;HP][154684:155101:+;Endonuclease II][155094:156246:+;T4 RNA ligase 1][156308:156818:+;HP][156805:157159:+;HP][157155:157443:+;HP][157453:157666:+;HP][157665:158559:+;Polynucleotide kinase][158570:158855:+;HP][158844:159081:+;HP][159080:159425:+;HP][159425:159995:+; Deoxycytidylate deaminase][159994:160195:+;HP][160191:160500:+;HP][160557:160881:+;Capsid assembly protein Gp31][160995:161244:+;Lysis inhibition accessory protein][161610:161787:+;HP][161908:162277:+;HP][162317:162830:+;HP][162923:163283:+; HP][163322:163808:+;HP][163820:164099:+;HP][164109:164280:+;HP][164276:164477:+;HP][164660:165503:+;HP][165544:165751:+;HP][165750:167223:+;HP][167219:167399:+;HP]

[0417] Essential genes of phage KP10-84: [164:443:−;HP][439:1036:−;HP][1075:1405:−;HP][2114:2417:−;HP][2854:3136:−;HP][3132:3804:−;Exodeoxyribonuclease][3800:4085:−;HP][4085:4394:−;HP][4418:5747:−;ATP-dependent DNA helicase dda][5743:6034:−;HP][7087:7624:−;HP][7631:8657:−;DNA primase][8660:8921:−;HP][8976:9195:−;HP][9191:9680:−;HP][9685:10417:−;HP][10783:11020:−;HP][11111:11366:−;HP][11758:13195:−;ATP-dependent helicase 41][13204:13525:−;HP][13562:14720:−;Recombination and repair protein][14794:17494:−;DNA-directed DNA polymerase][17866:18154:−;HP][18222:18585:−;Translation repressor protein][18588:19152:−;Sliding-clamp-loader gp44 subunit][19154:20153:−;Sliding-clamp-loader gp44 subunit][20211:20877:−;DNA polymerase clamp][20903:21173:−;HP][21228:22200:−;HP][22215:22794:−;Protein Gp59][22871:23117:−;RNA polymerase-associated protein Gp33][23120:23384:−;Double-stranded DNA-binding protein][23393:24329:−;Ribonuclease H][24633:25161:+;RNA polymerase sigma factor][25157:25373:+;HP][25728:26775:+;Exonuclease subunit 1][27032:28730:+;Exonuclease subunit 2][28729:28921:+;HP][28994:30704:+;HP][30763:31054:+;HP][31050:31281:+;HP][31277:31535:+;HP][31531:32110:+;HP][32111:32987:+;Thymidylate synthase][33026:35279:+;Ribonucleoside-diphosphate reductase large subunit][35315:36491:+;Ribonucleoside-diphosphate reductase subunit beta][36786:37152:+;Endonuclease H1][37132:38290:+;T4 RNA ligase 1][38496:38823:+;HP][38791:39127:+;HP][39123:39441:+;HP][39589:40474:+;Polynucleotide kinase][40526:40814:+;HP][40810:41062:+;HP][41277:41835:+;Deoxycytidylate deaminase][41850:42192:+;Capsid assembly protein Gp31][42202:42454:+;HP][42769:43051:+;HP][43060:43483:+;HP][43524:44091:+;HP][44101 :44464:+;HP][44463:44733:+;HP][44858:45152:+;HP][45852:46293:+;HP][46289:46808:+;HP][46816:47080:+;HP][47081:47303:+;HP][47383:47914:+;HP][47894:49424:+;HP][50159:50432:+;HP][50857:51157:+;HP][51143:51521:+;HP][51517:52627:−;HP][52696:53272:+;HP][53268:55050:+;HP][55060:56134:+;Baseplate tail-tube junction protein gp48][56143:57007:+;Baseplate tail-tube junction protein gp54][57035:57779:+;HP][57775:58330:+;HP][58330:58723:+;Baseplate wedge protein gp25][58757:59213:−;HP][59220:59445:−;HP][59802:60087:−;HP][60102:60573:−;HP][60724:61342:−;HP][61413:63630:−;HP][63637:63958:−;HP][63957:64473:−;HP][64698:64986:−;HP][65192:65471:−;HP][65529:66441:−;HP][66437:66695:−;HP][66694:66940:−;HP][66936:67944:−;HP][67943:68321:−;HP][68317:68545:−;HP][69149:69422:−;HP][69786:70848:−;HP][71024:71939:−;HP][72009:72432:−;HP][72403:72685:−;HP][72791:73184:−;HP][73200:73809:−;HP][73991:74279:−;HP][74281:74755:−;HP][75061:75385:−;HP][75394:75985:−;HP][75981:76128:−;HP][76138:76534:−;HP][76601:77243:−;HP][77307:77862:−;HP][77873:78071:−;HP][78108:79455:−;HP][79464:79800:−;HP][79989:80448:−;HP][80479:80875:−;L-alanyl-D-glutamate peptidase][80942:81344:−;HP][81760:82024:−;HP][82093:82354:−;HP][82355:82787:−;HP][82967:83315:−;HP][83295:83661:−;HP][83943:85098:−;HP][85831:86086:−;HP][86348:86495:−;HP][86491:86743:−;HP][86814:87093:−;HP][87176:87434:−;HP][88589:88790:−;HP][89174:89708:−;HP][89700:90036:−;HP][90043:90304:−;HP][90300:90681:−;HP][90677:91091:−;HP][91600:91897:−;HP][92156:92495:−;HP][92505:92646:−;HP][92735:92876:−;HP][92942:93482:−;HP][93503:94130:−;HP][94456:95152:−;Deoxynucleotide monophosphate kinase][95151:95682:−;Tail tube terminator protein][96051:96840:+;HP][96876:97731:−;HP][97746:98106:−;HP][98459:98819:+;Baseplate wedge protein gp53][98815:100585:+;Baseplate central spike complex protein gp5][100589:102656:+;HP][102687:104613:+;Baseplate wedge protein gp6][104693:107780:+;Baseplate wedge protein gp7][107780:108773:+;Baseplate wedge protein gp8][108782:109646:+;Baseplate protein gp9][109642:111460:+;Baseplate wedge protein gp10][111459:112128:+;Baseplate wedge protein gp11][112137:113523:+;Short tail fiber protein gp12][113533:115285:+;Fibritin][115323:116250:+;Neck protein gp13][116866:117613:+;Neck protein gp14][117692:118517:+;Tail completion protein gp15][118516:119056:+;Terminase %2C small subunit][119024:120854:+;Terminase %2C large subunit][120873:122865:+;Tail sheath protein][122913:123399:+;Tail tube protein gp19][123454:125029:+;Portal protein][125279:125684:+;Prohead assembly protein gp68][125686:126334:+;Prohead core protein protease][126366:127155:+;Capsid assembly scaffolding protein][127174:128743:+;Major capsid protein][128834:129473:+;HP][129505:130795:+;Capsid vertex protein][131091:131511:+;Recombination protein uvsY][131510:131687:+;HP][132146:132380:−;ATP-dependent DNA helicase uvsW][132388:133729:−;ATP-dependent DNA helicase uvsW][133958:134537:+;HP][134629:134941:+;HP][134980:135550:+;HP][135578:136112:+; Highly immunogenic outer capsid protein][136122:136398:+;Highly immunogenic outer capsid protein][136411:136930:+;HP][136962:137427:−;HP][137476:138316:−;HP][138430:139306:+;HP][139338:139656:+;HP][139652:139829:+;HP][139825:140152:+;HP][140153:140510:+;HP][140509:141034:+;HP][141037:142057:+;RNA ligase 2][142046:142628:+;HP][143205:143466:+;HP][143475:143925:+;HP][143952:145386:+;HP][145671:146523:+;DNA adenine methylase][146531:146807:+;Glutaredoxin][146838:147321:+;Recombination endonuclease VII][147640:149764:+;Anaerobic ribonucleoside-triphosphate reductase][150070:150568:+;HP][150567:150774:+;HP][151106:151301:+;HP][151297:151825:+;HP][151821:152313:+;HP][152382:153342:+;HP][153384:154053:+;HP][154012:154294:+; Glutaredoxin][154290:154590:+;HP][154669:158443:+;Long-tail fiber proximal subunit][158442:159567:+;Long-tail fiber protein gp35][159616:160285:+;Long-tail fiber protein gp36][160293:163998:+;HP][164519:165167:+;Holin][165433:165724:−;HP][165723:166521:−;HP][166601:166829:−;HP][166825:167158:−;HP][167132:167267:−;HP][167311:167560:−;HP][167596:168034:−;HP][168008:168383:−;HP][168428:169328:−;HP][169327:171589:−;HP][171599:171836:−;HP][171839:172394:−;HP][172465:173752:−;HP][173751:175650:−;HP][175717:175882:−;HP][175881:176322:−;HP]

[0418] Essential genes of phage KP10-64: [1795:2662:−;HP][2717:3038:−;HP][3050:3560:−;HP][3572:3974:−;HP][4667:4955:−;HP][4965:5355:−;HP][5314:5782:−;HP][5765:5993:−;HP][5985:6327:−;HP][6323:6572:−;HP][6568:6850:−;HP][6849:7155:−;HP][7236:7665:−;HP][7728:7848:−;HP][7850:8219:−;HP][8227:8461:−;HP][8471:9302:−;Serine/threonine-protein phosphatase][9301:9619:−;HP][9654:10056:−;HP][10157:10442:−;HP][10434:10839:−;HP][11388:11802:−;L-alanyl-D-glutamate peptidase][11798:12461:−;Holin][12618:13230:−;HP][13239:14001:−;Deoxynucleoside-5′-monophosphate kinase][13997:14117:−;HP][14239:14701:−;HP][14666:15365:−;HP][15473:15866:−;HP][15985:16420:−;HP][16412:16685:−;HP][16677:17001:−;HP][17047:17485:−;HP][17486:17696:−;HP][17692:17998:−;HP][17987:18254:−;HP][18222:18585:−;HP][18577:18805:−;HP][18791:19334:−;HP][19333:19606:−;HP][19609:19807:−;HP][19919:20090:−;HP][20251:20632:−;HP][20622:20979:−;HP][21076:21268:−;HP][21386:21488:−;HP][21826:22336:−;HP][22567:22906:−;HP][22908:23103:−;HP][24630:24744:−;HP][24815:25031:−;HP][25030:25408:−;HP][25428:25701:−;HP][26177:26357:−;HP][26343:26535:−;HP][28245:28740:−;HP][28750:28960:−;HP][28959:29157:−;HP][29286:29580:−;HP][29808:29973:−;HP][31288:31750:−;HP][31814:32819:−;HP][32818:33229:−;HP][33358:33643:−;HP][33632:33794:−;HP][33793:34276:−;HP][34275:34551:−;HP][34648:34882:−;HP][34888:35569:−;Thymidylate synthase][35739:36303:−;HP][36302:37460:−;HP][37443:37962:−;HP][38031:40356:−;Ribonucleoside-diphosphate reductase large subunit][40438:40927:−;HP][40996:41206:−;HP][41220:41334:−;HP][41335:42085:−;HP][42393:44223:+;Anaerobic ribonucleoside-triphosphate reductase][44283:44496:+;HP][44495:45329:+;HP][45312:45477:+;HP][45463:45865:+;HP][45861:46257:+;HP][46855:49645:+;Putative replication origin binding protein][49631:49916:+;HP][49948:50644:+;HP][50929:51334:+;HP][51346:51643:+;HP][51693:52002:+;HP][52085:52223:+;HP][52203:52479:+;HP][52478:53441:+;DNA ligase][53640:54390:+;HP][54392:55151:+;Putative transcription factor D5][55235:56714:+;HP][56710:57595:+;HP][57662:60233:+;DNA polymerase][60719:62078:+;putative helicase D10][62280:62634:+;HP][62636:63410:+;putative ssDNA-binding protein][63449:64442:+;putative exonuclease subunit 1][64425:66261:+;putative exonuclease subunit 2][66260:66743:+;Protein D14][66739:67618:+;T5 flap endonuclease][67617:68061:+;Deoxyuridine 5′-triphosphate nucleotidohydrolase][68092:68281:+;HP][68505:72498:−;L-shaped tail fiber protein pb1][72497:72920:−;L-shaped tail fiber protein p132][72924:74955:−;putative central straight fiber][74982:77829:−;putative baseplate hub protein][77825:78440:−;Distal tail protein][78554:83012:−;putative tape measure protein][83096:83423:−;HP][83496:83919:−;HP][83923:84811:−;Minor tail protein][84820:85948:−;Tail tube protein][85971:86457:−;Tail tube terminator protein][86456:87167:−;Tail completion protein][87217:87730:−;HP][87788:89171:−;Major capsid protein][89184:89781:−;Prohead protease][89977:90694:−;HP][90690:91902:−;Portal protein][91901:92342:−;Nicking endonuclease][92575:93892:−;Terminase %2C large subunit][93891:94365:−;putative terminase %2C small subunit][94375:96355:−;Receptor-binding protein][96468:96693:+;HP][97307:98024:−;5′-deoxynucleotidase][98096:98549:−;HP][98613:100296:−;Protein A1][100378:100606:−;HP][100602:100872:−;HP][100938:101343:−;Protein A2][101682:101943:−;HP][102109:102298:−;HP][102313:102481:−;HP][102657:102999:−;HP][103650:103890:−;HP][103889:104237:−;HP][104233:104761:−;HP][104815:105310:−;HP][105375:106341:−;HP][106413:106752:−;HP][106896:107010:+;HP][107009:107183:+;HP]

[0419] Essential genes of phage CT-227-KP4M1-20: [61:301:+;HP][361:478:+;HP][488:680:+;HP][676:766:+;HP][824:1280:+;Nucleoid disruption protein][1345:1453:+;HP][1449:1590:+;HP][1595:2984:+;HP][3211:3475:+;HP][3599:4244:+; Middle transcription regulatory protein motA][4243:4585:+;HP][4581:4761:+;HP][4748:5111:+;HP][5110:5413:+;HP][5596:5722:+;H P][5705:5984:+;HP][5980:6307:+;HP][6303:6570:+;HP][6637:6910:+;10 kDa anti-sigma factor][6910:7567:−;Holin][7608:8136:−;HP][8173:12826:−;HP][12835:13528:−;Long-tail fiber protein gp36][13585:14722:−;Long-tail fiber protein gp35][14721:18567:−;Long-tail fiber proximal subunit][18642:19569:+;Ribonuclease H][19579:19852:+;Double-stranded DNA-binding protein][19832:20132:+;RNA polymerase-associated protein Gp33][20128:20791:+;Protein Gp59][20858:21776:+;Single-stranded DNA-binding protein][21902:22160:+;HP][22201:22423:+;HP][22426:22792:+;HP][22848:23127:+;HP][23123:23213:+;HP][23205:23526:+;HP][23608:23773:+;HP][23780:24380:+;Dihydrofolate reductase][24363:24681:+;HP][24673:25549:+;Thymidylate synthase][25545:25752:+;HP][25748:26054:+;HP][26044:28291:+;Ribonucleoside-diphosphate reductase large subunit][28347:29490:+;HP][29517:29934:+;Endonuclease II][29927:31079:+;T4 RNA ligase 1][31141:31651:+;HP][31638:31992:+;HP][31988:32276:+;HP][32286:32499:+;HP][32498:33392:+;Polynucleotide kinase][33403:33688:+;HP][33677:33914:+;HP][33913:34258:+;HP][34258:34828:+;Deoxycyti dylate deaminase][34827:35028:+;HP][35024:35333:+;HP][35390:35714:+;Capsid assembly protein Gp31][35828:36077:+;Lysis inhibition accessory protein][36443:36620:+;HP][36741:37110:+;HP][37150:37663:+;HP][38224:38584:+;HP][38623:39106:+;HP][39118:39397:+;HP][39407:39578:+;HP][39574:39775:+;HP][39958:40801:+;H P][40842:41049:+;HP][41048:42521:+;HP][42517:42697:+;HP][42748:44875:+;HP][44938:45217:+;HP][45238:46165:−;Baseplate tail-tube junction protein gp54][46164:47217:−;Baseplate tail-tube junction protein gp48][47226:48960:−;HP][48956:49484:−;Baseplate hub assembly protein gp28][49455:50598:−;Baseplate central spike complex protein gp27][50594:51353:−;HP][51404:52034:+;HP][52030:52441:+;Baseplate wedge protein gp25][52482:52899:+;Recombination protein uvsY][52929:53097:+;HP][53156:53399:−;ATP-dependent DNA helicase uvsW][53395:54928:−;ATP-dependent DNA helicase uvsW][54955:55750:+;HP][55759:57166:+;HP][57244:57472:+;HP][57468:57798:+;HP][57911 :58169:+;HP][58179:59187:+;RNA ligase 2][59186:59735:+;HP][59764:61045:−;Capsid vertex protein][61126:62686:−;Major capsid protein][62706:63519:−;Capsid assembly scaffolding protein][63551:64202:−;Prohead core protein protease][64201:64627:−;Prohead assembly protein gp68][64626:64848:−;HP][64847:66416:−;Portal protein][66520:67012:−;Tail tube protein gp19][67139:69113:−;Tail sheath protein][69146:70985:−;Terminase %2C large subunit][70962:71472:−;Terminase %2C small subunit][71468:72293:−;Tail completion protein gp15][72334:72955:−;Neck protein gp14][73114:74056:−;Neck protein gp13][74112:75879:−;HP][75887:77234:−;HP][77233:77905:−;Baseplate wedge protein gp11][77906:79730:−;Baseplate wedge protein gp10][79729:80641:−;Baseplate protein gp9][80708:81734:−;Baseplate wedge protein gp8][81726:84825:−;Baseplate wedge protein gp7][84821:86780:−;Baseplate wedge protein gp6][86779:87073:−;Baseplate puncturing device gp5.4][87073:87577:−;HP][87579:89310:−;Baseplate central spike complex protein gp5][89306:89945:−;Baseplate wedge protein gp53][89994:90444:+;HP][90443:91271:+;HP][91270:91873:+;Tail tube terminator protein][91940:92615:+;Deoxynucleotide monophosphate kinase][92611:92848:+;HP][92847:93303:+;HP][93673:93853:+;HP][93839:94019:+;HP][94018:94204:+;HP][94220:94571:+;HP][96472:96625:+;HP][96621:96990:+;HP][96973:97207:+;H P][97261:97486:+;HP][97664:98222:+;HP][98221:98671:+;HP][100058:100349:+;HP][100367: 100631:+;HP][100617:100845:+;HP][100874:101468:+;HP][101507:102098:+;HP][102094:102457:+;HP][102453:102750:+;HP][102746:103073:+;HP][103072:103309:+;HP][103305:103752:+;HP][103759:104068:+;HP][104096:104591:+;Endolysin][104591:105071:+;HP][105244:105778:+;HP][105774:106086:+;HP][106067:106559:+;HP][106567:106930:+;HP][106929:107211:+;HP][107274:107733:+;Endoribonuclease RegB][107740:108286:+;HP][108285:108606:+;HP][108602:108995:+;HP][109003:109471:+; HP][109495:109663:+;HP][109662:110262:+;HP][110721:111105:+;HP][111151:111364:+;HP][111375:111663:+;Antiholin][111649:112036:+;HP][112140:112629:+;HP][112720:112987:+; HP][112989:113181:+;HP][113170:113392:+;HP][113394:113886:+;HP][113882:114464:+;HP][114656:115079:+;HP][115075:116086:+;HP][116631:116847:+;HP][116924:117902:+;HP][117944:118091:+;HP][118087:118513:+;HP][118509:118845:+;HP][118841:119162:+;HP][119164:119362:+;HP][119724:119889:+;HP][119885:120152:+;HP][120209:120998:+;HP][121068: 122043:+;HP][122063:122300:+;HP][122296:122611:+;HP][122607:122940:+;HP][122936:123449:+;HP][123441:123615:+;HP][123604:123895:+;HP][123857:124127:+;Glutaredoxin][124119:124308:+;HP][124597:124768:+;HP][124769:125159:+;HP][125137:125296:+;HP][125279: 125732:+;HP][125724:126033:+;HP][126069:126543:+;Recombination endonuclease VII][126539:128378:+;Anaerobic ribonucleoside-triphosphate reductase][128349:128583:+;HP][128554:129025:+;HP][129035:129134:+;HP][129142:129355:+;HP][129351:129693:+;HP][129689:129992:+;HP][130177:130366:+;HP][130362:130605:+; HP][130669:131002:+;HP][130998:131256:+;HP][131248:131533:+;HP][131525:131750:+;HP][131737:132016:+;HP][132012:132258:+;HP][132324:132873:+;RNA polymerase sigma factor][132856:133087:+;HP][133088:133391:+;HP][133368:133566:+;HP][133639:133897:+; HP][133966:135163:+;DNA alpha-glucosyltransferase]1135233:136256:+;Exonuclease subunit 1][136294:137935:+;Exonuclease subunit 2][137931:138126:+;HP][138136:138514:+;15 kDa RNA polymerase-binding protein][138549:139251:+;DNA polymerase clamp][139299:140262:+;Sliding-clamp-loader gp44 subunit][140258:140828:+;Sliding-clamp-loader gp44 subunit][140830:141193:+;Translation repressor protein][141285:143994:+;DNA-directed DNA polymerase][144063:144507:+;HP][144517:144724:+;Immunity protein][144732:145467:+;Deoxycytidylate 5-hydroxymethyltransferase][145463:146300:+;HP][146326:146548:+;HP][146630:147806:+;Rec ombination and repair protein][147795:148146:+;HP][148221:149595:+;ATP-dependent helicase 41][149604:149838:+;HP][149903:150197:+;Protein spackle][150193:150403:+;HP][150418:150583:+;HP][150621:151644:+;DNA primase][151662:151854:−;HP][151920:152442:+;HP][152441:152579:+;HP][152609:152837:+;Small outer capsid protein][152914:153106:+;HP][153607:153781:+;HP][153851:154541:+;HP][154621:155377:+; HP][155376:155691:+;HP][155687:157019:+;ATP-dependent DNA helicase dda][157025:157280:+;HP][157272:157962:+;Exodeoxyribonuclease][157961:158129:+;HP][158192:158600:+;HP][158664:158880:+;HP][158879:159245:+;HP][159238:159574:+;HP][159560:159737:+;HP][159736:159826:+;HP][159822:160071:+;HP][160149:160518:+;HP][160548: 162387:+;HP][162434:162587:+;HP][162727:162934:+;HP][162944:165113:+;Protein rIIA][165113:166025:+;HP][166067:166364:+;HP][166305:166884:+;Endonuclease IV]

[0420] Essential genes of phage KP10-11: [122:413:+;HP][460:1054:+;HP][1093:1684:+;HP][1680:2043:+;HP][2039:2336:+;HP][2332:2659:+;HP][2658:2895:+;HP][2891:3338:+;HP][3345:3654:+;HP][3682:4177:+;Endolysin][4177: 4657:+;HP][4738:5311:+;Internal protein III][5504:5810:+;HP][5888:6422:+;HP][6418:6730:+;HP][7066:7429:+;HP][7428:7704:+;HP][7767:8226:+;Endoribonuclease RegB][8233:8779:+;HP][8778:9099:+;HP][9095:9488:+;HP][9496:9964:+;HP][9988:10156:+;H P][10155:10755:+;HP][10735:10930:+;HP][11214:11589:+;HP][11635:11848:+;HP][11859:12147:+;Antiholin][12133:12520:+;HP][12624:13113:+;HP][13204:13471:+;HP][13473:13665:+;H P][13654:13876:+;HP][13878:14379:+;HP][14571:14994:+;HP][14990:16001:+;HP][16548:16764:+;HP][16841:17819:+;HP][17861:18008:+;HP][18004:18430:+;HP][18426:18762:+;HP][18758:19079:+;HP][19452:19617:+;HP][19613:19880:+;HP][19937:20726:+;HP][20796:21771:+; HP][21791:22028:+;HP][22024:22339:+;HP][22335:22668:+;HP][22664:23174:+;HP][23328:23619:+;HP][23581:23851:+;Glutaredoxin][23843:24032:+;HP][24050:24221:+;HP][24222:24612:+;HP][24732:25185:+;HP][25177:25486:+;HP][25523:25997:+;Recombination endonuclease VII][25993:27832:+;Anaerobic ribonucleoside-triphosphate reductase][27803:28037:+;HP][28008:28479:+;HP][28596:28809:+;HP][28805:29108:+;HP][29293:29482:+;HP][29478:29721:+;HP][29785:30118:+;HP][30114:30372:+;HP][30364:30649:+; HP][30641:30866:+;HP][30853:31132:+;HP][31128:31374:+;HP][31440:31989:+;RNA polymerase sigma factor][31972:32212:+;HP][32213:32516:+;HP][32493:32691:+;HP][32764:33022:+;HP][33091 :34288:+;DNA alpha-glucosyltransferase][34358:35381:+;Exonuclease subunit 1][35419:37060:+;Exonuclease subunit 2][37056:37251:+;HP][37261:37639:+;15 kDa RNA polymerase-binding protein][37674:38376:+;DNA polymerase clamp][38424:39387:+;Sliding-clamp-loader gp44 subunit][39383:39953:+;Sliding-clamp-loader gp44 subunit][39955:40318:+;Translation repressor protein][40410:43119:+;DNA-directed DNA polymerase][43188:43632:+;HP][43642:43849:+;Immunity protein][43857:44592:+;Deoxycytidylate 5-hydroxymethyltransferase][44588:45425:+;HP][45451:45673:+;HP][45755:46931:+;Recombination and repair protein][46920:47271:+;HP][47346:48720:+;ATP-dependent helicase 41][48729:48963:+;HP][49028:49307:+;HP][49317:49611:+;Protein spackle][49607:49817:+;HP][49832:49997:+;HP][50035:51058:+;DNA primase][51076:51268:−;HP][54105:54627:+;HP][54626:54764:+;HP][54794:55031:+;Small outer capsid protein][55108:55300:+;HP][55762:55951:+;HP][56022:56688:+;HP][56765:57524:+;HP][57523:57838:+;HP][57834:59166:+;ATP-dependent DNA helicase dda][59172:59418:+;HP][59418:60105:+;Exodeoxyribonuclease][60104:60272:+;HP][60335:60743:+;HP][60807:61023:+;HP][61022:61388:+;HP][61381:61717:+;HP][61964:62213:+;HP][62291:62660:+;HP][62690:64529:+;HP][64576:64729:+;HP][64869:65076:+;HP][65086:67255:+; Protein rIIA][67255:68167:+;HP][68209:68506:+;HP][68447:69026:+;Endonuclease IV][69090:69330:+;HP][69390:69507:+;HP][69517:69709:+;HP][69705:69795:+;HP][69853:70309:+;Nucleoid disruption protein][70478:70619:+;HP][70624:72013:+;HP][72240:72504:+;HP][72627:73272:+;Middle transcription regulatory protein motA][73271:73613:+;HP][74034:74337:+;HP][74520:74646:+;HP][74748:74907:+;HP][74903 :75230:+;HP][75226:75493:+;HP][75560:75833:+;10 kDa anti-sigma factor][75833:76490:−;Holin][76518:77058:−;HP][77095:81700:−;HP][81709:82360:−;Long-tail fiber protein gp36][82417:83554:−;Long-tail fiber protein gp35][83553:87399:−;Long-tail fiber proximal subunit][87474:88401:+;Ribonuclease H][88411:88684:+;Double-stranded DNA-binding protein][88664:88964:+;RNA polymerase-associated protein Gp33][88960:89623:+;Protein Gp59][89690:90608:+;Single-stranded DNA-binding protein][90734:90992:+;HP][91033:91255:+;HP][91345:91624:+;HP][91680:91959:+;HP][91955:92045:+;HP][92037:92358:+;HP][92440:92605:+;HP][92612:93212:+;Dihydrofolate reductase][93195:93513:+;HP][93505:94381:+;Thymidylate synthase][94377:94584:+;HP][94580:94886:+;HP][94876:97123:+;Ribonucleoside-diphosphate reductase large subunit][97179:98322:+;HP][98349:98766:+;Endonuclease II][98762:99377:+;HP][99370:100522:+;T4 RNA ligase 1][100584:101094:+;HP][101081:101435:+;HP][101431:101719:+;HP][101729:101942:+;HP][101941:102835:+;Polynucleotide kinase][102846:103131:+;HP][103120:103357:+;HP][103356:103701:+;HP][103701:104271:+; Deoxycytidylate deaminase][104270:104471:+;HP][104467:104776:+;HP][104833:105157:+;Capsid assembly protein Gp31][105271:105520:+;Lysis inhibition accessory protein][105889:106066:+;HP][106188:106548:+;HP][106587:107076:+;HP][107088:107367:+; HP][107377:107548:+;HP][107544:107745:+;HP][107928:108771:+;HP][108812:109019:+;HP][109018:110491:+;HP][110487:110667:+;HP][110718:112845:+;HP][112908:113187:+;HP][113208:114135:−;Baseplate tail-tube junction protein gp54][114134:115184:−;Baseplate tail-tube junction protein gp48][115193:116927:−;HP][116923:117451:−;Baseplate hub assembly protein gp28][117422:118565:−;Baseplate central spike complex protein gp27][118561:119320:−;HP][119371:120001:+;HP][119997:120408:+;Baseplate wedge protein gp25][120449:120866:+;Recombination protein uvsY][120896:121064:+;HP][121123:121366:−;ATP-dependent DNA helicase uvsW][121362:122895:−;ATP-dependent DNA helicase uvsW][122922:123717:+;HP][123726:125133:+;HP][125212:125440:+;HP][125436:125763:+; HP][125873:126131:+;HP][126141:127149:+;RNA ligase 2][127148:127697:+;HP][127726:129007:−;Capsid vertex protein][129088:130648:−;Major capsidprotein][130668:131481:−;Capsid assembly scaffolding protein][131513:132164:−;Prohead core protein protease][132163:132589:−;Prohead assembly protein gp68][132588:132804:−;HP][132803:134372:−;Portal protein][134476:134968:−;Tail tube protein gp19][135095:137069:−;Tail sheath protein][137102:138941:−;Terminase %2C large subunit][138918:139428:−;Terminase %2C small subunit][139424:140249:−;Tail completion protein gp15][140290:141067:−;Neck protein gp14][141070:142012:−;Neck protein gp13][142069:143836:−;HP][143844:145191:−;HP][145190:145862:−;Baseplate wedge protein gp11][145863:147687:−;Baseplate wedge protein gp10][147686:148598:−;Baseplate protein gp9][148665:149691:−;Baseplate wedge protein gp8][149683:152782:−;Baseplate wedge protein gp7][152778:154737:−;Baseplate wedge protein gp6][154736:155030:−;Baseplate puncturing device gp5.4][155030:155534:−;HP][155536:157267:−;Baseplate central spike complex protein gp5][157263:157902:−;Baseplate wedge protein gp53][157951:158401:+;HP][158400:159228:+;HP][159227:159830:+;Tail tube terminator protein][159897:160572:+;Deoxynucleotide monophosphate kinase][160568:160805:+;HP][160804:161260:+;HP][161335:161515:+;HP][161501:161681:+; HP][161881:162232:+;HP][164136:164289:+;HP][164285:164654:+;HP][164637:164871:+;HP][164925:165150:+;HP][165328:165886:+;HP][165885:166335:+;HP]

[0421] Essential genes of phage KP10-89: [36:681:+;HP][730:1195:+;HP][1227:1746:−;HP][1759:2035:−;Highly immunogenic outer capsid protein][2045:2579:−;Highly immunogenic outer capsid protein][2607:3177:−;HP][3216:3528:−;HP][3620:4199:−;HP][4428:5769:+;ATP-dependent DNA helicase uvsW][5777:6011:+;ATP-dependent DNA helicase uvsW][6615:6792:−;HP][6791:7211:−;Recombination protein uvsY][7515:8805:−;Capsid vertex protein][8892:10461:−;Major capsid protein][10480:11269:−;Capsid assembly scaffolding protein][11301:11949:−;Prohead core protein protease][11951:12356:−;Prohead assembly protein gp68][12607:14182:−;Portal protein][14237:14723:−;Tail tube protein gp19][14771:16763:−;Tail sheath protein][16782:18612:−;Terminase %2C large subunit][18580:19120:−;Terminase %2C small subunit][19119:19944:−;Tail completion protein gp15][20023:20770:−;Neck protein gp14][21387:22314:−;Neck protein gp13][22352:24104:−;Fibritin][24114:25500:−;Short tail fiber protein gp12][25509:26178:−;Baseplate wedge protein gp11][26177:27995:−;Baseplate wedge protein gp10][27991:28855:−;Baseplate protein gp9][28864:29857:−;Baseplate wedge protein gp8][29857:32944:−;Baseplate wedge protein gp7][33024:34950:−;Baseplate wedge protein gp6][34981:37048:−;HP][37052:38822:−;Baseplate central spike complex protein gp5][38818:39178:−;Baseplate wedge protein gp53][39423:39891:+;HP][39906:40761:+;HP][40797:41586:−;HP][41955:42486:+;Tail tube terminator protein][42485:43181:+;Deoxynucleotide monophosphate kinase][43507:44131:+;HP][44138:44678:+;HP][44743:44884:+;HP][44973:45114:+;HP][45124:45460:+;HP][45456:45750:+;HP][45742:45994:+;HP][46236:46644:+;HP][46654:47038:+;H P][47039:47297:+;HP][47325:47649:+;HP][47648:48176:+;HP][49163:49364:+;HP][50519:50777:+;HP][51257:51536:+;HP][51607:51859:+;HP][52425:52683:+;HP][52679:52886:+;HP][52896:54042:+;HP][54038:54386:+;HP][54366:54714:+;HP][55163:55595:+;HP][55596:55857:+; HP][55926:56190:+;HP][56229:56553:+;HP][56607:57009:+;HP][57076:57472:+;L-alanyl-D-glutamate peptidase][57503:57962:+;HP][57961:58486:+;HP][58495:59842:+;HP][59878:60076:+;HP][60087:60642:+;HP][60706:61348:+;HP][61415:61811:+;HP][61821:61968:+;HP][61964:62555:+; HP][62564:62888:+;HP][63194:63668:+;HP][63670:63958:+;HP][64140:64749:+;HP][64765:65158:+;HP][65264:65546:+;HP][65517:65940:+;HP][66011:66926:+;HP][67102:68164:+;HP][68338:68533:+;HP][68529:68802:+;HP][69406:69634:+;HP][69630:70008:+;HP][70007:71015: +;HP][71011:71257:+;HP][71256:71514:+;HP][71510:72434:+;HP][72480:72759:+;HP][72965: 73253:+;HP][73478:73994:+;HP][73993:74314:+;HP][74321:76538:+;HP][76609:77227:+;HP][77378:77849:+;HP][77864:78149:+;HP][78506:78731:+;HP][78738:79194:+;HP][79228:79621: −;Baseplate wedge protein gp25][79621:80176:−;HP][80172:80916:−;HP][80944:81808:−;Baseplate tail-tube junction protein gp54][81817:82891:−;Baseplate tail-tube junction protein gp48][82901:84695:−;HP][84691:85267:−;HP][85336:86446:+;HP][86442:86820:−;HP][87128:87419:−;HP][88775:90305:−;HP][90285:90816:−;HP][90896:91118:−;HP][91119:91383:−;HP][91379:91820:−;HP][92520:92814:−;HP][92939:93209:−;HP][93208:93571:−;HP][93581:94148:−;HP][94189:94612:−;HP][94621:94903:−;HP][95217:95469:−;HP][95479:95821:−;Capsid assembly protein Gp31][95836:96394:−;Deoxycytidylate deaminase][96609:96861:−;HP][96857:97145:−;HP][97198:98083:−;Polynucleotide kinase][98079:98253:−;HP][98548:98860:−;HP][98868:100026:−;T4 RNA ligase 1][100006:100372:−;Endonuclease II][100667:101843:−;Ribonucleoside-diphosphate reductase subunit beta][101879:104132:−;Ribonucleoside-diphosphate reductase large subunit][104171:105047:−;Thymidylate synthase][105048:105627:−;HP][105623:105881:−;HP][105877:106108:−;HP][106104:106395:−;HP][106454:108164:−;HP][108237:108429:−;HP][108428:110126:−;Exonuclease subunit 2][110383:111430:−;Exonuclease subunit 1][111785:112001:−;HP][111997:112525:−;RNA polymerase sigma factor][112829:113765:+;Ribonuclease H][113774:114038:+;Double-stranded DNA-binding protein][114041:114287:+;RNA polymerase-associated protein Gp33][114364:114943:+;Protein Gp59][114958:115930:+;HP][115985:116255:+;HP][116281:116947:+;DNA polymerase clamp][117005:118004:+;Sliding-clamp-loader gp44 subunit][118006:118570:+;Sliding-clamp-loader gp44 subunit][118573:118936:+;Translation repressor protein][119004:119292:+;HP][119664:122364:+;DNA-directed DNA polymerase][122438:123596:+;Recombination and repair protein][123634:123955:+;HP][123964:125401:+;ATP-dependent helicase 41][125793:126048:+;HP][126140:126377:+;HP][126746:127478:+;HP][127483:127972:+;HP][127968:128187:+;HP][128242:128503:+;HP][128506:129532:+;DNA primase][129539:130076:+;HP][130257:130548:+;HP][130544:131873:+;ATP-dependent DNA helicase dda][131897:132206:+;HP][132206:132491:+;HP][132487:133159:+;Exodeoxyribonuclease][133155:133437:+;HP][133874:134177:+;HP][134886:135216:+;HP][135255:135852:+;HP][135848:136127:+;HP][136113:136698:+;HP][136720:137161:+;HP][137160:137325:+;HP][137392: 139291:+;HP][139290:140577:+;HP][140648:141203:+;HP][141206:141443:+;HP][141453:143715:+;HP][143714:144614:+;HP][144659:145034:+;HP][145008:145446:+;HP][145482:145731:+;HP][145775:145910:+;HP][145884:146217:+;HP][146213:146441:+;HP][146521:147319:+; HP][147318:147609:+;HP][147875:148523:−;Holin][149044:152755:−;HP][152763:153432:−;Long-tail fiber protein gp36][153481:154606:−;Long-tail fiber protein gp35][154605:158379:−;Long-tail fiber proximal subunit][158458:158758:−;HP][158754:159036:−;Glutaredoxin][158995:159664:−;HP][159706:160666:−;HP][160735:161227:−;HP][161248:161443:−;HP][161775:161982:−;HP][161981:162479:−;HP][162785:164909:−;Anaerobic ribonucleoside-triphosphate reductase][165228:165711:−;Recombination endonuclease VII][165742:166018:−;Glutaredoxin][166026:166878:−;DNA adenine methylase][167163:168597:−;HP][168624:169074:−;HP][169083:169344:−;HP][169933:170515:−;HP][170504:171524:−;RNA ligase 2][171527:172052:−;HP][172051:172408:−;HP][172409:172736:−;HP][172732:172909:−;HP][172905:173223:−;HP][173255:174131:−;HP].

### Example 7

[0422] Profiling the Synergistic Redundancy Effect

[0423] Materials and Methods:

[0424] 20 phage combinations of 3 member each and 20 phage combinations of 4 members each were compiled. Those 40 combinations were used each in 79 TTM experiments against 79 single hosts (resulting in 3160 TTM measurements).

[0425] A replicator for frozen samples (VP408) was used to inoculate each of the 79 KP strains into a 96-well plate prefilled with 200 μL BHIS. Following an overnight incubation (15-16 h) at 37° C., without agitation, a 2 μL replicator (VP407) was used to dilute the ON starters 1:100 in a 96-well plate prefilled with 200 μL BHIS+1 mM ions. 10 μL of each tested cocktail at a final concentration of 1E+08 PFU/mL were added to each well. One plate served as NPC for which no phages were added. Plates were incubated for 16 hours in a plate reader (Freedom, EVO 75, Tecan) at 37° C. with agitation, and OD600 was measured every 30 min. The periodic OD readings were used to determine the TTM for each phage cocktail: target host couple.

[0426] Results

[0427] The 40 combinations were selected from a set of 10 phages. Those 10 phages ability/disability to infect each of the 79 used KP strains was already known. Therefore the level of redundancy of each combination with respect to each target bacteria was known and used to categorize the 3160 TTM experiments to redundancy categories 0 to 4 presented in FIG. 5. The level of redundancy of a combination with respect to a target host is the number of phages in the combination that are known to infect the target host individually. FIG. 5 presents evidence for the synergistic effect of phage redundancy on the time to mutant period of the target bacteria. The average TTM is significantly higher between combination populations with different redundancy level. The 3160 measured TTM results were first categorized according to the number of phages of the combination which were shown in a previous experiment to infect the particular host bacteria. Thus, 1522 of the experiments involved a 3 or 4 phage combination where none of the members previously showed ability to infect the tested host. 708 of the experiments involved a 3 or 4 phage combination where only one phage of the combination previously showed ability to infect the tested host. 504 of the experiments involved 3 or 4 phage combinations where two phages of the combination previously showed ability to infect the tested host etc. For each category, the Y-axis indicates the TTM in hours when growth of resistant host was observed. The boxes indicate 25, 50 and 75 percentiles. A Mann-Whitney U test (MWW) was used to compare the significance of difference by each to neighboring categories. The Figure demonstrates a synergistic effect resulting from combinations comprising more than one phage capable of infecting the same target host bacteria. This synergy between combination phage members is biologically explained by the difference in the infection mechanism of the cocktail members.

[0428] Although the invention has been described in conjunction with specific embodiments thereof, it is evident that many alternatives, modifications and variations will be apparent to those skilled in the art. Accordingly, it is intended to embrace all such alternatives, modifications and variations that fall within the spirit and broad scope of the appended claims.

[0429] It is the intent of the applicant(s) that all publications, patents and patent applications referred to in this specification are to be incorporated in their entirety by reference into the specification, as if each individual publication, patent or patent application was specifically and individually noted when referenced that it is to be incorporated herein by reference. In addition, citation or identification of any reference in this application shall not be construed as an admission that such reference is available as prior art to the present invention. To the extent that section headings are used, they should not be construed as necessarily limiting. In addition, any priority document(s) of this application is/are hereby incorporated herein by reference in its/their entirety

The application's sequence listing, which the Patent Office published only in electronic form, follows.

SEQUENCE LISTING (30 sequences)

SEQ ID NO: 1 - DNA, 167264 bp, Unknown
  bacteriophage strain capable of infecting bacteria of the genus Klebsiella
tccagaaagtccttccagattccctaaaattatttgaaaatttgtgcacaaagttgtttacaacgctagtcaactcggttactatagctccatcaaaacaaaacagagtaacggagaataaaatgtctaaattcaactttatccaaattgaacgtggttataacaattacggtactcctgatcgttatcgcgcgatttggattaaaggtgaacatgaacacgcagtgttcaatgtagcagaaactcgtgaactgaaagatttgattaaacacgttcgcaaagattggcctgctgttgaagagtactacgttcgagtttaccatgaagaagctcctaccgaaactgttcaaattaaattcgcaaaaactgctagtgctttaaccaaacgaattgaagcggtaattaactgctaataattttggggagttataatgaactccccacctactgaggaaataaaatgtctattctgaaaaaacttgttgaattcatccgttctaaattcggtacctttgttgcacagaacacttctgttgaagaccagtataccactgcagcaaatcgtattattgatgaaatcactaaactgcgtaccacgcatgttaaatcagtaaatgaagaaaaacgtctgctgaaactcgctgacgaaaaagaccaggccggtgcctccaaagagcgtgaaattcgtcgcttgatggcagaaggtatgaatgtagaaacccatgctaaactgggtcttctgtatcgtcgtactgctaaggctttacgtgataaagctgccgaatataaagaaatgcgggcccaaattgaagaaactgtagttaagcttgatgaccagcgtcttgatttggcagtgaaactcgaatacatccgtgagacccgtaatgcttctgctctgggtattacctctgctgatgacgtgattgaaatcgcggaactcgctaaagtagatgtacaagacatcatgatgaaagttgaaaccttcagcggtactcagcctggtattgaaaccaccactgctgatgtccaggaatatctggaaagtctgaagtaattttaccggggccttcgggcccctaacttggataataaaatgttatatgaatgcgctggagatattccaatggcaacacctcaaattaaagaattaattgcagcaggattcccaacagaaatcactgatgttctcgaaaaatttgcttatcctgatactcggcccgagaattggaaaactcgctataacgggtataacaccacagttttgccgcgggctatcgttcttaaagactattacaagctgaaaaacttaatttccagtatttcgtctatttccgatggagttaagcttgtagatatctttgcacttcggtacggaatttattctttcaacgattctccatcaaatttaaaatcagcccgtactaatgccgatgaatattctacctctagttcaacgacgtacaccatagtcattgagattattcataataaaaatagctatcgtcttggtattaatctggttaaatacgtgacatctcaggatgattatagcaattatttaaattactgcgttaatgaattaccaccaaaagtcatgggtatgtttgactctaacaacatggtaggcaaacaattaatcattgatgaatttatcaaatactgccgtgagagggcgcagaaatgagtaacttatatctgccaagtgaacctcccgtttataattatgtctataaatttgaccaaactgactatgttctaattccagggatggtctgtgctgctggaactatgataactcttatcataattgacgtaatgaatttggctgaaattagcagtacatcattagtgaatgtactattacttacatggggattaataggtttacttggtctaggattaattgaactatttcgttgggtaaagtatgttaagcataactgtgaacgaaaggctgaatggaaagaacagtgcaagaatttaactcttgaatggaaccgcaaaaagtcgtttgagtttattaaagaggtgagaagaaaatgaatgaatgtaaacctgacgggttttggaaccaagatgggctggcgccagcttttggaatcgtgacatggattttatattgtgcttttgtaattgttggagggacattctttggattgaacgtctcagagtttatgattatgcttttatttttaggtgttttcgcattcagcctcatgtggatgctgattatcgcgttgattaattgctgcacatttttagtttaccgaatgaaatataagaagtggaaagaaaaagaagatttcaacgcctggattaggagctgtcgcaaatgattaagacttgttatcgtggaatgattaaagataatgatttcttgtatttcttcctatttctgcttatcttattttccttctcgacttttgttggtgttggagtattttgggggttctacttcttttctccagtatttggcgatgcgttatattacataggctggatgtcaggtgttggaacttggtttgcaatgcttgctcggtggttgcaattcgtttcccaacgacagcggggtgtatttgataagcccaaagtaaagaaagaaaaatctaaagatgattctcgtaatgaaactttatcctggattaaggagatgaaataatggctgttgcagtacatgtaaaatttgaaaatggtgatactcgccttctgtgttacagcgataatgaatcactgagcggtatcgagatttcacttaaagaagaactgcttggtattaatggacctatctgtgatttctcggtagaaggttcatataactgtgatggtgtattagagtctatggtctatactgccatggaagatattctcgaagaaagttggaatgaatgtcaatgaaagagctaagtgcaggaatcttattctttaccgatgacaaacggcttttcatgggtcgtatgacaaatacctatgtacagggaagaggttctagatgggatattccaaaaggacatgttgagcctggtgaaacaccaaaagaagctgctattcgcgaatgcaaggaagagactggatttactgagtttgaccaggacctcttatatgaccttggacgacatgattatgccagcaataaggatatccatctgtttggatatatgctccctgtgagcccagaaatgtttagaaattgctgttgtacagcttaccataccgatgaaaatggaatttcatttcctgaaattgatgcatttgctttaattaaaccaagccagtggaaatatgtgatgggaccaagtttatacaaaatcatgacacaaatgtatagcacagctcagtgaggttcttatggaagaagctgttgaactaagtattccacacatttataaacatgaactgcgatttgttcataatggaaaatgggttagcatacttcatcctagggataaaatgtcgcgtatactaatgaaatcacgatacgtcttcggtgacggcgagtatacaaaatcaacatattacatagcagaaaagctgtatcccggatttaatgaaattccagaggacgatagaagagattatgtgtggtggaaagataaatggacaccatacgagaagtgcagccttgagttattcatagccaagtgcagggccaaataaatactcctataattaataggaggtccttatggatatttttggcatgctgcgtattgatgaaggatacgatagcaaaatttataaagataccgaagggtattggactattggtattggccacttactgactaaagacccgtcaaaatctttggctatttctaacctggacaagctggtaggtcgttctactggtggtcaaattactcaggctgaggcagaagtaatttttgccaaagatgttgagaaggcaattaaaggtattgttgctaatgctacattaaacccggtatataatgtattagatgatgttcgtagagctgctctgattaacatggtattccaaatgggtgtgtctggtgtagccgggttcccagcttcaatgaagttattactcgctaaaaagtgggaagctgctgccaaggaacttgcaaattcacgttggtatcgtcagacgccaaatcgtgctcgtcgtgtaattgaaacaatgcggaccggaacttggtctgcttatcaaggaaaataaatgaaaacttatcaagaatttttaaatgaatcccgtttagcaacagttggcgtaatgactgaatctgttggaagtaatcttctgaaatttaaaaaaggtcagaagatgacagccacgctagaagatggtacagaaattgaaatggatgttgttggatataactacgtagtagacggcaagttatataataagagccatgccaagtttgattcattcgatgatttcacctcttcaattgaagatgagtcttctcgcaaagcagtagcatctggcgatgcacgctctttaatggcatttggtcatgagcgtattaagtctaagcagaacaaacctggtgaagataactttgcattagtaggttatcagtctggcaaaacttctaacggttaccagcgtactgttaccatgtacatgcgtaatggtaaaattgcgttcgtaaacgatcgtggcgctattcgttacgctaaatcaattaagtagtttacattgagacgttaatgtggtatagtagccttattaaatgaaggctactatgacacgcattaacttaaaggatataaaatgaaaacctataaagaatttatcactgaagcttctgtaggaaaggtccaaggcattaataaagatgagtggacctaccgaggaaacggctttgaccctaaaacaactcctattgagcggtatttagctacaaaggcttctgactttaaaagcttcgcctgggaaggacttcgctggcgtaacgatctaaatattgaagccgatgggcttaaatttggtcatattcaagatgttgttgctagtaacttagacgcagcttttgttaaagccgatgcagaccttcgccgctggaatttaaaactattctctaaacagaaaggcccggtatttgtacctaaagctggtaaatgggttattgataataaattggctaaggctgtcaactttgcaggactcgaattcgccaagcataaggcagcctggaaaaatcttgacgccatggccttccgtaaagaattcgccgagattatggctaaaggcggatttaaggcagatttagataccactaaaggtacgtttaaagacgctaatgttcagtacgcttacgccgttgctaatgcagcccgtaattaaaactaattcctaataaagctaaacacgacctctcctcatgaacgtcgagtcctctgagtgaagtagctttccctacctgtaataaggtcgagcgcaagtgcggtaaggggtttacatagtgtgtcgatggattaaacatgtgccaaggaatggccccatttaaatttaaaactttaccattctaggatataaaatgaaaacttataaagaatttatcactgaagcaaaagcaccaaaagtattccagatctgtacccaaggaaatttggataaagaattcgtcgatgctattgtgtcaaatcttcgtaaggaaggcgtgcaagtagattcagttgaatggaccaaaggcagtgataattttatcattactgtatctaaaggttctttggctaaaattaaaaagtcttggggtgtaatgcgtgcttatgatttaagccatgacggccctcaagccaaagtacgaatgaacacccttaaaggtggccgagaatacgtttaagtattatcgtctaacttattagaaatactatatggaccacctagagccaaggaatggcccctttaactggaatctaaaatgaaacacttaactcccatttatttgaccctgatgcatgctttcagagacgctgcagacagacgattgaataatcccaactacagtttttatgaaccgtcttgccttatgcgagagtacggtacccttcgtctagacggtggaagacaaaccggaaagaccacagccttatgtcaattcgctaccgattggttgcttgaagatggttcggttataatcttatctactcgatacacacaatcatctgaattgatggaaggtattctacgagaatataattcatcgcatttaattaataaattaccggctaacgagatagctaaatcaattgttccgatgacaatcagggaatttctatccaatgattcctcttataagtttagaggaagaaagtttggaagagcattaattatcattgaagaaccaatgaaagttcccgatatgatgaagttctatgatatgtaccaggaagctatcagatggtctatgcctaatgataccttacctttatttttcgtgataggaatgcaatgatgacacagacagaaattgttgatatgattacagtaatggaaaatacaggatttgccgatatgaagcaattaataacaatggttacggctggcaacctgcttgagtacaagcgctacaagtttctgtctggtccgtttaaaggtgcagaattcatttctaacgctcctaacacgaagtggatgaatcgctatcctaattttagaattgagtttatatctggcaagctcaaaggcgtgattagttcaagcttaatcacatatgaccaacgcattcaagagaaaacaatgcaatggctgaaattgttataaagtgtcctccacatttagttgaaagcttctgcgattggttcagtaattctggagagcaagatttctatgaagcccatcagaatggaacttggaatgaaaccacaaaacagtgggaagaagctacaacgtatataggcactcgcggatatggagttgacgagcctattgaaattgtagagtacgataaagaaactgacgaagaagttacttatcatgaagataaaataacttatctagaagcagctgcgaagtttcattcagacgaatggaataaaatgagtgtagttactgcatatatgcatggttggaataaagaaaatctaattaaggggaaatatgaaagcataccaaattcttgaaggcgaacttaaaggcactatttacattgaagatggtgatgacgcacgagtaatcgtttcaaaagttcttaaagaagacaccattacggatgctgaaactttttatggctacaaggcgcgtgaagtagaaattgaataccagccaacggtaaaaattgaaggcggtcagcacctgaacgttaacgtgctgcgtcgcgaaaccctgttggacgcggttgagcatccggaaaaatatccgcagctgaccattcgtgtttctggctacgcggtgcgcttcaactctctgacgccggaacagcagcgcgacgttatcgctcgtactttcacagaggcactataatgtcaatcgaagatattaaaggatacaagccacataccaatgaaaaaattggtaaagtgaatgctatcaaagacgctgagactcgtcttggtcttatctttactgctcttgaagaagaggcattaatcaactaccaagagtcagccaatgaacccaagcaggtactcgatgaagcatacgaacgtattgcccagattcgtacagcaaaacagaaattgaaggaagcttctatgtgggcttgccgtgcagtgttctgtccagaagaaaaatattaaaaagtagtttactttccttacgggccatgatactatggccctacaaataaaggagaatgaactatgtcaactaacccagaagtattcattcgcagaactaaactgcgtcgtaagtttgaggaagcttttcgctctttgaatttatcagttcgtgcccgagctaaggctgagggtaaagagcctttcttcactaagtactctgatcatttgttggaccgtgctatccaacgtgaaattgatgaagagtatgtattctctgttctttccaaaattcctaatcatcttaaagaaattaatgaattcttagcaatgccttggcttccaattgacccaaaagacattgatgaaaacatcgagtataagccaatgcggttagaaattacggatggaaatctgtggctagggtttactatggatattccaagaccgggaaaaggacctagcataaagtgtcgtatggcattcgttaatgataaacgtttgaaaggtaaaatcagcacaaaagttatacacattaattgaggtaaacatgaaaaaagcgcttatcggtctaatggccttatgttcaacggcctttgggtctgagccaactttcagtaatgttcaacttgacaacttgcattacgcatataattttggtgaacaatatcaaaaatccggaaaggaaaaatctccgcataaccgatatgataataacggcttaggatatataatggctgctatatcatggaaagaatcttcggcaggagccaatttaaaagcaggaaaggggcatcattcttatggggtatttcaaaattacttgcctacggttaaagccagagctaaattagaaggcaaaaaccttagtgattctgaaataagaaaaatgcttaaatctagacagaattccgcggaatgggcatatattgagctttcatattggttaaatatacataacggcaatatgcgaaaagctcttgctagttataatgcaggatggaatgtcaaaaggggaaactcttatgcgtcagatgtcctagagaaagctaatttcttaaagaaacataaaatgctacatacaaaggtggaataatggtaaagtacgccgcgcttcttggattggtattggcattctctgctaatgctgaaaattcaatgacagattcacttcgtatcgctaaaacattttgcaatacgaactctgaatgtgttgatatattagcgcttgaattagattcagcattcagcgatggagtaaaagattcacgtagcccggcccagtggacaacactaataaatcgtaaggctaagagcatgaaagatttatgtgtcaatgctcctaacgaaaatatatgtttaatgtatcgtgaccaattaatggctcgttatatgtcaggactatcgtcaaaatgaaaaaagcagctattttattatgctgcgcattttcagttaatgcctgggaaaagctcccaggctatcctgaaactgtactcgcagcacagggtactaaaatagaaagcaatggcccattcaagaacaacattgaaatagcatttgttcctagcagcagaaaattgctaatgtcattttataattatcaagataaagatgaccaggtgatagttccacttgtcgaatataatgctcgtggatgtggaatgcagagtgacggcgtttctattgacggagtaatgcaccctaaagaacaaggcgtgttaaaccctatccttaactgtaacaatgctatatttttaagagtatacaataatcttaatgaatatgcaacttataaaattccgtaggtgaataaatgattactggatatatcaagggtaatattgtagaactattcatgaagcatgaatgcgatattgctcatggatgtaattgctttactacaatgggtgctggtgtagctggacaacttgctaaagcatatccgccgattttagatattgacatcgatgaagaccgttattatgacaacaatttagctaagcttggaactcatacacgagctatccacaagaatggcactgcgtattgctataatctatacactcagtatgcgccaggtccaaatgttgattacggcgcaatttttaatgcattccatgaactaaattctggtcgtgttgtttataatcgtcctctatacattccaaaaattggagctggtattgctggcggtgattgggaactaattgagaaacttattaatttagcaacccccgatattgacattacggtggtagaatatgaagaggctaaaagctaaatctgttttgttagaggtaaatagatgattactaaagagcaaaaaactaaactgtggcagttgattgatgattatgcaggtgctgagcaagtagtagctattagtgccatttacggaaatggcctacccgaagaatacgatgaactcattcgttctaagaaagctatttctgattttatggagaccctttaatggctcagctttatttcaattacgcgagtatgaacgcaggcaaatcagctaaccttcttacagcagctcataactataaagaacgaggaatgggaactctcattcttaaacctgctattgatactcgggattctgccacagaggtaacatcacgtattggtcttcgtcatgaagctaatacagtagacgaatctattgatattcttgagtttttcaagtgggcacaaacacaacgtgatattcattgtgtatttgtagatgaagcacaattcttgactgctgaacatgttcttcagctatgtaaaatcgttgacttgtatgatgttccagtaatggcatatgggcttcgcactgattttcgcggcgagttattcgaaggttctaaagctcttctttctgtagccgataaacttgttgagctcaagggcgtttgccactgtgggcgtaaggctacaatggtagctcgtattgacgaaaacggaaatgctattaccgatggtgaagtagtagaacttggtggtgaagacaaatacgtttctctttgtcgtaaacactggtgcgaactggtaggtgtttataatgaagccaagaacgtataacactatcctaatgctaattatgggtatgctattcatttggattggtgtagcagcatctatacaaagtgatagacgagaagaaatgcaaaatcgtcttaattccgaatgtaaagtattggcacagggtaaagactttattgctaatacgaatgggtgttatattaaacatgagtagcttatttgctatagcgggtggtatagtattagtacttgtgattgggttcttactatacgtaatattgctttcgttattggtttaatatgaaaaaatatgtgatgtgctatcgttgtcttcatgtatatgattacaacactgctccaaagacggctaccaagcgtcttaaaaccaaagaacctgaatgtccaaaatgtaaatgtaaggtcatctattcatgaatattaaatttttcaaatcaggattttactatcgttgaggtaatttaacttaacgaggtaataatgtctagaacaattcgccgtaaaggctggcatgtagtaaaatcttccaaatggaacgatcagaataataacgtttattttggaattcattatcttcctgagccatacaaaagtatgaagaatgctcaagaatattatgataataaaatggaacaaaacaaggaaagaccgttagaggccaagaaactgatcgctaaatcaaagcgtgatggattctggaaaactctgcgctggacgcgctatgcaatgccggttccgcgtttatttcataaagccgaaattaaacgtgcattgaagtatgatgaagaatataactgggacgaagcaggtgctagaactattgagcaaggaatctgcgaatggctttgggattaagtaacacatacttatataaatactattactaactgatgaggtgtatatgaagcatttgtcacacaagcaactccgtaatttgaccatttctcaattagacgaaattcgacttgaggttgggcatattatttcagcacttcgtatttcttataaagaaactgattctgaagcggactataagcgtatgcgttctcacgaaagatacctcgatgcagttaaggctgtacttcagcacaaacgtaatactggacaaaaataataggaggccgtatggcctttaatcacatttgcttagccctggtgttgggctgcgggatttcattcccagctgcatcacacgacgacatttcagattataattcgtatgttgagggagctctacaagtttatgctaaatttaaagagcctagtaagcaagagtctgaacagttctattcttttatacaaagtaaatggaatagtgagtcttgttctaaagattgcgattctttaggacgttcagcaggtgaagaatatgctaaccgcatgaggatacaactcgataatgaagttcaatgattttgtaaaggacggtaaacttactccgcaagatgaattcatcggtttacttatggtgtctcaagcgtattttcattcagcgcattttgataccaaatcgtatgccagacataaagcgtatgaagttttctttaacgagattccagatttgatagatgcttttggtgagcagtggttaggattctcaggtaagagttatacaccggctttaccatcacagaaagagctgccaaaggacaccattgaaatgctagacttcattctggctaaggccgatggtatctacaagtccgttcctgccgccctccaaagtgttctggatgacattacaggtctatgctacaagactaagtatttgttatcattgcagtaataccctccgcctccttcgggaggcattttcttttcaaaaagttgtttacttcccttcattacatgatactatagacatatcaacaaccaaacgagaaaaacattatgattaagttaaccactgagcttcaacctggaaaaatcttttatcacgtgtgtggtgttaatcgcacagaaactaaaagcggcgaaataacgcgttacattgttgcatcaggcacgtatgatgtagaacttggtcttcgtggtgtgtattcgcgaaaatctcctttcttccaggtgatttgcgaatatgaaaactatgctggccaaactgaaagttattcaactgaacgttctgctcatgatatgggcgtattcaagccaggtgaaaagcgttcggttcataatcttaatcgtgggttttggacgcgtgaagaagctgaacagttcattaaagaacttcaggaagacaagttcagtgacccagatgatcaagcatatgcagacagactgaccccttctgaagatttccgccgtcaacaagaatttatggattcttatcttgacagttgtgattatgattactacgactttgatgatggcgaagaatgagaaacgttttacttatcatctacattgtggtacaataccagcatccgatgtttacatataatttggtgcaaatgattctggagagtttgaaatgaatggatggggcccatcagatgacggatttgcaactcgtgaagctacaatagcggacgggattgaatgggcccgtcttcagaaacagctccaagaacagcgggaatccgaagagttttgtgttgattgtgatgaggaaatcccagtagctcgtcgtctgttggttaaaggctgtcaacggtgtgtagaatgtcaaggaaagtgggatacagtaatgacttctgcatataatcgccgtggttcaaaagattcacaattgaggtaattatggaaagtattcttgatagtaccaatttagataatccgtacagcgatgtgcatgtaaaggttgtgaattcgtatttcactaaaaagttgagtcgtatcgtgctaaaacaaggcaatgatataattcatcttgatactaaacaaattgattcattaattcaattcttgatagaggcaaaagatggcgagtaaattagtatgggacggaaaatcccgtaaaggcgatgcagtaattgaggacgaaagtccatacattaatgatttgcatcttaccccggtagagttatacggttctacactcattgaaattgagcgtaatagcactattttaatgattgataaatccgatgcagaacagcttgtaaaatatctcgtaaccatgattccaactatgaaggactgataatgaatattaataaaaactcttggcatttcaaaatgaacctgtggtttaaatctgacaacatgtggaaaatgccaaaaactctgtgcggatacttctggacaacagttcttcatgttgtgttttcttcggcgattattacattcatcggttctgttgcatggatgttcggttggccgattgtggcagagacaggaattctcgcttggataggtattagtttatccgcgttttggttaaacgttgtagcagtaccagttggcgcagcggttatagcagcatttgtgcttttgtttgcagctatagcttttggatttatttttggtttagaaaaatttaaacattatcgtatccagaaaaagtataccaagaaactcgctcgggtaaaagctggtcttcctgcagaagctgaaccgtcggtattcgtccagtatttaaaagctcgtaagcggaaagtctgcccaatgattgattacgtagaaggtaaaactagtgaagaatgatcaagtttatattgtgaacggccttcgggccgtctttcgtgctaaaaccgaacgtggtataatttctacatatcctattgccgaatttacttttgatgacggcgaaaagattacggttaaatttattcctttgactggcaagtacagcggcaaagataacattgatttagacatatattatgagggcgggtcatggaaattgaactcgtaactactaagaaaaaacttagtatgagcattgtgaaacagatgccgctagcttcagccgaaaacattaaattcgcaatgatggacccggaatcacgggtcctaggatatattaatgcatttcgctggaacagacttggcattcaggtggcaatcattagcacaggaattgattgggcattagttcctatgtatgaaaccacactgcgtgaagaaacctgtcgtgagcagcatcctgatggacaagagtaccatacacatgaagtagtgtattattacactagtcaaaaaattggtaatgtttaccgtacatcaaaaagaactactgataaaactcgagcagaagaagccgtcaagcgttctaatgcattagttaaattcgctaaagggaatcatatctacttatgaaaacaatcgtaaaatcttattttggttcgcatctgtatggtacttcaactcctgaatcagatgtggatttcaaagaaatctttgttcctcatccgcgtgatattctgatgtgtcaggcgatgaaccacaccaatcgtaatactaacaacagcgcaaccaaaaataccaaagacgatattgaccatgagctgttcagcttaaagtatttcttcaagctcgctgctgatggtgaaactgtagcgttggatatgctgcatactccgcctgaattggtagttgcatctgaccttcctgaagtatggaaattcattcaagacaaccgagctcgtttctataccactgacatgaaggcttatcttggatatgtccgtaagcaagcaggtaagtatggcgttaagggttctcgtttagctgatttgcataaagtcctggatgttatccgagatattcctgagtggaaatatgacgatcgtcccaagcagaaaggcattaacgagcgttggaaagttaaggacatcgccgatcgtcttccggtaggtgaattccttgagtggacaacctttacagaccataaatcaggtcagcagtatttctataacgtgttaggtcgtaaattccagacaactatcactgttaaagaaatgaagtattcacttgagaagcttgatgctgaatatggcgaacgtgctcgtaaggcagaagctaacgaaggcgtagattggaaagcgctaagtcatgcccttcgcggtggtattcagttacaggaaatttattccaccggtgaccttaaatatcctctggtgcatgctcctctgatcaagaaaatcaaagcgggtgagttaccgttcaaagaagttcaggatattttggaaacgaccgttgatgcagtagagcgtcttgctcatcaagccgaaaagaatggaatgcctaagaaagtagacatgaagttctgggacgatttcgtcgagaaggtttatcttgaaaaccacaattcttactacaaatgatacaatgaaggtcttcttgaattatggaagacctcataaaggtagacggtggtacttggaagcagtttgtagagagactggtcgtagagagaatgctaagttctctgctcgacctactcgaaaacaagtacatcgttttatgtcatgggccggagaaactcttcggttctcactttactgggctgaaatatgattttactttggagcatagtagtgccaatcgttgttgcaataatttactttatcgttggttggtctgtctgcaaacatctaatcaaaaacggaactattgagaaggtaggagagtattggttctatctcatcttttggttccctgcttttattgttggagcgattatcatgttcttccgctgggcaggtaaacttccaaagcgtatcgcagaaaacgctatcaacaagcacgcataactgaggagccttcgggctcctctttttgtttcaaaagaatgcataaagtagtgtacaagctcgttagctgatgatactatagacctgtaccacccaaacagatacaatggagaataaaatgaaaactttagaaatcgtcgtaaacaacattgataaagcctttaaagctgctgaggctcacggcgtagaatttgaaccgatgatggtaggagaagcgttctctaagcttgctatcatccgtggtgaaactgacaacttgattgattttgtagatgacttctatcttggttcaaaggttcgtccttactacatcaatgaaattttagaaaaataattaaaaagtagtttactttggagctgtagaatgatactatagctccatcaaaacaaaacagagtaacggagaataaaatgtcaactatcaccatcaagaaagggatttacttcggcaaagagatttcaggtacttatgagttactgggtgagtggttcccggatagcttaagtgctgaagattctcgccagggtgatggtaaagtctttgttgaactgaatggcaaaaagcgcggtgtttgggtattcaaagatgatatcacaattgacggagtagctgctaaaattgaagttgttgaatccgttgatgaaatgaaagagcgtatcaagaaacgctttaacgtcatgggattaatgactaacggcttagttcatgggaatattcgttctctgattatctccggagcagcaggtatcggtaagacttactctttggataaagcattacaacatgctcatgatactaacgctattgattacaaatcagtgaacggtaaaatctcaggaattggtttatactgccgtctttgggaatcacgtgaagcaaattcagttctgcttattgacgatgtggatgtattctctgatatggacattcttaaccttctgaaagctgctttggattcaggggagaaacgcaaagtatgctggagtactgcatcttctttcttggaagataaaggaattcctaatgagtttgagtttgaaggtactgtggtctttatcactaacgttgatattgaccgtgaattagagcgcggttctaaacttgctccgcatcttcaagccttggtatcacgttcggtttatcttgaccttggtgttcacactaatgaagagattatggtccgagttcaagatgtaataatgactacttctatgttacagaaccgtgggttaagaaattctgaagttattgaagttttggaatttatgaaagataacgtaaaccgtctgcgtaacgtatctctccgtactgctctttatattggtgatttcgttgcgactgaccgtaaaaactggcgtgaaattgctgaagtaacaatgctgaaataatttaaacgggaggatttctcctccctaactgaggaaaatataatggctactttaatttctaatgatgtaaaacgtgttttatttaaaggcggaatgtatatcgttgatactcctaaaggtgatacctcttcctggactattaacgagtggattaattacattgatgaaaatggagcgtgggtacaatgagtttagcagctattaaagatattgaatgttggttaaacgatattaaagtatatccgcctggtcatatctttgcaggtaaacctaagggtaaagcagagaaagcctgtgaagcaatctgtgaaaaactttataagtttaattttggcgataagaaaaatgtattagctgaagtccattcttcttatcatgaactacgtgtaatggtaaacgtatttcgtgctcctccgttcattgagctaaggaaagaatacgctaataaagtatttgatactttccttgtaaacgtgcaggatgcaataaagcatttagacgaaatgcataaacaacaccaagatttaaatgcctattataagccttggcgtaaatcataccaagagcttaaaaatcgtattgaacttattcgttatgaggtgctaaaatgaaatgggtaatgacagagtctaacgcctttgctgcatatgtttcaccagacgatcgtcgtagtgagttgtttggttattatggttcatactgtattgcccgagaagcagtcaaaggaaaatcctggtatggctcagatggtacagttaatagcactccaactgaactgattacgtttaccgatgaaaatggtgaatcatggacattccctaaaaaggctgctatcatcgtccaggaagaaacacctgaagctaagcgtaaacggttggaaaaaattaaagaagccgctttggcgaaattaaatcctgatgaacgcgaggcgctcggattatgaacaaagaatttagtactactcgtatggtagatgcttttggatatccgtgcaacggttatcgtgaatttattcacccggaagttgaaaatcaatttaaagaagtcgtaagaaatattttgctcaatgcatttaaaactcaaggaactaacccgagagatttaggcatttatcttgaagaagccatcagagacgtacaaaagagcgtatcggctaaacttcattgggctgaagaaaatattgcatggtcaaacaagaaacgttctgatttaaattggcccgctgatcgtgaacaaatcgtcaattatgctaaagggtaacccatgtttaatactatagcgtctatacatgcgtattacgaagggcagttaaatgctgcccgaaccaagtataaacgagggatggaggaatctgtggaatgtctcaaaggtattcagacgtttgcccagaagacccagaacctcatcttgatggaccgtaaacaggtctcattggctgaagagctaaaagcctctaagatgattatagaagacaataggaaataccaactgaaattgcttaagcggcgacaacaccagtcgccatggtttaacagtgatttccgatctttttaagggccttcgggcccttttgttgtttacatcttagaaaatccatgataagatagcttcgttaactaatgaggagattgaaatgaaagcacctacttggaacgaacttcaagaaatgttcaatactgaagaagcttttggaactatttctgaaatggttgagaatttagtagattctccttcagaagataatcttctgtgtttagcacagttcatcattgaaacttacatcgagaatcagaaatgacagtatacgtagatgtcttgatgaatcatggctggaaaatgagaggtcatcaagtaaagaattgtcatatgtttagcgacaaccttgatgagttgcacgctatggcagaagctatcggaatgaaacgttcttggttccaggataagcgagttccacactatgatttgcgcgatgttcgtcgcaagcaagcagttgctctaggagcagtagaagtatctcgtagagacgcagttctgctttggagaaaatttttcacaaagtagtttactttcggcgaggctgttgataagatggtctcgtcaaccaaactggagaataaaatgaaaactttaaccgagattatctctgcacttgttgaagaaaatcgtgtagcccgccaagcacaccgagcgaaagttgaaaaacgcgccgaggagttgaatgctggatgggcgaagacccgcttcggtcgtgaatactttgataaagtggtagctcctacttggggcaaagatgatcgccctcatgctccctttgatggttatctttgggaaaatgaattaggtgaagttgaagcttatcacgcaggcagttacttgccgtatgttacagaattggattcactggataagcctgagtataccggtgaccacggttggtggaaactccgcttaactcaagaagagtacaaagaacttcgggagtatggttatcctcttgaagtacgcattccatataaagagtggaaattgcaagatggcacagatgttgttatggcagaagttagagctcataagagcatcttagaggctatccaggaacattcaaaacaggtctttgataatatattcaatgagctgaataagaataaaggggatgcaccagaaggacgagtgactgtctctggtaccgtaacgtcagtaaaagtttatgaagactattacggcgtacaatgtaagatgatggttgtgcttgagaatggagctacggtttacggctcccttccaaaaagtattccgtttgaatacagaggcaaagtacagtttactgctacatttgaattagcgaaagatgataaaactcatgctttctataagcgcccaagcaaagttataatgcttgaggaataattgttgtataatgggttcagggagattttgagatactctttgagcccagtccaaaatagaggaaaagataatgaataagaatgaattaaagatgtttgtagccggtgaatttgataagcataacagaaaaggactgtcaaagcgtgagaagcacgtaaaggttttggcagctttacatgatttaaatccagctgcttataacgtagcaattgctggtaacgtagctcgtcgtgttctaaatagcatggcagcacacgaagccaattatgctggttttgttgtagaaaacattcgtcgttctcgctggttaggtgcaatgtcagcagagaaacagctcaaaaagtttgctatcggcaatgctaaaatttacggtcagcgttatagctttgcggcagggacgtttaaaactgaagaaaggcatgaccgcagcgctgctcaaatcttctgttctgaatttaatgcaaacctgcgccgtattcttaatcgttcaatttgcttacttaaaggcgatgaccgtgtgaaataccaggtatcttctactagttctagaaatcctaagggtgtttcatttattcgtgccgaagaacttgacaatgtaactgtacgaattcatattaatagccatttgtccagcggaaaatatccggcccgggcgcttttagcgcaagttcgtactgcattagagcatatggatgtagttaaaaaatcatgctgtaaacagcaaggtgaaaactcatctgttcttgaagtacatttggacccatttaagatttttcctaaaacattgagcaccaccccagttattgatgaagatgtagcacatatgtatctaaatgttgttaagcctcttccgttaacaccagtaaatcatattgaaatcgctaagaatagcattactgccgaaatggaatcggttaagcggtttattgatacaaaagaagctgaattaagtaagcatgaattgatgatggcagatttagtcaaatcgcttaacgaatacaaagagcgttatgaatctctcgagtatgcccggagcttactgtgaaaaaccaattaaaagaagacatggtcgttgatgataacgaccttgaaattgagtttgagtatccacctgtacctgaatttaaaattgactgggatgcctgtcttgaaatggtagaccgtcgagaagctgcagctaaacgagttgtgccttgtgaaaaatgtggtagtattcaagtacagcttgttgattggacaaccgatattctgaaaatgaaatgtcggacttgtaagcataaatttgagagaaaattaaaatgattactaaaactattactggtgctaatactaagttttttgtcgagtatgctaataacctcataaaagacaaaaactttgataacatcattgcggatatgattcttgacgcatacgaaagtggcatcgaccctatgcagcttaaagaatatcttcgagcgacaatggattttacagttcttaacatgatgcttagaactgatactgaattcaatgaaatgattgctctgcgtaatgaaggcaagttcaatttgactgatgacgaagtattagcgtgtgctgctcacgaagcttggaagaaggtgattaaatgaaaaccactggcgcgctttggaaagaattttataacgatgaagccttctgggaaggctattatcatgatgacactttaatactctttgatgatgttgaagtagaagaatatgaagacccttcgcctgatgcggtagtaaaaattgaaagcggatatgtttacaaaaccgatgatttcttcacttcccatgatttgagtcttgaaactttctttaaacgttggaaaaagaaacagaccgctcgcactatggtagtcactgttgataaagataactttgacgaagtatttgaaactatctctaatattcctggagtgaaaaaggtaaaatgattgacattaaattagatacttatgcagtacgccagttattcccagaaggtacagcagcccgtgctcaactgcaacagtcagtaatcaataacatcgttaaagaaatggtgttaaaagattcccagaataagctgaagcaagcggtacaatccgaaattgctattgctgctattgatgttcctgatgtacgagcagaagtccgtaagcaactcaatgaattattccattcgcgtggttggaatgatacatccgctaaacctgaaatgtctcagaagatgcgaaacgctgctcaagccagtgctaaagaagctattgacgaaatggttcgtcagactattgaagatgcagctaaagcagcagaaggtcgtattaaaatgacaatcgaaagcgctaatcacagaattcaggaaatcatcgtccaagcaatgaataaaaactttgctgaccaaattaatgccgccatcgcagctaaactagaagaacactttccggtaaaagcaaaatgaataaaatcgatttcagcaaactaaaagtgccacggcaagcaatttctgagcacatctctaaagaactaattagtgttcaacctataccaggcgatattattaaagatgcactggcagcattacgtgaagaagaatctaaatctaaggtggaataatggcacgcaaacgctatatggaagaagctgaacgagtaatgctactcatgtattcggtttattataatgagactggccaaattgcggataactctaatctaaaaggagctatgacccgcggcagaaattttgctcaagcagcaattgatggcgaagtaatgaagcgtcttggtatgacaaattacgttaaagcagtacgccatccagattggaaaacagttcaagcccaagtgtttaaggaaatagaagaagatgttcacggtttttggttacgacagcagaatccataaatgtgtattttgcgataacgcaaaacgtctgctcgacgttaagaagcaagaatatgcattcatcaacgtaatgccagaaaaaggtgtatttgatgaagtggttatcagtgatttgcttcgtcgtttggggcgtgaatcacaggttggattaactatgcctcagatttttgctcctgacggtacacatatcggcggttttgatgaactccgtaaattcaaattcaatgcatgattatcgtggaaccctccttcgggagggtgatattgtagctctttattatggctatggcggattagaaacgggcgagattaaacaaattaaaaatcatcgagcaaaggtagaggtaacttactctaatggagttaaagttatgtctaaatggaaatacggcgagtgcatggttaaattatgattaacatgaggaagaactatgagttatgatattggcgatttaaaagctccacgcatggtaactatttcagcagaagagcttgaacgcctgcaagcaattgaagaattgctgtgggaaattgaatgtgcgcttccatccggtttagaaagctggattgatgatgaagacttacagaagctgcgaggttaaaatgactaacgctgaattagtaaaagaaatcaagcatatcgctggcgtcactggtggttgggacgacaactacgatttcgaatatccgcctaatgcaccagacgatgatgcagaagaaatctttgttttagtagaagatggagactggacacaagagcataagtatcaagaccgtactcaaatttggtattatcctgctcgtggtgttcatttcatggtatcagaatcccgttcaggttcatatcatactgattggtattatagtcctcctgaagtagatatcgttactcgtcatgaaaaagtggttactcgcactgaagttgaatggcgcattgaacatgattctgttaatgattctgaaccaacaccatgcaaagtagcaaaggtctaaaaccctggtatgcggctcgatgggaaactgtcgagccagaggaagatgctattcctgaagaggattataatacctctgaacctaccataaatgaattgcttgattatgaggacaaagtgaatggggcttattggtaagcagtttgaagttattgagaatgatgatgaactgagcgaacaatttcctatgttcattccgggatttaagttccaggtcatttctgtagttaatgaagacgaccttgaaatgtgtggaattactgctgtaattgatttgctgacaaacaaaatcattactattaacgacccaacgccattcggcgaatcctggttctggtgcttctacagcgaagatacgatgcaccaaattaaagaaattggtcaaggtgaagatgttcctctgatttctgaaattaaacttaaccatttccaaggtgcaatcgttccaattaccagagctctttatgcctttgctggacaggaaaattgtgattcagaagagtatgatttaatgcaaaaagctgcggattacattgtcgcacttgaacaacgtcttggagttcgccatgtctaaatcgtgcattactaaaactattacagtaaaaattctcgatttcgctgatattcatcgtgttacaagagaaattttacacagtcattggtatgaagttggcgatatagtagaatttagtggaggctattacgacgatgacatcaatggaatggcttggactaaaatgagtcttcttcatgaagaaactaattcatacattgagttcactgtagacgattatgaaggcatatatgctttctgtacttcattctgcatcaaagaatctaatcataatgtatatagtagttactcgttaatttaactataaatactcttatctaatcgctgaggtaagagtaatgttattaacaggtaagttatataaagaagaaaaagaaaaactatatcaggcacagaacggtttatgtccttgctgcaaacgtcctttagatgaggatattcaaaagaaccacctcgaccatgaccatgcgttagaaggtgacaatgcaggaaaggtcagaggcttgctctgtaacctgtgtaatgcggcagaaggccaaatgaagcataagttcaaccgttctggtttaaaaggtcaagatattgactacctcgaatggctagagaatttgctggtctatctccgccagaatcgtaaagacaataatattcacccgcaatatgttgccgatatggctaaacgcttttcacgtcttggtaaacctgagatgattgctgaaatggaattgcatgggtttacatacgaggaaagtgatggaaaatcacaacttgcttcaaaatacaagaagcagcttcgtaagagtttaaaatgaatatcgaattagaaatccagggacttattaataaaaccaacaaggacctcttaaacgagaatgctaacaaagattctcgtgtttttcctacccaacgtgacctgatggctggtatcgtatctaaacatatcgccaatcaggtcattcctttctctgtaatggaagcacacaaagaaggtgttatccattttcatgatatggactacagtccagctttgcctttcaccaactgttgtttggtagatttgaaaggtatgttgcagaatggctttaaacttggtaacgctcaaattgaaactcctaagagtattggagtagctactgctattatggcgcaaatcactgcacaggtagcatctcaccaatatggtggaactacatttgctaatgtcgatttagttctggctccttatgtagagaagacattcgctaagcacgtacgtgatgctcgcaaatatcaagtagcattagtaaaagattatgctatttcaaaaacagaaaaagatgtatttgatgctttccaggcatatgaatatgaagtgaatactttgttcagctcaaatggacaaactccatttgtgactatcacatttggtatgggaacgtcatgggaagaaaaattaattcaacgagctattcttgataatcgtattcgtggattaggacgcgatggaattactccaatctttccaaagcttgtgatgtttgtagaagaaggcattaatctacgtaaagaagacccgaactatgatattaagcagcttgcattagaatgcgcagctaaacgtatgtatcctgatatcatcagtgctcgaaataatagagcaattacaggttcagaaactcctgtatctccaatgggctgtagaagtttccttggtgcttggagagactcttctggtaaatctgttcttgatggccgtaataatctaggggtagtaacactgaacctccctaggatagctctggatgcaaattataaaagttcagatgacagtaataaactgttcaaactactggatgaacgtcttgatatttgtaaagaagctcttttaactagaattaaatcacttgaaggtgttactgcgtcagttgctcctattctttaccaggaaggtgcttttggtgtgcgtatgaaacccgatgatgaaattcttgagctattcaaaaatggacgtagttcaatttcattaggatatattggcatccacgaatttgatatgcttacttttaaaggaagtggtaaactcgtcctgaagtatattaacactaaacttaataaatggacagaagaaaccgggtatgcctttagtttgtattctactccggctgaaagtctgtgctatcgtttctgtaagattgaccaagccaagtttggtgatgttaagggtgtaactgataaaggttggtacactaatagtttccatgtgtcagtagaagaaaacctgtcgccttttgaaaagattgaccgtgaagcaccatatcattctattgctaaaggcggtcatatttcttatgttgaacttcccgacatgaagcgcaaccttgaaggtcttgaagcggtatgggactatgctatcgagaagttggattattttggtgttaatatgccagtagataaatgcctttcttgtggttctacccatgagatgacacctactgaaaacggattcacttgttcaatttgtggtgaaactgatccaaagaaaatgaatacaatccgtaggacttgcggctatcttggtaatccttctgagcgtgggttcaatcttggtaagaacaaagaaattatgcatagggtaaaacatgttagagaaaccaatgaagcaagttgattggaaccaacttagcgaatggggattgatttggaaaatcaacaaagaggttctgcacccgcttggaattgctataacccgtgaccccgaaagtggattatcggctggggctattcaaactgatgagccctggaaatatgatgcagaagtagaagcacgtaatgaggtaaggttcaatgaatttcgacagaatctacccttctgactttgtgaatggccctggatgcagggtcgttctttttgtcacggggtgtttgcataaatgcgaagggtgttataataaatctacttggaatgctcgtaacggacagctattcactatgaatactgttaaagagcttgcatcccatttaagcaaatcgtatatccaaggtcttaccttaactggtggagacccgctttatccacagaaccgggaagagatttcaaatttagtttcttgggttaaagcaagatttccggagaaagatatctggatgtggacaggatataagtttgaagatatcaaagatttagatttgctacaacacatcgatgttataattgatgggaaatatgagaaatcactgccaactactaaaaactggcgtggttctgacaaccaaagactctgggtaagaaatggttctacctggacacacgattgaggaaatttatatgctgacttacaaaattatgtttactctgaaccacatggctactgaactgtttggaccagaatttctggctatgacagcattcatcttaaatatttaaggaaaattatgaaattcattaatgctattcgtaaatttatttctaacgttatcgctttggttgcattaacggcaggtgctttcgtagcaattccgtttattgttcttattatcatcgcagattggattaatcctaccaagaaagatgaaaaactgtctaatgaagaatttcagaagcgcgttaatactctgactgctaaacttcaacaggtcatgaaatgatagaaatctatggcatccctgaagaagtttggagatgccctggatgtaaagcagttcgtgacttgctcgataagctgcaacttccgtatgagttctataacgtaatcaacgaggtagacggtcaaccggtttatgaccgtccgttgattgagtcacttgctaaacgcatcgggtgctatccatcgcttgctattcggtatcctgtcatttttatggataacgttaagcagtatgacattccaacattcaaaaccaatcttattgctgctgggcatgacccagatatcatagaagattaaccggttcctttctaaggtcatcttgaccaccttctgtatatttctatacccttcatttagaggttcctatgggacctctcttttattctaaactcctttcacaaagttgtttacaagccagttgatgagtgatactatagctctatcaacggataacagcataccgtttaactcgagaggaaaatatgaattggttaaattggcaagaagctctagaagctatgcgtaaaggatgtatcgttaagcatgagtattttactgatgacgagtacttctatatgcgtaatggcgctatccgtgacgagaacggatatgatatgactcgctggtacaagggtgagtcttggcaaaacgaacattggtacatcgcatgaaaacttttgctgtaggtgatatcgtccgtacccgaatttgggatgggcttcaatttgaagtggttgtctatgtcggttcagagggggttctgcttcaccgaattaacaatctgattgagtggcaacttgaacgcttcgtgaaatatcatgaattaaatagctaccactgcactgtagctccggttgctagtaaagaatactacgatatgctagaagagttaaaatctctcaaagattgatttgctacaggagatttgatttagaatctcctttgtcaaaacaatcgttactgaggaaattaatatgtcccaagcaatcaaaaacgtactgaactcttttgcttatgataaagtatctgcaatgctggaagaaggacgttgtgtaactccgtctttgcttgatcagtgggaagttaagcttcacggtacgatgaaagaagaaggccaaaaaattggtaaagcccgcatccgtgaattagtggttgcttatcttttgtctgaatttggcatcaaagccttcggtgtagaaccaatcaccccaggtattggtgaaatttctgaaaccactattcgcaaaatgaaaaaccagcgcaagaaaggcttccgcgatgttaaagcggttaaggcggcaaaatgatttcatatattgtgtgcgcatctattcctaccggtgtatggcatagaaggattaagtatatccgggctcattctgagcctgacattagtcaagctaaacggatactcgcaaatcaatgggatgaagatactagcgtaattatcagagtatttccaattgattcatccactctagacagccaacttccatctccgtcagagatgtggcaagaagggttaaacgagcaggaactgcgagagtatcttgatgcgtaaggttattctatacacagaaatttttactaaccgttgggtatttgatagtattttgcttgctgataccaagtttgccgatgatattggcagagctagaaaactggcgtatgaattggcagaaaaatccccaacatttgtacgtatttcatacattataacaacttctgattatgtgtataaagtatcaaaagaagcattatacagattttgtaatgttatgatttcttctggaaaagcattaaactataatcaattggtggaaattttaaatgactgaagaacaaattacagaagttggttttcttggatggttcatatctaaaacgcctgatggcagaaacacgattgaaactcctaacggggaattcatcattgaagaagattttgacgcgttttggatttatgaacgctctggtgagaatgaatacacatccgtggatgctttctctaaatttgaagacgctattgactcggtgaaagcatggctaaagtaaaccaaattatgattgtagtagaaggcgttggcggatttactatagattcctatatgggtgtttggtttgacaatgaagagggcatgtattgggaaacgcatgcctctatgttaaatgaaactcattatgaaagtttatactcttcattcatggaaatgatgcatgaagtagatgaatctgagtggtttgaacttagtttgggcgagttcaaacgtatcatggaacagttgttccaatgctatcgtattatgaagggtgaactatgaaaattcagttgactcttacccatgaaaatattaaaggtgtgttctgtcttgaaaatagccaaataacttttgcacaagatggaacgtactggtatgctgaatcagatgatatcgctggttatggaatggagcgtgtatttgaagattttgaagccgtcattgatgttccattagatttcacgtataacgatttttatcgtatcatgatgaaattaattgcatgcgctgaattgattaagtaatgctttaatcctctcgcttcccaaatttgttataatagatattattaattgaagcgaagaggcaatatgagtaattatgtaaataacaaggaactgtataaatcaatctgtgcatggaaagagaagtgtcgggagtctgaagctgctggcggccctcgagtagtaaaacagaacgatacgatcggccttgctattatgctgatcgcagaaggtctgagtaagcgtttcaacttttcaggatacacccaatcctggaagcaagaaatgatttcagacgggattgaagccgcaattaaaggcttaatcaacttcgatgaaactaagtatgataacccgcatgcgtatataacacaagcttgtttcaatgcattcgttcagcgtatcaaaaaagaacgcaaagaaatggcaaagaaatacagctattttgtccacaacgtgtatgattcacgggacgatgatatggttgcgttagcagatgaaacctttattcaggacatctacgataaaatgacgcagtatgaatccaccgcttataaggcgccagggtctgctaaaaagagcgaacctacaagtgatggacctaatctggaatttttatatgaggctgaagattaacctcgacgtgtttttagagtttttagaagatgtgcaagacctagacgctatcccttatttgctaaagatgtatttaagggaggtgcttgatcttgatattcacattgacccgaaaaatccacatgacgctgatttcaggtcagattctgctataattgaacatagttataattggactgatactgaattcacatttgaaataaattaccatccaaaggaataacatgaacaatattacccaggaagagcgcgacgagctgcaacagaaactaatggaagctgcagaagaacaagctattgctcgagccaacaaagttgttcgtaaaaaccgtcgtgaacttgagcgattaaaagctcatgctggagacgcggtattagacaacaatttccctgcttacaagtatgctattgaaaaactgcgtactattttaaaacaaccttttaatgatgagattattctgacttgctggaatacctctcgtaaatctgtttgggacattctaaatgctggtacaagtaaaatttaaacgtgttcgtaaagacgcaggatttactttaaacactgcgactggtacgatggcagtaaaggtagcagataatcaatatcgcgtgttaggctctaccgaaggatgtaagctaattgataagaactctcttgtctgggttgacaccttccaagttaaacggtggtatgaatggtaaatgaagagaactggggattcattgatttagatgaacaccctgattttattactagtgaagagaattgggatgtatgacgaatttgatgggttctaatcctgggcatgattggcctgaaggaaattacacgtgccggtgcagtaattgttcagaacgttatacaggaccaaagcgtagttacttctgctataaatgcgataccgctaggagagaagcacctgctcccgattatgaagcaattcataatgccaaggtggatatgctgaaacgctttgaagaagctcggcgtatatgtgaagcggcaggttatgttgtatacaagaaaatttaaagggcttcggcccttttgctttattacgggaatggtaaaatattcaaaattaacaacaaaggtcaacatatgaagattaatattttaatggctcgcggacttgagggatgcggcgtaaccaagttcagtctcgagcaccgtgagtggttagtaaaacatggccatgaagtaaatatcatttacgctaaagataaagcgtttactcgtaatagagcacatagctataaagatgtaactattcctgtgtctcttgcagatgactacgataagactttatctctgcttaacgcatgtgacattcttatcattaactcagtacctgctgtcaatgctccagaagcagcgattgataactataagaagctcatagagaacattaaacctgaagttcgggtagtcgtatatcaacatgaccatagagccttgtcacttcgtagaaatgctggtcttgaagaaaccgttaagcgtgctgatgtactgtttagtcatagctcaaacggcgattttaataccgtgctaatggaagaatattttccaagcggcgggttgagtttctttgatgattctgactcagctcctccggtttataactttcaacctgctatgaacatcaaagcaattcgtgataagtattggaaagacttctctgctattgattttgatatccatcgttggattggtcgtactactacgtggaaaggctatttcttgatgtttgactttcatgaaagccatctgcgtcccgcaggtaaaacgactatcttggaagggttagaacgcagtcctgcgtttattaacatcaaagaacgctatgaaattgattattgccgtcattatcatcaggttaaaactgggccaggtctgaatcctcaagttcttgaccgatatgttaactctgaaatgcttgagcgtatgtctcagtctggatttggctatcagctgtcacgtcttccggataaattccttgagcgttcgctggaatacacgcatttagaactaggcgcttgtggaactattcctgtgttccataaagctactggtgatgctttgaaattccgggttgatggaaagccgttgacttctcatgattctggcattctgtggttgaatgatgaaaataaaaatgaagtctttgaacgaatgaaacatctgtcatctgaccagaagctctatgataaagagcgaaataaagcatatgaattcctggtagaacaccaagattctgagcattgctttaaagaacaatttgagttaatgacaaaataagtaatgggccttcgggccctttttgctattcacggaataatataaaattaaactctactagagaggttatatgaaaattattcactcaggcgattggcatttaggtgtccgcgcagatgacccgtgggtacaggatgtacaacgacacggaattaagcagcatattgattatgccaaaaagcatggaattaaaactatcattcaatacggtgatatttttgacgttcgtaaagctatcactcataagacaatggaatttgctcgtgaaattgcagagtctcttgagaaagaaggaattaacttaattacgatcgtcggaaatcatgacatgcactacaagaatacgttgacgcctaatgcatcaaccgaagttcttggtaagtataagcatattactgttattgaaaagcccgtgactatggattttgatgggactttgattgacttgtgtccatggatgtgtgaagagaacacatcagaaatcatgaagcatatcaaagaatcgtctgctgaatactgcattggtcattgggagcttaatggcttttatttttataaaggaatgaaatctcatgggctggaaccagatttcctcaaaaagtacaaacaagtatggtctgggcacttccacaccatatcaagcgcagcaaacgttaagtacatcggaacgccttggacgcttacagcgggtgacgagaacgacccacgcggcttctgggttcaagacactgaattatcaacctttgatttcgtccctaatgaaatcacttggcacagaaaactgatttatcctgtcacagggcaagttgattttgaagagttcagaaatctcgcagtacgcattattatcactgcggtcgatgaagaccttcctaagtttgaatcagaacttgaaaaggtagtacatgaattaagaactgtttctaaagttgacaactcggttgagtctgaagatggtgaagaagtagaagttaaaagcttattggatttaatggaagaatatatccaagcacttgaagacctgtccgcagatgatatcaaagccttaaaggttatgtctaaacagttatacattgaggcacaaaatcagtgaagacttttaaactaaatcgtgtcaagtataagaatataatgtcagttggccaagcggccattgacattcaacttgataaatgccaaaagaccttaatcacaggtaagaatggtggtggcaaaagtactatgctcgaagctattacttttgccttatttggtaaaccgttccgtgatattaagaaaggtcaattaattaactccttcaataagaaggactctgtagtagaactgtggatggagtatgacggtcatagtttctacattaaacgtggacaaaaaccgaatgtctttgagattttacgagatggtaataagcttgatgaagccgcaagttcaaaggactttcaatcctactttgaaagtctcatcggcatgtcatacacatcgtttaagcagattgtcgtattaggaacggcaggatatactccgttcatggggttatcaactgctaatagacgaaagctcgttgaagatttgcttgaagtgtctcttttggctgatatggacaaactgaacaagacacagataagagaaatcaatcagcaaatccaggttaatgatgttcagcgtgaagcattgactaatgaaattaaaactcatcatgagtatgcagaaaagcagaagaaactttctggtgataacgttgctcgtttacaaacgatgtatgatgaacaagtcaatgaagcccgtggatataaagcagaattagaaactcttcagagagaactgcttgagttagtaattggagacgacccagcagagtcaatccaagaagttcaaggtaaaacatttaaaattcggtctaaaattgaatcatattcaaaggttcttgggctgtatgataaaggtggtcattgcccaacgtgcttgcaggatttgcattctaatgacactctaatcactaagattaatcatcatgttgaagaatgtaataccattcttggtgagttaaagacgcgccagagtgaactggatgaactagctcgcgagtataacacggtccgggctcgcgctagagatatcaaaactcaaatgtctagtttaaagcaaatgactatcactgctgtggaaaaggcacgtcgcattaaagcagctattgataaagcatctcaggagtttattgataactcagacaagattaaactgctacaagaagaattagataaaattatcctcgtcaaaactaatttggttatggaaaaatatcgtcgtggtattttaactgaaatgctgaaagactccggtattaaaggagctatcatcaagaagtacatcccgatgttcaataagcaaattaacagctatctaaaaattatggaagctgattattcgttcacgctgaacgaagagttctctgaaacgattaaatcacgtggacgagaagagtttagttatgcctcgtttagtcagggtgaaaaagccagaattgatatagcattactattcacatggcgtgatattgctgaaaaagtttctggtgttaaaataaactgtctgttccttgacgaagtctacgattcggccaccgacgcagaaggtgttaaagcaataactgctattctggataagatggtagatgctaatgtgtttattatttctcaccgtgaccacgacccgcaggcatatggccaacaccttcaaatgaagaaggtcggacgattcacggtgatggaatgaatgagtttactactggccaacatttgttggcctttcctgaagtaaagcgttatgtgttagttaatttgttttctgatgagcaacatctcgtaactgaagaaatgttacgagatgcttttacgggaaatgaatataatagagtcatgtccaacaggaatcccggttggatggttgaagattactacgattaaggtaaatataatgattaattttgttgatgtgaaagatatccaggttaaaaacgtacgtgcagattccaacccgaataaccaaaatcgtattcgtaagtcttgggttctggctctgaccgaagaaactaaacaggctatcaaggataagattaaagattccgaagctcgctttgctttctataaatctatcgatgatgaagtcgcagaaaaatggattgaactgatgcgtaagcattacaatgaatcaatcaaggctggtgccaaaattgttactgatcgtcacggtggcgaacgtctagaaaatgattactgtgtagatgctgatgagcaactcgttgcggcaggtcagattgttgcagaagaattaactgctacattcgcagcttgatataattatcctgaacttaattaaaaggtattgaaatgaaattctctaaagaaactctgaacattctgaaaaacttctccaccatcaactccggtatcatgctgaaacctggcaattttatcatgactcgtgctgttaatggtacgacttatgctgaagcaacaatttctgataccatcgatactgatgtagcaatttatgacctgaacagtttcctgagcattctgtctctggttggtgatgatgcagatattatcatgcaggaagatggtaatctggcaattaaagatgctcgctcaactatcttctggccagcagctgacccgagcacaatcgtgttcccgactaaaccgatcccattcccggtagcaaatgtaattatcgattttaaaggtgaagacctgcaacagctgatgcgagtatctcgtggcatgcagattgacacaattgctatcaccaatgttgatggtaaaattgttctgcgtggttataataaagtagaagacgctgcactgacccgtccgaagtattccctgacactcggtgattatgaaggtgagggtaacttcaactttatcatcaacatgagcaatatgaaaatgactatcggcgattataaactgatgctgtgggcaaaaatgaatggctccaagaaacagactgcagcgaaatttgaaggtgcatcagcctcttatgtagtagcaatggaagcagacagtacctttgattttgagtaataacttcggggcttcggccccatctttaatctgaatgaggaaatataaatgaaattgacagtaaacgaagcagacttcatgtgggaacagaaatatcgtccaggtactatttctgagtgtgtacttcctgctgaagataaagaaattttttcagctttagtagctaaaggaaaaattcctcatttaattctccatagcacttctcctggtactggtaagaccacagtagctaaagcattgtgtaatgacattaatgctgaaatgatgttcgtgaatggttctgactgtaagattgatttcgttcgtggaccgttaactgcatttgcaagttctgcttctattgcaggcaagcagaaaattatcgtgattgacgaatttgaccgtgcaggtcttgcagaatctcaacgacatctgcgttcattcatggaagcgtatagcacaaactgtactattatcattactgcaaacaatcttgacggtatcattaaacctcttcagtctcgttgccgtgtaattaattttggtaaaccatctccatctgatgttaagccaatgcaaatcgagatgctcaagcgttgtctcgcaatttgtgaaaatgaaggcgtggtagttgaagataagaaagttgtagctgctttggtcaaaaagaattttccagaattccgtaagaccatcaacatgcttgatcattattcttctaagggtgtgattgatgcaggtatcttgtctatcgttctgaatgaccgtggttcaattgaagatgtcatcgaagctattaaaactaagaacatcaaagaactccgtgctcttgctccgaaatatgcagcagactatacttggtttgtagataaactttcttctgagctgtatacaatggttactggcccaagcattatccgaatgtatgaaatcatcggtgaaaataaccagtatcatggcatagcagcttcgattgaattacacttggtttatatgcttattcaacttgttgtagagatgcagtggaaatgatgagtttatttgaagatgatgatcagtataatgaacaccaaatcgcgtggttaggtaaagactgggcgaaagtccaggaattatctgattcatataaagaaaaggcagaaaatcaattcttcgagattatcggttctattaatgaaaagaaagagcatttgaatatctcgactatggattattcaaaattcatggttgaaaacgctctttctcagcatgccgactgtatgcctgctgtttatgttatgaaccttgttggtcaagggttatctgaccaagcacactataactatatgatggcctctgttcctagaggtcgtcggtatgggaaatgggctaagttaacagaaaacatccaggatgcattgattcttcaagttataatgacatattacaaggtcaatgcgattgatgctaggatgtatagagagaccctggaagctaaaaacaagcttaaacctgctctcaagaaaatgaaaggtcttgtgactgatgaattggtcaagacaatcacgaaaaacgtgaaagaacagaaaactcttaagaaaacagcattggaatggtaaagatgattgaaattacactgaaacagcctgaagacttcctgaaagttaaagaaactctaacccgtatgggaattgctaataacaaagataaggtactatatcaaagctgccacattcttcagaaacaaggtcgttactatattgttcattttaaagaaatgttgaagcttgatggtcgccctgttactattgatttggaagatgaaattcgtcgagactcaatcgcacaactgctcgctgactggggtctactgagtattaatcgtggtcaaactcttgcccagatgcagaataacttccgggtaattacattcaaacagaagcatgaatggactttaaaatctaagtacacaatcggtgcgtaagaaaagggcttcggcccttttactttataaaaatcggagtataattatcccacctaaagactaataactcggtctataaacaaaggaaacccatgaaagaattttatattagcgttgaatctctaggcaatgacattgtagaacgttatatcgattctactggtgaggaacgcatgcgtcgcgttccatattctcctgtgatgtttagtcattgcatggaagaaacaaagtacaaagacatctatggcaagtattgcaagaagaatacattcccaactatgaaagatgcgcgcgattggatgcgtcgtatggaagatatgggaatggaagcaatgggtatggatgatttcaaactcgcgtatatcagtgatacttacggttcagaaatcgtttataataaaaaattcatccgaattgcaaactgcgacatcgaggttactgcatctcaattcccagacccgatgaaagcagaatatgaaattgatgctatcactcattacgattcggttgatgacaagttctacgtatttgatttactgcattctctttatggttctgtttccgagtgggacaagaaacttgctgctcgtttagattctgaaggcggcgatgaagttccacaacatattcttgaccgcgtagtatatatgccgttcaattcagaaaaagaaatgatgcttgagtacatcaatctttgggaacagaaatgcccagcaatttttactggctggaacattgaaggatttgatattccgtacatcatgaatcgtgtgaaacagattcttggtgagcgtacgatgaaacggttctctcctctgaacaaagtttcatctaagattatcacaaacatgtatggtgataaagaaatttattctatcatgggtgtgactattcttgattacatggatttgtataagaaatttagtttcacgaaccaaccgacgtataagttggatttcattgcttattatgaaaccaagaaaggtaaattagcatatgacggtccaatcaataaattgcgtgaaactaatcaccaacggtatatttcgtataacatcatcgacgttgaatcagtacaagcgattgatgctgttcgcggatttattgacctggctatctcgatgtcttattatgcgaagatgccgtatcaaggtgtaatgagtccaattaaaacatgggacgcaatcatctttaacagtctgaaagaacaggacaaagttattccgcaaagtcgttctcatgttaaacagtcatatcctggtgcgtatgttaaggaaccagttcctgctgcatatcgttatatcatgtcgtttgacttgacatctctgtatccgtcaatcattcgacaagttaatatttcaccagaaaccatcgttggacagtttaaacttcatccgttgggtgagtacattaacaagactgctcctcgtccgtctgacgaatattcatgttcacccaatggttggatgtatcgtaaagatgtagatggtgtcattccagttgaaatcgcgaaggtattttatcagcgtaaagagtggaaaaataaaatgatgggtgccaaacgaaatcaagaactgattaaaaaggttctgaatgataagaagtttggaactatcgataaattcgcagaagttaatgtctatgaagatttctctgatgatatgaaagcagaactgctgacatataccgaagagtgtcttgacaaactgatgtttgaatgtaaacacgctgaaatcttgggtaacactaaccagttaaaccgtaagattctgatcaactcactttatggtgcattgggtaacatttacttccgttattatgatttgcgtaacgcatcagcaatcacgttgtttggtcaaatggcaattcaatggattgaacgtaaagttaatgaatatctcaacaaggtatgtggtactgaaggacattcgtttgtagtagctggtgatactgactcaatttacgtttgtgttgataaggttatcgagaaggtaggtcttgagcgtttcaaagaaactaacgatttggtcgaattcctgaaccaattcggcaagaagaaaatggaaccttggattgaccaatcatatcgtgagatgtgtgaatacatgaacaataaagaacatttaatgttcatggaccgtgaagctatttcttgtcctccgttgggttcaaacggcattggtggattttggaaagcgaagaaacgatatgctctgaacgtgtatgatatggaaggtactcgatatgcagaaccacatctgaaaatcatgggtatggaaactcaacaaagttctacaccaactgctgtacaaaacgcattggaagaatctattcgtcgtatgctgcaggaaggtgaagaatctttacaacaatattataagcagtttgagtctgagtatcgtgaacttgactataaagtaatagcagaagttaagaccgccaacaacatcggtaagtatgatgatggtgcaggatatccagataaaggtactccatatcacgttaaaggcgctttggcatataaccgagcaaccgcaggatttgaaggtataacaccaatcatggaaggcgagaaggtgatggtcatcccgctgcgtgaaggtaacccgtacggtgagaaatgcatggcatggccatcgggcactgagctgccacaagaaatccgacaggaagttctagtgtggcttgaccacagtgttctgttccaaaaatcgttcgttaaacctctgacgggtatgtctgaagcggcagggttagactatgaagagaaatcgtctcttcttgacatgttcgatttttaaaaaagttgtttactttaccacaaggatgtggtactatagctctcgaaataacatactgaggagattacaatgaaatcgttacttgctgttattgttgctctcacgctgactggttgtcaaatgccacaaggtgatatcgtcccggcttcttctgttggacaggtgcgagcaattggcggtactgtaggatactatcgtgctagcaaccaggtctctgctgaatcgctcgcggttgagcgtcggttggcgaaagaaaaagctaatcctaatcgccagctatctgcgatggaacttgacatgattgagcagaataagcatgaattggaagaaattaagcgtctgcgtaaaactcaaaaagaacgtacatgtactgctcaagcggcagcagtgaatgaccagattcgtttaactgattttgctaacggcggattgagttataatgagcataaacaacgtatggagcagttaaaatctctccaaaatcacatctacaacaaatgcatgtctaactgaggagattaacatggaagcagtatttggtttaatcattcttttcttcatctattttttgccgacctttgtagcttgcagtcgtaagcataaatcacggggtggaatctttatcacaaatctagtattcggttggtccattatcggttggttaattgcgctgatttggtctgcttctaacgcacagcagaatacaattattatccagcaagttaaataagaggtctcatgattgtaactccaatgacagtacaagatatccgtcaagaattcgctgatgctttgctcaacaaagaatttgtgattgataagacgggtgtgaagactattgaaatcgtaggtgcatcatttattgcagatgaaaacctaatttttggcgcagttaatgatggatatattgctcgggaacttgagtggtataaatctcaaagtttattcgttaaagatattccaggtgaaaccccagctatttggaaagcaattgcatccaagcacggtgagattaattctaactatggctgggcagtttggtcatcacaaaactattcacagtttgctaactgtgcaaaagaacttatcagtaatcctgattctcgccgcggaattatgatttatacacgacctcaaatgcagtatgattttgagcgtgatggtatgagtgatttcatgtgtactaacaatgttcagtatcttattcgtgataataaagttcatgctgttgtaaacatgcgttctaacgatgtcgtctttggatatcgtaatgactatgcgtggcagctctatgttctggaacagttaaccaaacttctgaatgcatcaggtaaaaattattcagttggcgacattatttggaatgtcgggtctttgcacgtgtatgagcgtcatttctatcttgtagataactatgcttatactggtgaaactcatattgcaaagaaagattataaaggtgagtggaaatgattcagtttgtaattccaagttataagcgcgccggggcagttactgccatgactatgtttcctgaaggttatgttccgcatcttgtagtacgtgaatcagaaaaagaagcatacgaaacttggcacggtcatgctgctaaaatcgttactgtccccgatgatgtcgatggaattgcgggaactcgccgtctgattactgaaatgtatgcagggcaacgaatttggatgcttgatgatgatacgaccattcatctgactgaaattcgtgaacgcgacgatcgtcgggttccacttggtgtcggcgaggcaatgagtcaagaggtatttgatgatatggtcaaatacgtcgagactgctatggattgtggttattatcatggtcatgctcgcttgccgattttcaaaattacatcaagctggggtcattatcgcgagaacagctttgggtttaccaatactttctacgatttgactaaacttaccgcagaagatattggttacggagttattgaccttaacgaagatgcttatgcttttctaaaattaattaacatgggtcatcctcatctggctctgtttaagtatctcgttaaatccggcaaagtgcagtctcctggcggttgctctactcagcgtgatactgctcgtcagaatagagcccttgaacagctacatgctgctttcccaaatcaagcccgttggaaatctaaagacggtgaaagacgtggtttattcggtgataatgaacctctgaaatcaattcgtatgtgtattaacactcgagtgaaatctcaggccttccatgaatttggtaaggtagaaccatatctgtgagggcgaaagccctccaaggacctcttatgaacatctatgataaatctgatgtagctggtaacatattcaaggctgaagaattcagatgcttcgtatgtaaatctgatgagtttgttcatgaaggaactactggctcagatggaatgcattgctggtggcatggcatgtgcgttggatgtaaaatacactatgaaatagatatggaaacagtggtttataacaccaagaagaaatggaacttctgttaatagcttcaagaacaaagtaatataattactctatcctttaacctgtgagaaaaatataatggagacttatggaatataatgaatgtctgacttaaaatctcgcctgattaaagcatccacttctaaaatgacagcagaactgactaaatcaaaattctttaacgagaaagatgtagttagaactaaaattccgatgcttaatatcgcaatcagtggagcgttggatggtggtatgcagtccgggttgactatcttcgcaggtccatctaaacacttcaaatctaacatgtctctgacaatggttagtgcttatcttaataagtatcctgatgctgtctgcttgttctatgattcagaatttggtatcactccagcttatctgaaatctatgggtgttgaccctgaccgtgtaattcatacaccggttcagtcggttgaacaattaaaaatcgatatggttaaccagcttgaagctattgagcgtggtgaaaaagtcatcgtgtttatcgactctattggtaacatggcatctaaaaaggaaaccgaagatgctttgaacgagaaatctgttgcagatatgactcgtgcgaaaagtctgaagtcgctcttccgtatcgtaactccttacttctctattaagaacattccttgtgtagcggttaaccacacaatcgagactatcgagatgttcagtaagacggtaatgacaggtggtacaggtcctatgtattctgcggatactgtattcatcatcggtaaacgtcaaattaaagatggttctgagcttgagggatatcagtttgtcctgaacgctgagaaatcgcgtactgtcaaagagaaaagtaagttcttcatcgatgttaaattcgatggtggtatcgatccatatagtggtctgcttgatatggctctagatatcgggtttgtggttaaaccgaaaaacggatggtatgcacgagaattcctggatgttgaaaccggtgagatgattcgtgaagaaaaatcctggcgggcaaaagatacgagcagtacggaattttggggtcctctgtttaagcatgagccattccgtgacgctatcaaagcccggtatcagttgggtgctattgattcaaacgctgcggttgatgaagcggtagcagaaatgattaactcaaaagtttcaactaaggttgatggtgttaaacttcctgagagtggttcagtatcagctgctgaagttgaagatgaattagagaacttcatgaatgaagactgagtttgatttagaatctgaactcgagaaatttgaacaagaatctccctcggaagagggagacttcgagcgtcaagaacgagtgttcaagaaaagccatgaaataatccaagaagctatgaagaccgttatccaagaaattgtgataaaattaaatggtcaatcacacttggtttatgttcataaattaaatatttctccttcgggggaagtaactattgagtttagtactccatctgaagctcataaggatgaactttatcctcatgtggaagcttgtgttaaacaacaaatccagagtgcattaaagaccaagaaaaaatcattatggaaaatcttttaagaggttaaagtggtagaaacaatcttagctaatctgatttacaaccaggctttctttacgaaggtttggccatatatggacaaagagtacttcgagcaaggacctgctcagacggtgtttaacataattaagaaacacgttaatgaatacacagcaattccttcaaagactgcgttatgtgtagcactggataattcgtctataactgaaacggaacatgaaggcgcaaagaaacttattgataagttatctgatgctcctgaagatttgaattggttagttaaggaaacagagaagtacgttcaagaaaaggctatgtataacgcaacgtctcgaattattgaaattcaggctaatgcccagcttgagccaaataagcgagataagcgtcttcctgatattggggctattcctgatatcatgcgtgaagctttatcagtatcgtttgatagctatattggtcatgattggatggaagattatgaagctcgttggttatcataccagaataaagctcgtaaagttccgtttaaacttagcattctgaacaaaattactaaaggtggtgccgagactggtacgctgaacgtattgatggctggcgtcaacgttggtaaatcattaggattgtgttcattggctgcagactatcttcagatggggcataatgtcctttatatttccatggaaatggccgaagaagtttgtgctaaacgtattgatgctaatttgcttgatgtatcacttgatgatattgatgatggctgtgtatcatacgctgaatataaaggcaaaatggaaaaatggcgtagttctagtactcttggtcgtttaatcattaaacagtatccgactggtggcgctaacgctaatacattccgagctcttctgaatgagttgaaactcaagaagaactttaaaccgactattatcatcattgactatcttggtatttgtgcttcttgtcgtattcgtcaatatactgaaaacagttacacgttagttaaagctattgcagaagaacttcgcgcattggctgtagaatctgaaactgttctttggaccgcagctcaggtcggtcgttcagcttgggatgcttctgatatggacatgagtgatattgcagaatctgcgggtctacctgctacggcagactttatgttagctgtgattgaaacccctgaacttgctcagatgaagcaacaattaattaagcagattaaatcacgttatggtgataagaacatcaacaataagttctctatgggtgtacataaggctaatcagcgttgggtagaaattgagcagcaaaacgacccaactaagcctaatccaagcaataccgtccgagaaggtgccggtgcacagaaccgtgtagccgaatctaatcgtcaggaacgagtatcacgttctaagcttgatgctctggcagaagagttaaaattctaggtaaattttatgatttttgtgtttagcgcggtccgtgaccagtcaggtcactcttttgttgtaacagccacagataccattcatcgaggcattgaggcatataacaaagcagacctatctgtatgcgactatggagaggtcaaggtgtatgacagcgatggcatctgggttaactctgctacatacctacctaccaagaatctgacctctgacattttgttgaaaaaattgttcaaaaggtagtttactttctccaaaggccatgatactatggccttactgaaacaaaacgagtagaggaaaacatcatgtggacaattgaaaaagcattagacgtagtctttaagagtaaagatgaatcagcggaaaccgtaccgcattgtggtatggtagttggaagcaaagtagttaaatctccatatgctaatctgcgttgtgatggcgtagtacgaaaagcattagatgaaggcgatacagttttagtagttgttgagccattcaaaaacactgatggcaatgtgtcaatgttagtatacgcaaacggtgattatcgcctgatttctgctcttaacgtacaagctgcttgaggaaaccaaaatgaaaaagattgtacttgctttagtgttcgcagtatcaagttgctctgcagttcctgctatggccaactatgacaaagacttgtgtgagtggtcaatgactgctgatgagtctgaagtagctcagcagattcgtgcagatgttggtcatattgtggaaaacgtagacccaagtaaacaatcagaagtgcaagcagaacttaaagacgacggcgcagcacttaagctgaactatgttctttactgtgatgctaagtttgataacttcaacattgttaagtggattttaggatgattacatacgttttagtaatggcgctatctacgggttcaggcggaatgtctactgaaaagatggcattcactggtaaagatgaagccgtgattaagcaaaagtgtgaagatacaggcaagcagtttatgcttatcaaagacaatccaaaatcaatgtctccgactctgtatcctacttataaatgcttacgtattacgcatgaataaatagtaggaggctctatgaaaacatacaaagagtttgttactgagatggtcgcaggtgatgcaggcggcagcccacaaaatattgcatcaggtaccacttccggggacatcgtcaataaaggacccgaaacccttccaaagaaacgaaaagcggataaagacgctgccaagaaaaagtgataaaatggccttattagtttaaggccagaggaaatattatgtcttgggttgataacgagtatgcaattcgtgcaatatctcacctacctaaatttagacacgttactacatcttcaacattcaagttaaactgccgttgcccaatttgtggtgactcacagaaagatatcaataaagcccgattctggatttttgatgcaggccaaggattacgatgccattgcttcaactgtgagtataacaagtggctatcgcagtatcttaaagataatgaacctgacctctatcgagagtatcttcttgagaaaagaaaggaacaagtctttgacaagccaaaggttgtagaaccatctgaaaaaattaatgcaaaacttcctgtaatagaaaaacttaatttctgtgagagattagatagacttcctaaggaacatccgatagttaaatacgtgactgccagatgtattccaagcacttcttggaaaaggttatggtttactaaccaatggccttctcttgttaactccgttaatccaggaacctataagaatgagacgaacgaaccacgtttggttattcctatcttcaacaagaaaggagagattgagtcgtttcaaggacgagcactacgaaagaatgctccacaaaaatacatcacaatcaaagcccacgaacacgcgaccaaaatttatggtctcgacactattgatgagtcaaaactcgtattcgtcatggaaggaccaatagattcgttgttcattgataatgctattgcaatcactggcgggtctttagatttagctcaagttccatgccatgataaccgagcgtggattatggaccatgaacctcgtcatcccgatacaattaagcgcatgaaacgtttagtagatgcaggtgaaaaggtagttttctgggataagtcgccgtggaaaagcaaagatataaatgatatgattatgaaagagggggcaactgcttctgaaataacagattatattaatcaaaatatatcgcagggtttaatggctaaattgcgtcttgacaaatatgctaaggtataggggccaaagccccttaaattaaagtaatcctccggtcataataaacgacacaactttttctaacggcattggaggaagaactagcccgtgtgtgctagctaatggaactaccacataattccatgcagctaaagcagcagtggcgattccgacgtaaagatatcttccaaatcctcccttgtctttacattcttgtttcacttcagacatgaatcctcctaaagaaaattatttattatttttgtttactttctcctggagctgtgttactatagctcctgtaaactactgaggagaatagcatgaaaactgaaaaatctttaaaatattatgtgtacatgattttaatcaataaaaatgttgtatacattgggaaaggaacgggtgatagggcttggagccactttaaagaagcattaaaatataaaaatgatgattctagtgaaaacgcaaaatgtgaagcaattcttgaggctgagcgatgtggatatgaagttgaagtagtaaaaattaaagaaaatcttacagaacatcaagcgttttcactagaagcattctatatagattgttattggggcagtgaatttttaacaaataaagttaaaggattatctgaaaagaagcgttgtaatgtaaagttttctttggacgaagctgccacagaacatcattataatgcatatattagaactcagactggtctttttggtgattctaaaaaagcttcggacgaaacatccaatatgcttacattcgctggagctaaaagattgatagaagaaagcgaaattttagcaatacataagcatggactattgggtgatgcttataacttatgcgtgatagaatcaatagaagtgattagattacttgacctaatcggtgtagacgtaacttcaattttctttataagccaagttaaagaaaagtgcgaatacataagtgagcattttgggtgttttattcgttttaattttttggaaactaaaatgagaaaatttaatacaattatcatgaatcctccatttaagcatgatagtaaatttataaagaaagcattggaagtatctaataatgttgtatgtattacgccagcatcatatctgcattcagccggaattaatgcgcataaaccagaatttaagccaagattagaacgcgcaattattgatgacaataatggagataagtattttaatgcaggtatgatgactcaacttgctatttctaagtttacaaaaaatgaaactccgtcgtttgttttagaaaatggtaaaactggagctaaatatacatataacaatgatgattttgtatcaatagtattgaataacactattgcgaaaaacatagcaaacaaagtcaaaactgatgctcgcttagaaactacaaaaataagtaataattatatcatatttaatagaaaactatcagtaaatacgaacggcaaaattttaatgggtccagattattataaaggaatggtaaacggaaatactgctataaatgtcggaaatccaaaaaatgaatgcacggtatttttcaattcatccgaagaagcagaaaacgctataaaattttattcacttcctgttataaaattagtatgtacttataatgctggtttaggtggtggtgcaggtaaaagaatgattaagcatgctcctgtcgtagactttactaaagaatggactcgagaaatggtacaagaacattttaacatttcggatgaagagtgggaatacgcagaaaacgtagtaaatggggtttctattgatgaaattagataatcaccgagagtctgaacaaatatcaagagaacgacaacttgaaactgatgagatttttacaaataagtattgctgcgatttaatgatatccatgcttaaagaagaagatttttatccaggaaaaactttcctggaaccttctgccggagatggaaatttagttgaagccgtattaagacaaaagcttaagtactgtacaccaactgaagctataaaggatatattcgcaatagaatacatgaaagataactatgattttttatgcaatcgagttttaaacattattggagatactccagagcatagaaacatagttatgaataattttgcgtatgcaaatactattgatcagacagacacgtcagaaggtagaaaataccctgagtggatgccagattatgttaaacctatgaacgaacctggaagtttagatttctttttcgagtaaagtatgataaaaattttattaaatttaaatgatgaagtagttgatgaaactagcccaaaagagcttgggctaaaactcttctataaggatgacgataatctagtgatgcatactgaatacgcatctggattatacgtttctgaagcagagcagcttcagcgtgtattcatatttgatgaatatgatgagctgtttcaacattttatagtgtattccgataattggtcagaagagcttttagaatattttgtcagatatacgcttgaattagccggatataacggagattttagttgttatatgtctcctgatgttagtgtacactgggattctaatagtgaaaaatttacaggatggagttcataatggaaacatcgcatgaattggaaaagcttatactcatgtcaaagctctatgcagcagaagaattgaataataagctaagaaaggaaatatcttcatatgaagatattgttaatactgcaaaatcagttatacgtatgtatgagaaatacgaaaatacgtctctagacgctttaactgaagcacgaaggattgttaaagctgaaggtaaatctttaagcattgatgcgtcaaatattgcttataaaattttagaattgcgtaaaagattaaatgcagaattacttagcatagcgtcgttaaagaattccgtgctccaatatgaatatgaacatactattgaatcacaaaattcaaatgtcattgaaaagttcaaagaatttcaagattgctttaattttgatgatgtataatatttatctaatttaattgaaaggaataaaataatggcacactttaacgaatgtagtcaactgatcgctggtgcagataaagctgaagctcgatacgcaggtatcgtccgtaaggttggtggtgaccctctgcaagtaatgcttgatatgcaaaaatctcttcaggttcgtcttgcaaatgacaagcctggtactaacatgcatcctgatgaattggcccaagctggtgatatcgtgcagtggctgcgtaatcaaaaagattacattgatgacgaattccgcgaattgctgacgtctcttggcggtatgagtaacggtgaaaaggcagcatctgccgtatggaaaccatggaaagctgaccacgtcaagatgcaggaaacttatatcaaagacctgtctgataaagaccagctcgaaatcaagtttgaaatgattgatatcctgcactttgttctgaatatgtttatggcgcttggtctggattctgaagaaatctttaagctgtattatctgaaaaacgcagagaactttgctcgtcaagacagtggttactgatggctaaaagaatatctaagcgtcgtttaaaaattatcagaaaacaaaaagaacgggccttagtattggcccttcgagaagaaatcactcgagaaattgataaagaaatattaaaggcgcttacagcagctatataaatactcctgtaacctaaataggagaacataatggcttacgtaaacatcaaaacttttgaccataccactgctgatggtgaagttaaaggtacagaagtatctgtagcttttaaggtgtattctgattcacatcgtattgctaatgcgcagtatcagattttcccatctgaaaaagctgcttattcaacagtagttgatgatgctgcaacttgggcaaccaccaacgctaaaatgtttgaagctgttccagctgacagcgaagtataaaattaaggactccttcgggagtccttttatgctatactgggaatagtatattattcctactaactgaggagaagaaaatgatatgttatactaagccctggtatcaatcgccattaaagaagtctcattttgattgttggtacagaggtgtaagagctgcagcgttattgcttaaagctgcgcctactttgattaaagcaaatgataagtggtttgaagacaacaacatgactgaaggagctatgtgtggcaaacgcaaaaatctataaagtaagtttacagcgcaaactaaaagaaggttttgattctgataaagtattcactgtagcaatttacaattattcttatgacgagtttaaagaactggtcaataaatttgaagcacgcgggtggtgtcctaatagtaaatatggacttgtcaaaacagcccatacttttgatgtttcacacatgccaggaagtccaattaatattttaggtgctttacaccttaaaggatataccaatgcatatcatgagaccgatctgtttgaatatgcaaatgataaaatcgttaacggcaaaagtatcgtcattgacaatgaagacgcttttatagtatttactcagttagtatggtcatttatgcaagctgatttcgccagatttactccgagcgatttgcttcaaaaagctgctgatgcatataataatagtaacagtcaatatcgtcggatggagtggttcatgtgatggatttgtttgaaatgatggaagagcctcaggaagaggttcaagttcatccagtgatttctaaggacatcaaagacgaataccgtataattatacagaagtatggtattaaagccccagaagctcttctagatgaactagcttcaatctggtctgacccaccgccctggtctccttgggcaaaataatttcacaaagtagtttactcttccaaaaagccatgataagatacctctcgtaaccaaaaatggagaatatcatggctatttcattaaacccacaagctatgctagtagaaagcgttcattctattgatattctgaattccgtgaggcagcacagaggattacctgtgtatgatttaagcgcatgggaagcgttagccaatcgttttgactgcaaagaacagtcaattctgtggcaatgcatgaacgataagattggcgaagaatttcataagaaacttgactctatcgttagacgtcatcaaattgataacagtgacattctctatagaggtctatcatgccgcgaggctaaagcattttatgacgcccttattaaaggcgagaaatttgactttggaaaggtagcatcattcacaacagatgaaacgattgcccgagaatttgcaggcaaatggcattactcgacctttgtggttattgaagtcaatgattgccatcaatcatttgattatcataccaacatgaaatcacttttaattaccgcgccggattctgaattcattcgcccaaatgatttgattgataacgttgctcagcgcagaagcgctaacatcgagatgattgataaagaacgagaaaagatgctaccgatgggaactaagttcaaagtggtgggtcataacaaagttgaaaaatctggtttacttatggactactttagtgttactatagcttagttaactagtgattatctagaactagggacctagacccattataccgtccgtaagacgaaagcatttttgaggaaaacatgatgaaatttactgctgaaaccgctaaagtttatactcgtttaattacaactttaggttctgctcaacgtcggcacaaggagttcaatctcaccccagaatatctgtttaacatcatgcagcagacacactgtgcatactcaggcgaaaagtttggaactgctaaaggaaatcatcctgatagcatgacgctcgagcgttggaacaatgacttgggatatgtgatgggtaatgttattcctgttaaacaaaagtataatgcattgcgtggaaataacacgattgaagaccttgaacgaaaagcaaatgaaactgcggcacgcatagttcgctcttctgattctgttaaacctacaagtgataaagaagcgtctcgttgggaaaagattcgtgagtatgaaaaaactatcgcatcaattaaaactaacttacacaatcgtgaaaatcatctttctcaatttgtgcaaaaagaaaagaatggaactgcaacctcggctgatttagaacttattaatgcattgagaactcgtatcagcggtggtaaatctgaattagctaaagttgagcgtaagttatctgctattttagcgtcagttccgaatcgtccatcagatgctgaaatccgtgtgcaatcaatacggttaattgttaactcacttcgtcggttagaaaaatgctcaatgctagataagttaaaattgaaaaaaggtcttccattgactgcgtccttcttccaacttttgagaggtaaaatgtaatgcaacactatggatatgtagtagcgtataaggataaagacggatttgaccatccagtcacaactgatatgtacgatggagaacgatgtgtagtcttcactaatgaagaatcagccaataaagcacggattcgtacaatgtcggttttaacagacaaattagcaaaagggaattttactgggaaaagcaaaaccaaaggaatgctttggtggaaaacaactgagctagtgtatgaaccacttagcgatgttgagcgcgaaaaactcaaagcaaaaattaaaaatctacatgtagtgagggtaaaagtggcatgattacgtttgaccaattaaaagaaagtcaaaaagcgatttttaataaagtcattgaaatggtcaaacaaggagctaaaggacaacacattacgattaatggacctgccggtacaggtaaaacaactttaaccaaatttatcattgatgctttgatttctcagggtatctctggtattgcgttggcagcacctacgcatggggccaaaaaggttttatctaagctcagcggaatgcaggccagtactattcatagtcttctgaaaattaacccgacgacatatgaagaaaacgttctgtttgaacaaaagaaagttccagatatggcgtctattcgagttctcatctgtgatgaagcttcaatgtatgaccgtaagctgtttaagattttgatggcaactattcctgcctggtgtattgtcattgccattggtgataaggctcagatacgtccggtagaacctggaagtaatgaacctgcgttgagtccattcttcactcataaagatttcttacaacttcatttgaccgaggtgatgcggagtaatgctccaatcattgaagtcgctactgaaattagaaacggtggatggattcgtgactgtgtagttgatggacatggagtccgtggttttactaaaggaactgcccttaaagattttatgctaaattattttaatttagttaaaacaccagaagatttatttgaaaacagaatgcttgcgttcactaataaatctgtggataaattaaatgaaataatcagacgcagaatctatgaaactgaacggccatttgtagtaggtgagattgttgttatgcaagaacctcttaccaaggaacttaaatttgaagggaagaaattcagcgaaattcttttcaataatggtcagtttgttcgcatattagatgcagttgaaaccaccacgtttttgggtgccagaggtgttccgggtgaatatctggttcgtcattgggtattagatattgaaacctatggcgacgatgaagagtacgctagagagaaaatctgtgtcatctcatccgaagaagaaatgaataagtttcaatttttcttggcaaaaactgcagatacatataagaattggaataaaggaggtaaagctccttggtctgagttctgggatgctaagcgcaagtttcataaagtgaaagcattaccggcttcgactttccataaggcccaaggaatctcaattgacagaagcttcatttatactccatgcattcacatggcagatgcttctctagcacaacagttattatatgttggtactacccgtggtcgatatgatgtattttatgtgtgaggtaatatgtttgaattgaaattagaagaccttaagacactggtcattggtctacaagaaagcaaagtagaaaacccggattcacgtgaacgggctgttaatatgaaaattgattgtgtcttaatggaactacgtgacattgtaaataatgcggacgcaattacgtggtgcaccggatatgacccgaaagtctatctgagcgaatatgtagctcaacaaatttatcaaatcaaaatgcttatggagatgtaaatgaaagattttattattgactttgaaacatttggtaacgtctccaattcttcggtgattgaccttgcactaatcacctttgattctgaccccgaagttttggaaagcttcgatgaattggttaaacgtggtcatcgtattaagtttgaccttaaatcccagaaaggtcatcggttgtttggtaagtctactcttgagtggtggaagaaacaatcagctgaggcccgtgctaacctggcctcaacgcctgacgatttatcagtaattgctggaattaaagaagcccaacaatatctgattgataatggaattcatccatgggattcctttggctggtgtcgtgggcagagctttgactttccgatttttgttgattgtcttcgcgatgtgcagagagctcaagggatttctgaagaagaaattgatacatttaaagaagagccgtgtaagttctggaatcagcgtgatattcgtaccgcgattgaatcactgcttctgactcgtggtctgacaactactcctcttccaaagggtacgctcgacgggtttatcgcgcatgatagtatccatgactgtgctaaagatattctaatgcttaaatacgctcaacgctatgctctaggtctaagcgaagcaccaagcccagaagataccgatccgctgagtttacctaaggggcgtggctaatggaagagtttgagttcgatgaaaactttgaagagtggttcaaccgggaaatcctcccggaaatctctccaacgatggttctggtggccaaggctatgatggctaaagggtgggaagctgggtatctgttcggcgtagacgttggatgcgaaatttctcaccgataactatttactttatgaaagagccattatataatggctctacattaacaaactgagagaaacacgatgaaaaatttggttgtaggcgaaaacgttaaagtaattggtggtaagtgggttggtcacaacggtgtaatcgttaaagtagttaatcgtaatgacggtaaatctgggtataagatttaccgtgaagattttggtgattacatccactgcttgaaaaaattcgttgaatctagtgaaagctatctgcgcaagtgggtacatgtgaattcacttgacaatgttattacccaatcggtgagttctactaattcagccactaatctgtcgctgcataaaaatgttcttgtcactgatgagtgggaagaagacggtaaaaccttagtaaacgtagtgtttcaaggcaactatgcagttctgcctaaagctgatgtagagccgacggaatcacagcgtcaaggtttagtataaaaagttgtttactttaccacaaggatgtggtactattatcttatcaactactgaggagaataacatgaaaactgaaaacaccgtaaaaattactgccgaagcttttgaagacattctgttcaacccggacttaatcgttgttcagaaagagaaaaccttcggtaaagaagagcattggacctggttgtatgtattcgcgaaccatggtgatatcgtcccagttcgtacctttgctcgtgtaatcacagttgatggcccagaatacatggagattgtgtaatgaattttaaagaaggcgtacagtataaattcgtcaatgatgaagcagaagaagaattttcttcacgctatgaggttaatgaagactttgtgtatgaactctatgaaaatggcgggagttttactgttactaaagttgaccgccaaaataatagagtatcaggaattatgtgggctaatggcacagaatgtgatgaagtcggcggtgaagaccttgtaatttttgatagcgaattcaaatactttactgaagttggaacttccgcgaatgtaattccaaccgatttggttatgaatctttctattcataaccgtggtcaagcaatcgctgctattgcagcactgcagagtgcatatcaatgttaaatttagctcctatttttgaagcatcaaaattgtcttatcctattcctaaccgtagcattgggaatgtcatgctgcaactttcttcagaaactggagaaatgtgtgattggattaatcgtccatggcggcagaaagaagaatttgaaggcgagtgcgcagatgttattaactgtgtagtagatgcactttggcttcatttcagaaatcgtcataaaaatgatactcatgtatcagatgatgaaatctccatgatggttactcgtgcactgaatgagcaaatcatggtcaaaacacaaaaatggaaggatgctgttaatgccaatgtatgattacaagtgtgaagtctgtggaaaaagatagaaattatgcgtaaaatttctcaacgcgattatactatcgagtgcttcaatactggatgcgaaggccaaatgaagcgagtggtttctgctccggcagttcactacgatggattaaagagtggtgattattgatgggaactaaagcacgcattaccatgaaacccggagaaatccgggttattaaagtaggtaatataacttatagggttaaattaaaatgaaaaagattttaattacagcgcttgccttcatgatgattggatgcactgacgctgataacgcaactcgcgtgttagataacgcgggatttactgatatcaaaatcactggatataagttcttttcttgctcagaggatgattttcagcacacaggctttactgctattgggccaacagggaaacccgttaacggaacagtgtgctcaggactttttctcaagaacagcacaattcgttatgaataaatgaccttcgggtcatttagttgtttacatggacatcatgttttggtattatagtcttgttggccagaggagaatattatgattattggaatgacaactgcgcaaaggcgtgctaaacgacagttaaaaatggtagagcgggctattggaaaatacaggtttgcttggtggccaatcaatgacgtgaatggtcgtactatttggatgcagaaatattatgaggtctgtgaagaatggatttcacttaatgaaaataacgagtaccggattgaacagtactacggaaattctcgatatgcatacgctaacgttagtgatgctcaatggactatgtttgaacgacagcggccacgatatcccgagtataaagcggttaaaggaggccatgaggttcttggtaaattgatgtatatcaaagaagaattacttgctataattaatagttgatataattccttcactaaccgaggaaatgtaatgattaagaacgaaattaaaattctgagtgaccgagaacatatcattaagcgtagcggaatgtacattggtagttctgcgtttgaagcgcatgaccgttttctttttggtaaattccaatcagtaaagtatgttcctggtattatcaaactgattgatgaaatcattgataactctgttgatgaagctattcgtactaatttcaaacatgcgaacaagatttcagttgacattaaaggcaacaaaattattgtaacagataatggtcgtggtcttccgcaggctcctgtagtaacacctgaaggagaaactattccaggaccagtagctgcatggactcgtcctcgtgcgggtggtaactttggtgatgatgctgagcgtaaaactggtggtatgaacggtgtcggttctgcgttaaccaacatcttttcagtatcttttactggtgcaacatgcgatggtaaaaatgaaatcattgttcgttgttctaatggcgcagaaaatatctcctgggaagaacatccagcaaaagacaaagaattcatcaaagataagactggtactgtagtatcattcattccagattttagtcactttgaaagtacaggactgactgatgttgaccagtcaatcattcacgatcgtctgatgacattagcagtagtttatcctgatattgaattcaaattcatgggtaaacgtgttcaaggtaagtttaaagcttacgcccagatgtatgatgaaaatgcagtagtgcaggattctgatacttgtgctattgctattggtcgctcagatgatgggttccgtcagctttcatatgttaataacattcacaccaaaaatggtggcacgcacgttgatttagttcttgatgaactcagcaatgagcttattcctgcattgaaacgcaagtacaagcttgaagtcaacaaagcccgaattaaagaatgcttgactgttatcatgtttattcgtgatatgtctaacatgcgatttgattctcagactaaagagcgtttgacttctccttggggagaaattcgtagccatattgatattgattataagaaacttgctaacgctattatgaaatccgaagatattcatatgcctattattgaggcaatgttagctcgtaaacttgctgcagagaaagctgcagaaactaaagccgccaagaaagcgcagaaagctaaagtagctaagcacatcaaggcaaacaaatatggcaaagatgctgacaccactttattcttaaccgagggtgattctgcgattggttatctgctcacaactcgtgaccgtgaacttcatggtggatatcctctacgtggtaagttcatgaatacatggggaatgtctgctgcagatgctatgaagaacaaggaagtatttgacatttgtgcaatcaccggtttgacgattggtgagcctgctgaaaatactaactaccgaaatattgctatcatgaccgatgcggatgttgatggtgttggttcaattttcccaagtcttttagcgtttttcagtaattggcctgaactgtttgaacaaggtagaatccgctttgtgaaaactccggttattattctcaccaaaggtaaagaacaacgttggttctattctcttggcgaatatgaagaccataaagatgatttcaaaggttggaaacttcgttatattaaaggtcttggttctcttgaagaagatgaatatgaacgtgttattcaagacccggtttatgatgtagtatctcttcctgaaaactggaaagaactgtttgaattaattatgggtaatgatgctgcaccacgtaagacatggatgagtgaataaagaataaatagtaagggtactattgcccttacttagaaggaattaacatgcaacgttattggattactttgatctcaggcgactatggatatctgttcgctgaaaagaaacctctgcccggaacttgggttactatctgggtggaaaacattgatggttctaaacatgaggtttatggtcgagttagtagggtgtggtaatctaagggacctccgggtccctttttctttataagaatggatttatatggctttaatcaagaagtgcttggagatgattctaggattcttgcttaaagttatagtgatataatttcccctaaatcactgaggaaaatattatgaaacgtagttacatcccatcagaagaattattcaacgatgctatatatcgtgaatatcgtatcatccagcggttctttgacatccaagcagctgaggaattcaaagaacgcttcaaagaaatccataataaaatttttacaactaacaccgctactgctgaagagttacttgaagtagcagaaatcattaaacgacacaattgataggaataaaatgaaaattaaatgtgatgatgaagtaattattggttcttctgacgctgacgattcaacgtttaccattaaagcttcaggtaaagcttttgacatcttgtcaaataaactctataagtataaagttcgtgctgttgttcgtgaactttctactaactgcgatgatgctcataaactgaatggtaatgaaaatcgtccattttacatcaaagcaccaactcgtcttgacccgcgttttgtaattcgtgattatggcccaggtcttaatcataatgacatgatgacgatgtataaaacgttctttgaatccacaaagaataacagtaacgatttcatcggtgctcttggtcttggttctaaatcgcctttaagctatacgagtacatttaacgtagtatcatatcataatggcaaagccaccggttatactgtcatgaaaaaccgtggtgaacctactattcgtccaatgttcgttgatgacatgaaagaagacgaagaaactggtcttgaaattacagttccggttaaagtagaagatatcgatacctggcactatgaaatcgcatatattttgcgtacgtttggtgctgttcctccgaaggtagattctcttcgtcgcgaaattgaatatttcccggtagataagaccgactggttcagcgttaatagctcttacgaaagttatggtctgtatgcagtttatggaaaaatcgtatatccgattagcggtgtagatgttaaggcagattggctgcttaatcgttatggcaaggtttatgttcatttccctcttggcgaattagacattactccatctcgtgaagagctttctcttgacgaagaaacaattgctaatatccagaagcgtgtgaatgctcttgaagaagaggtaattaccgcagatattaaagcgtttgaagcgtatgaatctgaccgtgaattcctgcgtgagttcaataagctgagttctaaggaacgttctattcttcagagccgtggtattaccattgggaaccgcgatattaaacaagtagttgcgaagtataatcttgataaaattcgttcatattatgtagataacgaagtatcagtttatgtttcatgcgatgaacctgctcgtcgtaaagtgtcaagcagttcttggcatcgtcataaccaagtaaacatttctgatatttgcggggttgatagaactaaagcgtttgttcttattgacgataaagcgggtaagcgtattgctacggttcgtgctctgtgtaaatctgggttagttccaatctgggcacacattactgtaatcaaagacaatgaagatgaattacatgtcattgatgagctgaagaaaatcatggatactgacgaagttgtagtattccgtgtgtctgaacttgaagcccagagaaaagctcttcctgattacgacactggtccaaaagagaaacgtccaaaatcaccaaatgtttctctgcattggattgataaagacgggtactgggaagaagaccgtcagactttagtatcatctgaaattgctgagcttgaaggctatgctatcggtcgcaatcgtgatgaaatccacactttcccagataatgtttggtggtggaatatgagcatcacagatatgcgttctctggcagaagcgtgtggaattaagaaattctatgcaattcgtccgggtgctatgaaagctgcggcaaaagctgatggattgctttcatttgaccggtttattattgaccaatacatcaagtgtattgataaggtagactacgaccagtacatgccatcaaatgctactggaaaccgtatctgtggaaatattgcgcattacgataaattgaatttcttgtcgagtaagtttactgcgtctggaatgaaaaatccgttcctgacaaaactaaacaaaatcgctaaagtttgtcgtacaagtaaaatcaaagatgaaaacgatgatttagctttatgtaataaaatttataataaactgtctggtgatgctgagacaatcttctataaaaagattgaacagtttaaagatgattatcctgtcatcgcaagtgtcttggatacttggcggactgacagcaaactcgtcgatgatattgtaaaaatcatggagctccttgacggagcttctactcaaaattctgaaaataaaggtgaataaatggctgttacctgtctgtctgaaatccaaaaagatgcaatcgttaaaaacttcaaaaacggtctgtacactaagaaagagctcgccgagaattatggtgtttcccgtgacactattcggcgtgtgtttaaagagcgtgaagctcgagctgccgcggcagctgttcctgctaaagtagaagctccagttgagcgtgaatttaaatgggcagcaagttccaaattcatttcaattactgaaggccgtactacttataacgctgatagccaacatcctgggtttaaatctgcgctgcagaaacttgtagatggtgatatcgctggtgctattgaccacattaacctggaacaaggcatcaagaaattcgttcaaggtaacgtcagaattgaagatggtactttattctataaagatatcgagctgaaatccggtctgactgagcgtatcgttcgagccatggaagatggcgaagactttaaacgttatctgcctttcctggaaaacctgatgctgaacccgtctcgtcgtgcagtttatcgtctgtttgatttcctgaatgcaaacgatatcgacatcaccgatgatggtcacttcattggttggaaagtagttcgttccacttatatggactgcgcttcaaacacgtttgataactctccgggtaaaactgttacaatgccgcgtaaccaggtagatgaagacgatcagcgtacttgttccacaggtctgcatgtctgctctaaatcttacatcggtcactttggtagtggttctgaccgtattgtttcagttaaagttcatccgcgtgatgtagtatctatcccggttgattacaacgacgctaaaatgcgtacatgtggttatgtagtattagaagatgtaactgatcgttggggttcagaacttcgctaattataaggagccttcgggctcctcttttattatgggtgaaacatgattaatccatttaacgtatctcattctaaagttgttaatcttcgtggtactcatcatgcggctacggtgttttgccatcatgtggttaaacatgaaggtgatgttcactatgcttggttgcactgtgatgaactcgtagaacttggtgatgattttgttgtggaaccagacacatgtaaccacgacgatcgtgtttattttggtgaattacatatcagaggaatttatggcattgatgaacaaagccctgcagagattgaaccaactccggacatttaccctagatttgaataagctaaggggtgaagcaaaagtaaaaatcattgatactgccagatatagcttagatatcgatccatctcaagatagaattgacgttcttaaacgatgcagaattgctataccggcagagtatgtggtagcagattttctcgatggatacgtgaacgatcaagttgttgaccataataacaatgatccatacgaatgggcatgggatgtattagctcatccacattaccaaggtgttagagttgaagttaaaacacactttgttcatgaccgagcaaatcataagccatggattaatgttacgactggtaaagacggtctattccctaatggaagtggaataaatctagggcccatgtttaaacataaagtcgcagactgtataattatattcgttgcagaagaagtgtcccagaatgtcatacggtacacaccaatgtttgccggcggtatcgaacacctcatggaagtagtaaaaccttcacgagttggagcaggcgggtatatcatgcacaaattttaaaaagttgtttacttccgggattggccatgatactatggccttacaaactgaacgggagtaaaacatgagttacttagagctaaaatcacttcgagctaaacgtggaaatgcttctattaaagctgagcttttgaaagagtataggattctcgaatctatgaattggcattatactatcattgcttgtgataatggcgattcaacttacggcggattgtatcccaatggagccgctgcagctcgcgatgagcatatagataaagttaaagccttagaagaaaaaattcgtaacttgtgcatttaatggtttactttactgttcttcagtgatactataatcctgttagctaaactggagaacaaaatgaaaaagttacttacgattttgaagaacacctttgtagtattctgccttatcgttactttcattggtgttttcgcatgggatttagttaacgtgtggattaatgctttcatctgaggaaaatataatgattcgtagtagttttgatcgtcgctttaacttaatgagaactgttgttctgtcttttatcgttgcggtagcgctgggaattgttgctatattcgggttcggaatttattttgccattcatgctgtagatattattcagactgatggccttaaatctttagtagaaaccgtatgggaaggtcaaaaatgaaacgacacattgtgtatcgtctgctggcttcaagtcttcttgtattttgggttggtattgtgacagctgtagtagtattttggtaataggaggggcttcggcccctcatcggagaataaactttaattaactgaggaaattaacatgcgtaatattatgacttttgctgatctcgataacgctggtgcagaactgatcggttctattcgtaacggtgattgggcagcaggtgctccatctcgtgaaattactgagcgtgaaggattttatttcctgatgctcaatgatggcaaagcaggttatatcggtgcatctgctcgtttctttgtggctaaacagcgttcaaaggcaggatttgagagtgttctttctcacatccgttctgggcggtctcagttgggtcgtacccttcgttcaaactgtgtaacatatggtgtgttctggattcctgctaataaaatgaaaccgcttaccacaggttatggcaaaggtcaacttgcactggcgtttactcgtcagcattcaagcgacgcacagacttactctgagctgaatcgtattctgaatgataacttcatctttactttgcagaaatactaatgagaaccttcttcgtgatgggctatgtgtttctgatggccttaatgatttgctcaggaacattcatgtggtatggcctcgtgcctaccactaaagtaattggaagcattgcgttcactgcagcatttattatgtttgagcgcatttgtaaaattgtaggagtttacaaatgattaagaaactcctagtttctgccgcagttatttccatcattcttttggttttgtactatggaatgatttacggaatgatttatattgtgcttttcatttccgatgttatagtacaaatcggctcactaatttggtaggtacaatggatatttttgacactctattaaaacaagcaggttctatcgatgatttggctaaggcatcaaatcttcgtcatcgcgatttgaaatctatcattgataatgaagcaaaagagtatgcgatttacactgtagaaaaccgtgctattccgaacttgattgatgggtttaaacctgtacagcggtttgttattgctcgggctcttgatttagctcgcagtaataaagaaaaattccataagcttgcgtctgtcgccggtggtgtagctgatttaggatatcatcatggtgaaacgtctgcccaagacgctggtgcattgatggcaaacacgtggaataacaactatcctctattagatggacaaggtaacttcggttctcgtttggttcaatctgctgcggcaagtcgttatattttctgtcggatttctgacaacttccgtaaaatctacaaagatacagaaatcgctccagcacataaagataaagaacatgttccgcccgcgtattatctgcctgtaattccgactgttcttctgaatggcgttcgtggtattgcaacaggatattcaacttctattcttccgcatagttttgaatctgttttggaatgcactaaagcagcacttcgtggcgaaatgatggaacctgaagtacagtttcctaaatttaacggaaaaatcgttcaaacagaagacggttctgttgagctgcacggcgtgtataaagaaacttcacggaactcgatctatatcagtgaaattccgtacaagtttgaacgagcttcttacgttgaaaaagtacttgacccgttggaagatgcaggatacatcacttatgatgatgactgttctaagactggatttggctttaaggtgaaattccgtaaagactatgctttaagtgaagaccctgagcagcgtcatgctaaaatcatgaaggactttaagctcattgagaaaatgagccagtacatcgtggtaattgacgagaatggcaaactgaacgataagttcaaaacttcaggtgagctgattcgtcattttgtagaagtccgtaagacattcaccgccaaacgaattgagcacaaaatcgctgaaactaagcaagcatttaatcttgctcaggcaaaagctcaatttattaaagaggttattgcaggtaacatcgttatccaaggtaaaactcgtaagcagttaactaaagaaattgaacagaatgaactattcaaagaccattctgaaaaactcgtttcaatgaacatctatcacatcactgatgatgaagcgaagaaacttgctcaggaagcaaaacgcctagcacaagaggttaagtactgggaaaagacaactcctgaagccgagtatctgaaagacctggaagaactatgatagaattttatttaattataggttctgtaattgccgtattaggtctagttttattgctcctcagttaatctagggaacctggaggtcatctccaggtccttccatataaatctatatccctccaaaatccttccttagaatgccccaaattattttcacaaagttgtttacatgcttactcggttgtggtattatagcaatatcaaaacaacacggagtaaaacaaaatgattacatcattaaaatctgatatcaaaaacattctctatatttccactcaagccgatggcactcgactgagtcactatgtcaaaggtaacattgtggtgcttgatgtgttcgaagttaatcgcgagtatcctatgcgtcaggtaattcaagcaagtaactatgaagacggtgaagagtaccaagtcgttctttgtgtatacgatgatttctgggtgcttaaacttgaaaatggtgataagttcttgatctttaacgtataacatttttactgctctttgaagaaaattttcagagagcagaataaaatggtttacaactgctttaaactatggtattatagtctcataccaaacaaattgaataaaacatcatggagaatcacaatgtctaaagtaacttacatcatcaaagcttccgaagatgctctgaacgaaaaaactgctgctatcctggttcaggtagctaaaaaggatttcatcacttcttctgaactgcgtgaaatccttgaagaaaccatgaacgcaagttctgttaactcaaacatcggtgttctgattaagaaaggtctcatcgagaaatctggtgatggtttaatcatcaccggtgaagcacaggacatcatctctaaagcggcagttatctatgcagaagagaacaagcctgaacttctgaagaaacgcaatactcgtaaagctcgtcctctgactgaagatatgaatgagcacaaagacctgatgatgaaacttctcggtgagatggaagatatcttacctttgaaagaacttactgtttaccgcagtaactatatcgcagttctggaaaaacgcaccttcggtattcgtagtcttgaagttaacaacaaaggtactttccgcatcttcggttacaagatttctgaagagcatcagaaacacttcactgacctcggaatgtcttgccgtgtagctgcaacaggcaatacttacttagatatcgcccgtactgctgaaaacattgaaaccatcatccgctctattaaggaactgtaatgaacaagtttaaagtattgaatgaacttcagcgttgtgtagaaaaagttaacttgaatgctaatatcccaactgattgttgggatgtatggttccgtgggcactttatcggatacattgataagaaattcacaaaatgctatgctatctacaatgcagatggtaaacatatcatggatgtagataattaccaaaaggcactagctaaatttgttccaatggcggaagctgttaactcaatggaatggttagagaaaatacagggtgaacctgttattcaccagattggtattcgtgaaaagaaaagtttgtggcagaaaattaaaggattctttaaatgagcaagttttccgaacaaatgaataaatttgttgatgcttctcgtcacggtactctaattaatgagccagaagcagttagtattcctgaaatttgctttaaagtagctgaatggtgggatggacgattacttcaacgtcgtatcgtttgtgcagcaaatcgttttgaattgaaatctggtggaacaattgtagttccaggcactcgccattattccgctgatatggcgaacgtgttagatatgttccgtgacaaattggtttctgaccatgtccatggagacaatcaaggatttgttgaccagtggggcgagtacttcacacgtgaagaagcattaatcatcgctacacatgcaggtcaagttaatacagttcgtcctaaatcaggacccgccaatgaattattctcagaggatttatactaatgattattacattaaagaataacattacgcttttaaaaattcaacgtaaatcgcttcagcgctcattagaaatgatggacgataattggggtacatataccaatgaagccgggtttaaaatggcagacagcaaattcatgaaaactctcatggataaagaatacatctgcccgtttagccatccatttaatggcggtgctaaaccatttcttgctgaaatgtacaaaataatgacagaagaaatgattaaagatattgactactacatcaaggaacttgaatgtaaggaagataaagcgtgagagcaataagcgccaaggcagattacttcaatagcttaaatcgttcagaaaaggctcaaattaaacggtttatcttggaattgggatatgtgcacgctggagatttaaaagcacatatccaagaatgtggtattgctaagcgttttgatattacacgcaactgcttaaatgaggtaatttcacatgtacaacccagtagcgaagaatgactttaacaaaggaggcgcgcataaagataaaaagcgtgctgccaaagaatcaaaacgcaagcaaaaacataaaggtaaagacaatgcgcattctgaataattccaaatgtactactttaactattatttgtgatgacctagaagctctccataaaaaattagggaccattctggattagtagcagatatccattctgaactaatggaagacctccagaatgctggatatggggactggatggtacatgattggaataatggtacctttactgtagctattatcgctaacgttgaacctgaagaagttcttgaacaatttcagaaatgtgttgatgcttatgacattggagattatctatgaatactgaagctttacgcagagaagatgaagccaaggcatatcataaacgcgttgaattgctttcagcaattaaagtagaatacaccttacaagttaggcttaaagttcttaactcttgggctaatgacttagaagtaaaacatttagagcaagcagtaatgtctacgtttaacaaggaagcttctaagccattcagtttgtcagccgacttttacacgtatggaattattactattaaagcaaaggatagaggtgacattataagtggagttgagtatatcgaaagcattttaggtaatcgcggagaggtggttttagcatgagtcataacttagaatctgtcgttgaatcacaaagatatctcgaagcgttaatgaataaaatcgcgcttggaagtctgattgacttgtcttttcaggaggcaatggacgtatgtcactggttgaatcgtagggttcgtccaattggaaaggaatggtatttaacggctaaagtaaaagatggtcgctacgggctctggatgtcctctggtgctgagtatatcactaccaaggaagatttgaattctcgttgggaattggcataaactggtttacaacgcggtatcaagatgatactataatcacataatccattatgttgtaggaaaaataatgactaagtttgaaattgtccaagaaatcgttactgttgcttctattctgaccaagttcaatgctgaacatatcatggagaagcgagatgaatttattgcgttcttgaatgaaattggaatcaagaatgagcaggggcgtcagttaaatcagagcaactttcgtaaaatggtttctgagttaactgacgaagagaagagaattctcgttgaagaatacaacgagggatttgagtctatctatcgaacaatggctatgcatagtaataagtaatcacttagctcttccaagagctctaaccgcctgaccacatatcgatgttagtctttcgttagataatgcaggtttggaattgtaccagtacatttcaacagttccagcataaacattgtctaaattgaaatatggacagctaaacatgtacgatatttcaggcggttttctttttgttggtaagaaagcaaattccttatccgtccaaaaatatctacccgataaatgcgtactatattcagcagacgttttgtcgattggatatcctcccaggtttttagaatctaccgtgctaggtaaagtcccctcataagcaattaagtctacgaagtagttcaagtttttaggtctgaacgtaaagaccgcagaaaaatctgcaccacttgagatatgtactatctggagttgttcgagtgctatgttatcaaatcgggcatccctatccttttgaaccagtttatcatacttatcataagtactatcgacgtaagcagtaataagactatctgacttataaccagcaaacgctaacaatgctaaaagtacgacaacaaaaacacgggaaaagagaactcttcccgtggctccatctttgaataatagctcgagcaacccaagaaacatatcaaaaaatggtattgattgtttgcttgccatattgctctccttacagagctatttattgctatcttctagttataagaccttgccagtattggtcagttctgtcactaaaccagtttttaagcttattagcttcgtcatttgaagctatttgatagtttcttacatctccatccattttacctggagtaaaatcaaaggtagtgccatctgacatcattacccgaagatttattgcgtcgccatttcttattcccaaggttgtaccttgagggtcaccgttccaatagttaaccccaccttgtccagatacagacacaaacaaagtaacctctttaccttcaaagttaccctgtactgtattttgggttgtcggtttagggctccagttccaaccaccaacttgccatgaacctctataataaacgttgttccagttgcgatactgtactgttaaactaaaattaaaaacacttcgtcctatcatattggacatccaaaagggtgttcccaatcttaattttgctccagctgcaatcatagaagattctcctgtctcagccttagctgagcttcctacattaggaccagttactgccatgatatctcctcaaagatggggccgaagccccatagcattatttagatttaagttcttcaatttctgctttaagctctttaacagattcgactaataacgcaattactgcattatagtttaaacgaagtaatgcatctttatcgttatcagttgtaactgcttcaggaagaacttcctgcacttcttgtgcgataaggccagccgatggtttagtatcaccatttggaagctgtaaatcataaacattaccagatagcttcgacactttatcaagagcgttatcaatcttagcaatatttgatttcacacgacggtcagaacgaatttcaacgtcccagaaattaccaacaccttcaacgcgtagattagcagcactaccccagatttttaccccagtgtctgtgatcgttaaccattgatcaacacttcctgggttacccgctgcgagtgtattatagaagtgccaaccagcgcgaacatattcacccgactgccatgagttaaagctatcgaaaaacgtatcaccgcgctgtaaacgtattccatttacggtgtttccagtatctgtgtttcccggtgctaagtgggctaattgcagatatccatcatttctgaatacaagctctcggccactttggttacggataatcatgtcaccattttggccgttagaccaaataacgcctctggtgttaccagctgaatcgcggaaccagtagttagagtttttaccagctgaactggcatcacagtaaacattaccgtttttagcaaaaagaccaccagcgtcggttgtgtcagcggcgaccaagtttccagtagaaactttaagactgttgctaacatctaacccgcctcttagagtacttttgccatcaacttctaactgccatgtttttaatctggtgccagttacgtcaaggttaccagttacagtaccaccagctaacggaagatacgtgtcgccagcattactaatagcagaagcaaccttatcatcaacatatttcttgttggttaggtgcgagttatcagtaggagcttgacctgcaataacaaacttaccagaagcgacgttgatgtttccatcagcattaatcacaccgctgaagcgggaattgcctttaactatcaagtctgagttcaagttagtattacttgttactgtaagctgcctgttaatttgggcatttccgtaaacagtttggtttccgctagcatcaactttgaatatatcgctaaacgtgtcagcaggattaatttggttgttggtatttgcagataccataacggtaaatgagttagatttaccgatagccatttttcctggcataccgtttttcttgactaagccaatatcagagtttttgccaagaacgatcattctgttatcttcagatacattcaagttgcctgtgattttcgagttctgggcctcgaactcaccaccgacagtcattttaccgttttggtcaataactgtggcttgattagagctatcaccatttggtcttaaatgaagtgcctggcctgtttttgcgtagataacaaaagcaccagagtcgtttgaacgaatacccgggccatgggaccactcaagcagaggctcagaaccgttagctttaactctaatctcagacccagaagaatcaccgaatggtcgaaaagcaatatatttcgctgccgcggtggcggtagcagaagctgacataattaatgcaccggtactaccaccttgggcttcacgaaccatagcaccgttcttaaatgtgatggccggatcggtattactaacaccgttgacacttaatacaccaaatgccacggattgccattcaccaacaccgaggttattacgagcagaagctgcagaagttgctccagtaccaccaagattaatcggttgaacgccagatacaacttcttgccatgcagaccatgagccattttggcagtatcgaacatatgtgccaacagtggtgttattctttgtagtaaaggtctgcttacatgtccaatcgttatcagaaaccttacgcaaagacagaacttcgagaacaaagttaccatcagatgtgggtttgtttgctatcttagaaccgccgccagatgatacacatttatacagctgacgagtacctggatcggttcttttaatgacaagattattaaggtcaatagtcttatcagaaatatcaactgcttcttcagtgccgcgataggtctgattaaaaaccaaatcaccttctacatcaagaccgtcaggtttaactcggatgtacttgctgggagacggagtagcaactgcatcttgataaccaaattgcacgtatccttcaggagtaattttaagcattgctacggcagcgccagagccaactttacgtgcaagtgtcaatctgctatacttatctgagttctctgaacctaaatcaacaaatgttccactaggattttcaacctttaagttagcgttaatagtcaagttaccggtcatggtatcaccagtcttacttacctgcttattatccccagaaacgatgtcgtttttaatagaattcaaatagttgttaaggttaccgccaaacattgaaccagaggtgatgttcccgtctttggttagcattgctgccccaccaactttaactgctacaggaacatcaaggcggccgtcagaacggaagctaaaatcaccggcagaagtaccaccagtagtttttgcacgaatattaatctgacccaaatccgctgtatttggagttgcccaaattacaccgcgttcgttaccgtctgttctaaaccatacatgagcatttccgcttcctgcattaacatacactgatgcagtaccggtgccggaagcatgtaaattaggtgcagctaaatcaccggtcatggtatcgccggctttcttaacttgggtatcgtttgtcagattaccaagtcctacatcagccttagatggtttatttgctgttccgtaaagttcgttgtagttaacatttcctgcagcaagaccactgttgttagctgcatatacacgaactttagcactagcgtagtcgatattaatggctgacatggtgtcgccagcattcataaaaataccggagccatggctataaagaccattttgaacactaacaccagatttagtaacaccgcgccagaaagtaccaccgtatgcttttaaacgggttagcatatccgcgttagagacaatatcgttgatggatttaccaccattaccgcctaaaccgtaagcgccattttctaaaaggttaccagtgccttcaccgacatcgcggatggccgcagtgccaagacctaagttatttcgagctgctcctgcgctagtagcacctgtaccaccacggttaactggaagagtaccggtagtatcgccgaaatctggttttgcgtaactgtcaaaaatctgtttcattgaaacaagaatacttccagacggtccagtagcaccagtatcttggccagtttcgtagataattactttaccgctatcttgtccgttgtatccagcagtgtttagcactgtgacataaagcccgttgccataacgaggaagtttagcataaaaatcaaatgacgcatctgcgtcggtggcagcatcatttttaacaacgtaatactctggaacgtttcctttattaggagaaccaactcgacgccattcaacccagttatctaaattgctagtgctccaaccttgtaaattacgacctgataacgtgataaaatcaacgtagtgtttgccatgtccagaatcaatgccgccggtaatcattaaatctaactgtgaagacgcatctcctgggtgtttaattgtagctactttaacccaacgtggagttccagcggttgcagcagaaattacgtattgccatgcctgacgattgttttctacatttgtcagaagagtaccagatttaccaggacctcttccgttcatggcgtaatacacctgtgaatttctgaacgttaaattactgtcattagttaattgaagaacacctacacctcgttggtttttaatatagacgtcgttagagcctacacccatttcaagaacaagagtgcttccattgttaattttaacagttttattagtggataatcttaaatcgccaggaagagtagtattacctgaaccatcaagcaagactaattttcgggcttcaacattacctgcgccacgttgcacaaattggatggtttcagcaccatcgtcaatagtaccgatttcaagaataccgctattgcttgtaccaccggcgccgatgtaccagccatcgttagtagcgcatttgccgacgatatgacgcactattgctccgcttaaatcagtggcttcaaaattgatcgctttattcggagaaatagtaacgttgtcttttaacgtagtagttccatcaacattaagattacctgcagtatctaagaaaggaacacctttacctgcaagctgaacaacgttatcggcttcatctttagtgtaaatggcaagagtacgcccgtgtgtattcaacacgatttcgccacgggctacgatatctgcacctggtgctttattctctgtgctagttcttttaaattgtatttgttttaagttttgatcggccatggctacctcttagtatgtgccaaaatctattgttaccccgcgtgaaataacctgatctaatctaggagcatattcaccggatgttgctttatttactataactacgccagcgttagccctaagtacaccggtcatggtatcaccagctttcttgactgctgcgttagctacgttgctaacagtatttattagcccatcaacataatctttacgagttaaatcgtctacgccagatggttgttgtttagaagtaaatacgttagcggtaattctaccagtctgtgcagttaagttaccgtttttggcaatttcaattatgccgctggaatcttctgttccgccgccacgcaattggattgatgaatttcctccgataataagaacttcaccattactgccaccagctctaatgccaacgtttgctaacggacccatgctcagtttaccagaagctccatatgctatttttacttcgcctgcatatgtaccgccgcgggattttgacacaaagtcgttatcatttgcttgaggcttatctatctcagtataaacctttttacctctataagttagggagtttcctgccggcacaagaggaaaagtacctgcgtgccaaataggatttccaccaactgttgaacctgcttttaaatcggccatagtttatcctcttatatattttctatttatacgaaaaaaggaagcccgaaggcttccttagtctgatgtttctctgaacgattgaactggaataacaccgctcggatcgacttttgaatttggaagttccataatcactgtggttcctccttcaacgcctttattcattcttataccattcacaccaaactcctgaataacactattcaactgttcgccgtgagaagtttgaacaaatacgaggtttttgattttagagtcaccaactacagacgtttttggatatcttgatacaacaatagtaaatccatcagcgtccgtaggaacagcggtaaatctttcaaatcttaaccatctatcagctccattttttggaacttctaatgatacgtttgaagataacaaagatgagcctttgaaccatcgcaagctagctctagtagtagaacccgcatcaagaaggcttttagatgcatacatatcgcatactaaaaataccgaatccccaggagatagtccataatcagctattttgcttatagattcattttgtactggatatcgtttatattcgtatccagtagaatccgagtattcattggtatcttcaatagaacgataaggacatccagtatatcctacatcgcccacattatcatatacagtatctactttagccctggaatcttctttgactacaccgtcatttccgtaaaatgactcaattaatatgcgtccttttgctgctccgagcactccaacataggcagagtttggaaatgatttggaaaagtcagaacctggccaagaagcagaccacttgtttttaaaccatctgtctattaacggactggattgaaatcgttcatgcgtcattataatatacaatcctgaagttaatccatttgcatattctacaaacgctttgttattagcgttgttatcatcagtggtaacgtcaaatgtcttaaagttaataaatctgtcaccattaacttgaacaacattaatccccctccgtaaggaggaggtcatatcaaatgcaccattaatattcaattctggcttattaggaacagcattagaatgcgtagcataagcttttagccaatacttcacagagtttgcctcagagaggattcgtgtttccacgaaatcctcgccgaaggctgccattaaaattggttcagccattaatcacctacccattcaaatttgagagtttgatttggacggtctggccagattttaactggaccaagcttaatccattccaaaacttcaagggttttaacctgagttgatactgagcttggagctccgatatcagctgcagttggaggagtagcagatgtaaatactcgcatccaatcatcaaacttattaaggtttggattataaatcctcatccacacagtatgcgcgaaacgcttatcagcagtttcggttgttggaggataaggagtccaaagctgataagtgttgtttgtagttacaccaacctgagttaaaacaccgccagcagcagtcttttcttcatacccagtcactactaaagtgcttgggttagcagggtcaatcggtgttctgatcggaaccatataaccacgaaggccttttaacttagtagcgtctttaatttcagcagtccaagaaccttgtcttattacggtttcattcgttggtacataccacgattcagaacccgtaatgacgatagccgaactatttatgttaagattgccggtcatggtatcgccagctttcttgacataacggccgtcagctaatcttgcgtagtttttggtagttaaaattggatacgatccagttgaatcctgtgcaaaaatttgtgtatcagcgtcacgggaacgaataaatgcggactgtgattgggcaccgaatattgaattcaatccctcgacagcaagcatctgaacgtccttaaccattacagttccgccaactactgcatttccagaagacctcaaagttttagttgatacttcattaggaacgtttaatgtaccgtttccaccaaatgtgtaggtctggcttgtagcagtagttcctgttccatttttgacacgaacttttaagtttccggatgaagctgtttgtggctcagcataaattataccgcgttcagttccgtctctattttgaaaacgaacatgcgcgtttccggtgtcagcagttggagaaattttaacttcaccaccattagcatatataatattctggacagaaatattattgctaaatgaagtgtcctgactaaatgaccaagctccagaaatagtctgcgctatatcgcgacgagcatatttgtctggggtttgaccacctagcattccggtgtcataggctttaccaagacgaggcaagtaatgtttcaacgtaaggttcaattcatacggagacactgcgacgcccttagaggcatacccgttatccggaagagttgagccattggtatcattacctttccacgttccatcgcctgtggatagcctgacggtccctctaacgctgtctgtagcttgccatgactctgttacctgaatagtttgtttcaagtaagcaggaggaacaattctattacttagtgtgcctgcatcaacttgcgcctgtgtagcatactgagcaagaccgatagctccttcagttgctgttttagcatgtagcgtggcagcagtaactattttcttggcgtcggtaccggttctaacctcagcagcagtagcaagagtggttgtacctctttgggaagtacttgcttcctgtatgttgatggtataatggtcccagaggttcccagtaatagttaagccagaactagtattaacttggatacgatcagtattagcaaatttatcgaacagtaatttagggtttaccattactgtacttgaagtaccagcttcaaattcaccctgggcaccaggtgtcgcgaagcgagcaataccagtacgatcgttagttgctgtacggtcatttaatgttttaggtgtaactgctttattagtcacgccaccagcattaacttctgtctgtgtagctatttggattaaaccaattgctccatcagtagcaacttttttatgcaaagattctggtgtaacaaccgtaggaatatttgaagaagcaggagttccgtttctaacttcgctatcacttgctaaccaaactattcctgactgatttacagtagctttatactcacgaagagtttttggagtaactgcatttttgtaatcagaatgatcgaatataccggtgccagcagaagaacgatcagcagttgtgttaggagcaccaccagtttttactaactgaataacacctaaccgtgaatccgacgtagtacgataaagcaacttcttaggagtaacaattgtaaaatcgtctgttcctgcatccattttagcattagacgcaatttcagctaaacctctacgagtttcagtagcagatctttcgttaagctttttaggagtaacgattacgttatccaagtaagaagcagttgttgcctgattaacttcgccggaagttgcaattcttgctataccagtctgagtttcagtagaacgacgtccatttaaagtttctggagtaattgctaattctttttctggatttgactccgcgttggcttgagcttgcgtagcaagagcaataacacctaatcgtgctctggtagtattgtctttagcatcaactcgttctacggtagggtcagattcagttacaatccaatagctttttccggatgttttatcttcaatatatgcaagcccaagaacaggaacatacgatgtagttccgttaaaggtaatcgagcttgattgcacccatgctgcatcaggtggatactctgaacgttttggaaattgcagtaaattcaaattactcgcgatggtatcaccatcagaagctttaattactactgtctgtcctttacgcatataattcattgcgattttgacagtatccccaacagctacgtcagtaggtaaagtaatgttaattgttttaactgtactattatctgcgccaaatacagaaatatgctcattaggcattaaagtaacgtcagaagtaattattcttacacgtgtacgtaaatcattttcaaagacgcgccatattttgtcaatagcgtcatacaccaaaaatccactacctgaagtacgtacttgaatttccgtttgtccaggagtcccaattgagatagttgggtcaaacgtacgcacagtcatatggttaatcggcgatgtaccatcaaggtcagtaaaattgatgatatcgtttgaattagcgaacaacggcagagtaataaaaatctctgagttggaagtataacgacgaactacgttatcacctgactgaacctgggttggaacaatcccgttcggaactaccattttagcagtatcgccaaaatcggttaaacttgcacgccatgcaccattactaaacgtaagcataatttgtgaatacggacgagtaagtcttacttcacgtaagcgtgattcgccgaagacaatagatgcaccagtatcttgcgctttaataagaattccgttatatccagggcgtccaccgatatcacgaactacaatggtatcaccttcatcaggtgctaaaggtaacaacagcgtagcattaccggcagcgttcgagtcaacgttgatgaactggcctgattgaatttcaaactctcctttacggacggtataaatccagttcgggtcaacacgtaaagaagtccaattcgcctggttaaaatctccagcaggctttggaatatctttgtttgcaatccagatacgacgtccataagtcacagcaaaatcggtgagatacccacgtgtcgggtcatatttttggatagtattttcttgaataacgtactcgacggagacgccgtcggttttaacgttgcggtcagctagtgccacatttataactttatttccgccggcatccaaaccgtttgttgcacggaaatgttgtttcagtaaatcgctcatagagtctcctatggggttatgcttcattatagaagtatttataatggctgtactaactaattgaacgaggttcaaatgtctgatttaaattgcttattcgccgaagaagaccaagtaaaagaaggtgtcattctgattgacttgtcgcaaatcgcaatggcgacaattcttcatacgtataaagaaggtgacaaactaaccactcctatggttcgtcatcttattctttctactttaaaatttaatgcttttaagtggaagaaagatggatacactaaaattgtcatctgcgttgataacgcagttaatgggtattggcgtcgggacgtagcatattattataaaaagaaccgtgctaaagcccgtgaagaatctaattgggactgggaaggttactttgaaggtcttcgtactgtaattgatgaatttaagcagtatatgccttattatgtcattgacattgataaagctgaagccgatgatagcattgctgtactgaccaaaaagttcagtcttgaaggccatccagtcatgattgtttcttcagatggtgactttactcaattgcataagtatcctaatgttaagcaatggtcaccgatgcagaaaaaactggtaaaatctaaaactggctctcctgctttagattgcatggttaaaattattaagggtgataagaaagataacgtagcttctattaaagttcgttcagatttttggtacacccatgttgatggcgagcgcactccttcaacgaaaatgacgtttgttgaagaatgtcttgatgctggcgaaaacatcaaagatttgcttactgaagaacagtataagcgtttcttggaaaaccgtgtgttaatcgattttgattacatccgcgaagacattgttgctaacattttagattgttataataactatcaactaccgggtcgtggtaaaatttatagctactttgttaaatccggtctgtctaaattaatgaaagaaataaacaacttttaaggtgaatataatggctaagaaagaaaaagagcaagtagtatttgatgaagcagtacacggacaggctctgcgagatatgattaaggaagcctcaggtaataagctaaaagcagaaagctatcttgagcttaacaaagacattaaagaccgcgccaagaaagaacttggcgtagaaggcaaattatttaatcagctgcttgccctgttccataaaggtacacgcgatcgttttgaaactgaaaaagatgaagtagtagaagcttatgactctattttcgcttaaagatgagggggacacatccccctccgaatccattaaccagctgctagataagcaagctaatggatttgctatcgaatctatggtaacagaacttggaatggggtatctcgaggcaacgacacaatggctagaagaaaattctattcctgagggaaacttcagtagatatattccacctgcaatcatagaaaaaattatgtcagaagcgttagaagaaaatatgcttcgaccatcatttagtcaaacacataaaacgaatagtctggattttttattatgattcgtctacgcatgccccaaaacaataatagatacgttaacggtaagagcgtttatcttttatatttaatgctcaaacaacacttcgctggtcgttatgatgttgttaagtataattgggtcatgcgtgtctctgataaagcttatcaaaagcgcagagacaaatacttctttgagaaacttgccgagaagtatacgctaaaggaattgactctgatattcatgagcaatcttgtagctaatcaagatgcttggattggtgatatcagtgacgctgatgcgttgatattctatcgtgaatacatcggtaagttgaagcaaatcaaaactacattctctgaagatgtaaagaatatttactactttgctaagaaagttaatgtagataagcttcatgatatttttgaatataatgagaaagtcggaacatcttatgtgttcaaacttctccagtcaaacgttatatctttcgagacattcatcatgcttgactcgtttttagatataataaatacacatgatactgcaacggataacttagtttggagtaattactccactaaattaaaagcttataaaaaacttttaaacgttgacggtgctgaagctaagaaactctttattagcataatcaaatcttgtaaagaaattagtatataattaatctatcgtccagttgcaaggacccatgttgcaacaacaactgttaaattaaaaaggtaatcatatgttcaagcgtaaaaatcctgctcaacttcaacaacaactggctggtctgaaaggtggttcttctttctctaacgaagataaaaacgaatggaaactgaagaccgataatgctggtaacggtcaagcagtaattcgcttcctgcctggtaaagatgaaaactctctgccgtttgtaaaactgatcaatcacggtttcaaacacggcggtaaatggtacattgaaaattgtacttctactcacggtgattttgattcttgcccggtttgtgctcatctgagcaaaaacgattcttataacagcaacccagctgaatataagcttctgaaacgtaaaacttctttctggtctaacatcctggttattaaagacccggctaacccagaaaacgaaggcaaagtattcaaattccgtttcggtcagaaaattatggacaaaatcaacgcgatggttgaagtcgatgttgatatgggtgaaactccggttgatgtaacttgtgtgtatgaaggtgcaaacttcgtcatgaaagttaagaaagtcggtggtttccagaactatgatgaatgtaaattccttggtcagtccgagattgcaaacatcaatgatgaagaaactcagaaattcctgaccgaaaatatggctgacctcagcgaaattgtggctccatctcagtttaaatcgtttgaagttaacgaagccaaatttaaacagattatgggtacagcagctcttggtggtgccgcggcaaaagcagcagctcaagccgataaaattggtgatgacctggattcctttgacaaagacctgtctgattttgaatccaaaccgacctcttctcgttccgcagacgatatcatgggcgatgctggtgacagtgttggcgatgacgatctgaatgatattttgaacgacctctaatataaagggaccttcgggtcccttttcttttatcccctccaaaaatattttcacaaaattgtttacaagccagttgatgagtgatactatatctacatcgaaacaaaacgagtagaggaaaacatcatgggtaaattaaacattgatatcgtggcagaaccttacatcaataaatcaggattttgtactgatttgatttttgaagatggttcacgtttttatgacactgaccatggtattgattttgatttagttattaaagaaggccctggtggcggttggccaaatattgacctccgtggttctaaagaagcggttcgtgcttggttagaagcaaacgagtgggaagatattgatttgattatggaagactggaaagagtaattaccgttggggacttcggtccccactttgaggaaatgataatggcacaagttactgtagaaatatatgattatgaacacttcattgaaaccgttgaaaaatacggtttgattgaagttagtaacaaatctgccccatggggaggaaacgaaatcacggtagaaggtgatactcctactctatggttatggcttgaacaagaatattttcctggcatggatgatgaatgccgtgaagatacattaacgacttttagcgggtaaattatgaaactgaacacagaatatcgcattatcccaagtcttgctgccgagtgggacctttcatctagcggaaatcgccggatgcgcttgatgattgaagagcatggtggttcgttctttcctactaaaatgctcgacgaagataatagtttcatcacagaagtaaaatttaaagatggaacaactgctgacgctgaaggatttggagacgcatactttgaaatctctgattatgaattcaaatacttcgaaccagtatatgaaattggtagtgaaatcaaacctggtcctactcgcttggacttgatcgttaccccagaaaatgcagaagaaatgattgacttgatcaaaaaagttttcaaaaagtagtttacaaggagctatgcttgtgatagtatagctccataatctactggagaataaaaatgaaacttcaacgtcaaagcatcaaacttggttctgaatatcgtggtaaatggaatttctgcatttgcgacaaaaacccagaagaattagagcgtgttgaagaagtactgtgccaaatggaagctccattcactatgggcggtgaaactgtctattggaatgactactgtgataactgcccatgctatgaagatgggtatggctcaggcttctggattcctgttgaagatgttgaagaattcaaaaaagcgtttaaacttgctaaggccaagaaatgattgaggctgaattagtagttttgttaatttctgttactgccgcttttattagcggcattatactaggattatttttatatgcctaaaattagtgtaattggatatccacgtgttaatattcgctgtcaatttgatgaaattcctggagtaactcatattgagctcgtatttgacccccattcccgaggcaatcaaatttcaggtaaaattgattcagcgtatggtgagtttttaattgacgaccaagtgattatttcagctctttctggcaatcaagcgggttcgttgtatattctgaaaagggaagtatttgatgaaatttcagaagccataaaagaaggatttaaaactcttcagaacatgattaaagctagtgggtacaagtcatgtggattttaactgactgggattgtaagtactgtggcggtagcctatggcaattaggtggccggtgttttaagtgtggaatgaggcaaggttaatggaaaatttcgcagtagatgattatgatgatttgatttggtgggacggacgcgaatgggtaactatctgtgcaatgtctaacgttgatagcgctatcaaacgtctccaagagcttcaacagaagtgggaagacggcattgttgaacgagttgaattttgctgaggtttaaatgattcaaatagtttatgcctttgctcctacaaaaactgtagacggcaaaaatgaaaatgctttcggtttaggcgatggtcttccatggaaacatatttctcaggacatgaaaaactttgctaatcgtactcgagatactatcttgatttgcggagcaaagacttttatgagttttcctaaacctcttcctggtcgtaagacaatcgttgtccaagacatgagtcgtgcgttggcaactgctaaaaatggcttctttgcagatgcttatgtaagtgaattagaatttatcggtttcttgggtggtgacattatggccgctcatacttcttacaacagtactatcacttttaatagagaccttaattattctatcataggtggtgctggaatcatccagaaggcatatccatacgcggatagggttatccaaacaatcatcagaaaaagtcatagagtgaattctgatgtcactctacctgctgaatttgtagcagctcctacttggccagaatcaggattcattactaaagaaaatcactggtatcatattgatgaagtgactaacatttcagaggttgtctatgagcgcaaactatgatatcactcagctatcagaagataaagtccaaaagaagtggaaaggatttccatttaagcatggtattcatcttctagtttttagttataatggtcttagcacttataacggttcaactacagtatataaccgaaatggaaatatacctattgaaattgaacgtgattataagaagatgttcatcggaatgtcacatggcaatgtgatggtcaaagatgatgtagtgtctattattgggcgatttgaaaagcgtggtaatcagcttttctttacacctcttcaggaaaaatttaatgcgtgaataccaagaattaattaaagacatttttgaaaacggttatgagacggatgaccgaactggtaccggcactattgcgaagtttggtactcagttacgttttgatttacaaaaagggtttcctgctgtaactaccaagcgtcttgcatggaaagcgtgtattgcagagctgatttggttcttgcaggggtctactaatgtccatgaattgcgtcttattcagcatggttcattactagaaggtaaaactgtttgggacgacaactacgaaaaccaggcaaaagacatggggtattccggtggtgagctaggacccgtgtacggaaagcaatggcgtgatttcatgggcgttgaccaactaaaactagtcattgaccgtattaagcaattgccaactgaccgtcgccagattgtgactgcttggaacccggtcgatttggataaaatggcattaccaccgtgccatctgctttatcagttcaacgttcgtaacggatatttggacctccagtggtatcaacgttctgtagatgtattccttggtctacccttcaatattgcgtcatatgcagcactagttcatatcattgctaaaatgaccaatcttaaacctgggcatttggtattcactggtggtaacactcacatttatctgaaccatattgaacagtgtaaagaaatcttgcggcgagagccaaaagagctgtgtgaacttgaaattaattattggcctccagtaaaagataaagaatttcatgaattagcaacagaagaacaattagcttgggttacaggaatgatgaaaccatctgactttgttcttaaaggatatgaatctcacccaacaattaaaggaaagatggcgatatgaatattcgatttgttcgcaaaggacatcagtctaaaacaatattaggcgagatgtgcgatgcattctctagtgatttgcctgaagttaatgacacaatagtttttgacgggactgaacaacgtgttttatctgtcattaaatcatatgaatggtctattggcaaaacacaattaatctgttggtttgaagttgatataacatgaagatatgtcgggtggttaataaataccattccgacttcgatgtaaatatccaacgtggtacgatgtggggtaattacgtcggtaaagattgcgataatcgtcctgatgctattgcggcatttaaggacgattttattgctaagattcggaacggagaaataaagcgagagcacttagaaactttaagaggaatgagattaggatgcacctgcaaaccgcttccttgccatggtgatataatagctcttgtagtgaataaactttttaaagatacatttgaattagaggacttatgcaagtaattaagagctcaggtgttagtcaagaatttgacatgcagaaaatcattaaagtcctcgaatgggcgtgcgaaggaactaaagtagacccatacgagttgtatgaaattattaaatctcatctgcgtgatggcatgagcactgcagatatccagaagactatcgttaaggtagcggcgaatagcatttctattgatgagccagattatcaatatgtagcatccaatgcagcaatgtttgaaatccgtaaacgtgtttatggacagtttgaaccacctgcatttattgaccacatttcccgatgtgttaacgcaaataagtacgataaagaaattctaagtaaatggtcagcagaagaaattgctttgcttgattcttatattaagcatgagcgtgatttcactatgacttacgcaggaacaatgcaacttatcgagaagtatctcgtaaaagaccgtcacactggtgaattgtatgaaactccacagtttgcctttatgctgatcggtatgtgcttgcaccaagatgatggtgaaaatcgtttagcaaacgttattcgtttctatgatgcagtttctactaaaaagatttcattgccaactccaattatgtctggtgttcgtactccgacacgccagtttagttcatgtgtggttattgaaggtggtgatagtcttaattcaattaacgaagctgctgcgtcaattacgaaatacatcagtaagcgtgcaggtattggtattaatgcaggtatgattcgtgcagaaggttcaaaaattggattcggtgaagtcaaacatactggagttattcctttctggaaacacttccaaacggcagttaaatcctgctcccaaggtggagtccgtggtggcgcggcgacactgtactatccaatctggcacctggaagttgaaaacctcctcgtacttaagaacaacaaaggtgtagatgaaaaccgtattcgtcatttagattatggtgttcagattaataacctgatgattgaacgtttgattaagaatgattacatcactctgtttagtcccgatgtgtgtcttggtactttgtacacagaatacttccgtgatgcccaagcgttccgtacattatatgaagaactggaaaagaacccagacgtaagaaagaaacgtattaaagcccgtgaactgtttgagttgttccttactgaacgtgctggtactgctcgaatttacccgtacatggtagataacgttggtgaatatggtccttttattcgtgatgtggctacggttaagcaatcaaacctctgcctcgaaattgcgttaccaacttcggatgttggccaagaagatggcgaaatcgcgctatgcacactcgcagcattcgtactcgacaacttcaactggcaagaccaagaagaagttaacgaaatcgcagaagtaatggtaagggctctggataaccttttggattaccaagactatccagtagacaaagcgttaaaagctaaagaccgtcgagcactaggtgttggcattactaactatgcagcttggttagcaagtaactttgcttcatatgcagatgctaatgatattacccatgaaatgatggaacgtattcaatatgcactcatcaaagcctcagttaaacttgctagcgaaaaaggtccgtgcacgctttacaaagaaacacgatacggacgcggtgaactgcctattgactggtacaatgaaaggattgaccaactcgcagctccaaactatgtctgtgactgggaactcctgcgagaagacctcaagcgatatggtatccgaaattcaacgttatctgcgcttatgccatgcgaatcgtctagccaggtatcaaactctaccaacggtattgaaccaccacgtggaccagtgtcagttaaagaatcaaaagaaggaagcttcaaccaagtcgttccaaatgttgaacacaatgcttccctttatgattatgcctggcagctcgcgaaacagggtaataagccttatctgaaccaggttctgattatgcagaaatttgtagaccaaagcatctctgctaatacttattacgacccggcgaatttccctaaaggcaaagttgaaatgtcggtaatgatggacgacttgctttatttctggtactttggtggtaagactctttactatcataacacccgtgatggttccggtaacgatgatatgattcaagactctgctgactgcgcggcctgtaagctttaataaaagggaattataattagaccacggatggttaacaccacagaataggaaatagaatgagtacagtttttaataccaagcaagtagatatcatgaccgaaccgatgttctttggttctggtctaggaattgcacgctatgatattcagcgtcataaagtattcgaggaactcattgagaagcaattgagtttcttttggcgtcctgaagaagttaacgttatgatggaccgtggtcagtttgaaaaactcccagaacatcaacgcaatatcttcactgataacttgaaatatcaatctcttcttgattcaattcaaggacgagctccagcagcagttttatctgcacttatttctgacccaagcctagatacttggaaccagacttggacgttcagtgaaactattcacagccgttcgtacacgcatatcatgcgtaacctatatgtagacccagctaaaatctttgatgaaatcgttcttgacgaagcaatcatgaaacgcgctgagtcaattggtgtttactatgatgatgttatagcgaagactcgcgcatgggaaaatgccaaaagtcgctgctttaatcaagataatatcgaaattaaagaagctaaacgtgatttaatgaaatctctttatctttgcttacatgttattaacgcattagaagctattcgtttctatgttagttttgcatgtaccttcaacttccataaaaatatggaaatcatggaaggtaatgctaaaatcatgaagttcattgctcgtgatgaacagcttcatctgaagggcacacagtacattctgcgtcaacttcaaactggcactgatggcgaagaatgggttgagattgctaaagagtgtgaacaagaagcaattaaaatcttcatggaagttaaccgccaagaaaaagattgggctatccatcttttccgcaacggtggtcttccgggactgaacgttaaaattcttcatgacttcattgactatctgactgtatctcgcatgcgtagctgtgggctgccgtgcccaatcactgatgcaccaactcgacatcctattccttggattcgcgaatatcttaactctgatgcagtccaatctgctcctcaggaagttgagataagttcttatctggtagctcagattgacaatgatgtcactgatgatgttctaattggatttaaaaagtacttataaggaaaggggcttcggcccctctttattatgaatgatattgctaacgagttttcttttataaaatatgttcaacttgagttagaaccagattttaccatcaaaccaattttgatagcaaacaagttgaatgtagtttatgccatcgtagttgatgatgaactagtttacattggtaagactaaaaatcttcgtaaacgtataaattattatagaactgctattaatcggaaagaccaaacctctgattcggctaaatctgccaagatttttgaagcactaatggctggcaaaaaagtagagttctatgctcgtcagtgttttaatcttttgattaataatgaacttggcgagatgtcaatatccactatggacttggaagaacctcttctgattaagaagttcaatcctccatggaacacacaacatactaacaaagctaaatgaactatgttaaagtatatgataacctaatagcaaagggtaaattacgaggcaatgataaaagaaaattaaactattatactgaagctcatcatatcattccaaaatcattaggaggaaatgacgatgtttctaatttagttttattgactggacgtgaacatttcattgcccatttgctattatcaaagatacataataattctaaaatgaattatgctctttggatgatgtgtaattcttctggaaagaattttaaagttcattccagattttatgaaagctctagaataaagcattctaattatacatctaacttattctccggaaagaaacgaacggaagaacatagaaagaatttatctaaagcactgaaaggcagagtaagtcccactcaaggaaagactcatgccaaagaaacacgcgaaaagatatcaaaatctttaaccggtaaaacacaatctgaagaaactaaactcaagcggtcagaaagccaaaaaggaaagaaaaagcctttgtacagtccatgcccgcattgtggtataataacttcaaaggccattgctatcagatggcactacgataattgcaaacataaggtaaagaaatgttagagctatataaaaatttaatgaatctgtgtgaaagctcagaagttgcaaaattcttttataaagattttaccggtcctatggatggtaagttcagagtgttttcatatcactacgcaagctacagtgagtggttaaaaccagatgctctcgaatgccgcggtatcatgtttgagatggatggcgataccccaattcgaattgcttctcgtccgatggaaaagttctttaatttgaatgaaaacccattaacgatgggaattgatattagcgatgtagaatacattatggataaggctgatggctctctagtatcatcttatgtcgatgatgggtatctataccttaagtcaaaaacatctctctacagtgaccaggcaagacaggcttcagctttgcttaacagtgaagaatattcttcgcttcatcaggttattcttgagctagcgctagatggttatacggtaaacatggaatttgtttcacctaataatcgtgttgttttagcatatcaggagccacagctgtttgtgttaaacgtccgtaataacacaactggtgagtatattaaatatgatgatttgtacgctaatgctaagattcgtccttatttaattaatgcttacagaatttctgaccctactacctgggttgaaggtgttcgtgaacttgaaggcgtagaagggtacattgcagttctaaacactgggcagcgatttaaggttaaaacagaatggtactcggctcttcatcacactaaagactcaataacgtcaaatgaaagactgtttgcgtctgtcgtatctgcaaattccgacgatttgcgttctctttttgctggagatgaatacgcaattaagaaaatttctgcgtttgagcaagcttatctagattacctcagaaagtcacttgagctatgtcagtcgttctacgatgaatacagaggccgtgctcgtaaagactacgctattgctgctcagaaagccacggttaatcagcgccatttgtttggtgttatcatgaacatgtacgaaggaactgtagatgtagataaactgcttaaagacctcgaaagggtgttcttgaagtactgggcaggatatgttccaaaagagtacgaaaaagaaattgaaatttctgaagaatagttgtttacatcctcatcagagtgtgatactatacacttacacaaactgatgaggatattgaaatggatatgcaagcaattactttagatatggttgttaacaaatatggtactcattctgatgggatttttgtgtggaatggcaccaagaaggtggggttcgtcactgacctacggacgcacatggcgcgcaaggaagctgctcgtaagaagcaaaaagagtacactaatcgtgtgaacgagcagcgtgccgaagcccttcctgaagccgtagatgaaatgattgatttcctagataatcatctcgcgaagtatggtgcagaggtgttcaagaacatcacccagccaaacgttcatgctaacggatgcaaatgctatgtaatcgttgacccgatttatggcaagcatcgtcttggcattatgcatcgcgagctgaattattctgagatggcagaatatgtagaagcttgcttcaagtgttctccttcagaaagttctgatcgtcacatcctcatttcgggattatcccgtgatgatatcgtagaggttatccttaaactatgctcaaaataaacacaacttggttgatgattggagtgttagcattatccgccgccggattgaaatatctttcgtggcgggtagaaaatcttaaagctgacctcaaagtcgtccaagatgaatctgatcgacaagcaaaagaaatagaaaatatcggtgtttctataaaaaatctgcagacaacatataaaggctatcaggaaaaccgagcagctcgtgatacttccaacgctaaaatgaataaagatgctaagcgtggaaacgtagttgcagctaaacctgggttagttgaaaaacagattaatgcaagcttcaataagtttgcagaagatatccaggaggctaccagatgaaacgaagtctattagccatgggtattatcagcttacttgctggatgctcttctagtgcaccggatgtcccggttttacatcctgagtggccagacccaattcaaaaatgggaaggacactgggaagtaaaagtaattgacggtaaagcctgggttggtatgccgtttgaagagtcgcaagaatatcgtatctggatgaatgacattttacgatatactaaagatgctaatggaatgatatgttattatcgttctgaacttaaagaaccacgttgcgttaagtgatggtattataatgaaccgagagcagtatgaaacacttaaagggttaattgctgaaaatgaattggcgtgcatcgtgtttggacgcgcagctgaaaattatgacaaaaatgatatactgtcaatgaataagccattgcgagcaattaaagaaaaatatcgtgctaattggggtgaaaagtctaaggctcttcatgattttattgacactcttaaggatgtataatgaaaaaattggttttgacacaaggagctccaggctctggcaaaacaacctgggctaatgaatatgtagcatctaatccaggttggtatgttttgtctcgtgatgatttgcgtgaaggcatctttggccttgataaacgcaatgattacaaatattctaagcttcgtgagaagtcagtatctgtatgtcagttttctatggcgaagactctactcgagatggaaaccactaaaggtgtcatcattgctgatactaaccttaatccaacgactatcaagaagtggcaagagttggcatacgaaattgatggtgtcaagtgggaaattaaacgctttgacgttccttggactgaattgcttaatcgtaacctctatcgtggcgcgaatgcagttcctattgaagtgcttcgtagcttttattctaagatgcacccatatgatttgtacattccagacgaatcattgccaaaagcagttatctttgaccttgacggcacgttagcagataacaatcatcgttctccttatgacttggccaaatgtggtaaagaccatccaaaggaaatggtaattgaatttcttaaaatgcttcgtaacaaaggatataaaattcttaccgtttctggtagagagtctggtactaaagaagaccctactgtttatcaacgcattacgaagaaatggttgttggaccatgttggcgaaacaggcgaacacttccaacgtaagcaaggcgattcacgcaaagacgatgtggtaaaagaagaaatcttctgggaccgaattgctgatcgttataatgtaaaacttgcagtagatgacagggcgcaggtagttgaaatgtggcgtcgtatcggtgttgaatgctggcaagtagcccacggtgatttttagaggaaagtataatgtttccaaagtattccgaagtagtaaaagtatcatttacgcaagttgttgctaatcatttaacagatgagtttactccatctgaagtagccaaaatgcatgcagagtttttatctgccatgaatgcacttgttccaaacggcgaagttattaaattttctattgaccggtcaggtggttcatctgaagttaaaatttcttgtggcgaaggtgaacacgactggtttatcgttggaattattgctaattttgaaacccaacaggttgagacttatgttgtctgacgctaaattttcacatgatgaatttatttcgaaggttaaaatcttcgcacaggaagtagcaaaccgggttcctggaagtaaagtgactctccgacgagagtcatcctttaactatgttgatgcttatatcattacagttaataatggaaagagcaatcaacacactcaattggctttaaccggaacaggccaagttgaaatgactaacattttaggacatatctaatgactttacgtgaagcggtagaagctcttttaattgaacatgctcgtggcattaaagcagaaatcagcccaaatggtattcggctgatcagtgctgttattggttctgaccaaggtgtttggtcaattccacgcgaagaatatgatgctattttgtacagtaacgttgatgttaaggaaggccaacctctttatggttatgtcttttccgatgttcttgaacgaggaaatcatccatttcctgatggtactggtgttcgtacttctcgagtagagagttttgcttctcctactgacgagttaaaattggttaaaacaaataacacaacttatctggtgatttaaatgaaagcgtcgacagtactacaaattgcgtatctcgtatctcaagagtcaaaatgctgctcgtggaaagtcggcgcagtaattgaaaagaacggacgaattatttctactggctataacggttcaccttctggcggcgtgaactgttgtgaccatgcagcagaacaaggttggattggtgaaattccttacaaatctacgggattgcgtcaagacggattccaagtcaaaaaagtcggattgctcaaagaacatcgagcagcccactctgcatggtctaaagtcaatgaaatccatgctgagcttaatgctattctttttgctgcccggaacggcagtagtattgatggagcaacaatgtatgtcacactgtctccatgtccagattgtgcaaaagccatcgctcagtctggtattaaaaaattagtatactgcgaaacatacgacaagaacgaacccggttgggacgatattcttcgttctgctggaatcgaggtgttcaatgttccaaaacgtaatttggataagttgaattggtataacattaaagaattctgtggaattgaataatgaaacttagaattgttgaaattaataaacttaacctaagcggtgatgttgttatatcatactcagtagaacgccggtgttggtttaaatggaaaccattagcaacatttaaatttgaagatcaagcagttcgattattaaaagaattatccaagcgcaaatctgtaattatcaaaactattaaagagacatcaaaatgaaactgactactgaacaaaacatccatatccgtgaaacacttaaagctgtgctgagcatgggcgaatcccagattgtgtttgaaaaagctgatggcactattcgtactctgcgctgtactcgtgataaagatattattccatctgatttggtagaaagtactactaaatctgctcgagcagaaagcactacttcacttccagtatatgataccgagaaagaaggttggcgctcatttacctttgataaacttatctcggtaaatggtatgaaagttgagcatctgctgcagatgatcggtaagtaatttgctttaaactgaccatgttaatataactacatggtcaaacaacaaaggtaacacatggaacttccaattaaagctctaggcgagtatgtaattctcgtatctgaacctgcacagcaaggtgatgaaattgtttctccttccggtattattcttggaaaagaagaacaaggacaactgccggatatgtgtgaaatctattctatcggtgatgatgtaccgaaaggatttgttgaggtaggcgatttgactccactgcctgttggtaatatcagaaacgtacctcatccgttggtagcagcaggtgtgaagaaacctaaagaaatccggcagaagtttgtgacttgtcattataagtccctggcgtgcgtatataaataataatatgaattgggcgtcggaaattagttacccgagcaattctaagcggtggatgcccgagctaaacctcggttaccgtccaccaaattttaacctcatttgaggaatgtttcaatgaacaaacaacttactaaagctctggaactccaacgtaatgcatggaattccggtcacgaaaactacggtgcttcaatcgatatctatgcagaagcactggaagttctgaaagggtttaaacacctgaacccagcacaagctgaatttcgtgatactttagaagcgatggacgaactgaagtatgctaagcatcttggttctgctgctcgcaaagctgttcgccactttgtggtaacgctgaagtaatttgtacgcccaccatgtgtacgcatgggtaacgtatgatgtggacgttgttggttatccccacgtaaaacatccgaaaccaacggtgatttgctaccaaagtgcagctagaaaataaacggcaagtgcatgctaccccgaggcgatggccaatcgggagtacgcctcaaggcctatacatccatcggtgtatatcttatcccccgataaatcggacccggaacctttaagctaacggtgtgcaacagataagagtttaaacgtaccccttgagggcctgcgggagctacaaccgaaagaactgtcgaaagaagttgaacctcggaagaacgtgctcccatgtatttctccaaaatggaagatgataaaatggctaaacaagctaaagcaaaaactgcagtaaaagaagttgttggtacctctaaacgcgctggctacaagcgtgggtcgaacaagcgtatcaatcagacggttgagaaaatcatgcgtcgagctcgtgcggttcttcgcgatgatgcttctcgttttggtaagccgaaagcataagttcagggactccttcgggagtcccttttttattttccacagaatgaaaaaagttgtttacttccagtttcaaccaggttactatagacctgtaccacccaaacggacaacggagaataaaaatgaacttcactaacttcaaccgcaaatacgtacagaacaatgcttgggacgtttctactactttgctttgggaacataacaatggtacagtagctcaaattgatatgtactgggaagataactacgtattcttcagctttgaaaatggtcctactctggatattcagttcaacggttctgaaatcaaagttggattccatgatgaagttcgtaaacgtgatttatcttcacatccgtcttggaacacaaatcgtcagctgcttgttaaaatttatctgcgccacatcctcggtcgtaaaacaaccgaagaacaacgtgaagcaatctgggatatcgtttcaaacgaaatcaagttttaactaactcggggcttcggccccactattgaggaaatgataatggaaaaaggtaaattctataagcttaaaaagactccaatcttgtctccaggcgctcttatcaagggtgtttttgagcaaatcggtaataatccgattaaaattaccagaacctttaaatatgcggaaaacattggattaattgaatttgaaatcattaagcctggtggagagcgcgaacgagttatagtagatgaaccccgcttttctcacatgtggtgtattcttactaatcaagagtttcagcattattttgaagaaaccaccaacaaagaacctgaacctgaaccgaagaccgatgatggaagcaatgattggggcgtttggacctcaaataaaggaaatgatacctacaagggtggattgacaaaggaagaagctgttaatcttgcaaaagtacaacgcctgaatgcaactaaagacacaaaagttgtaatcatgcaaccttttgctgtccctgtggttcacgttaatattcgtccgttttaagaggaaattgaaatgattgtatcagctttctatgattcacgaaagaaaaaagttgaaaccattatcagcgatactcgcgatggtacacctgctaataaaaatggtgtgaaagcatacattgataagtattgccctcctgaatttcgtatggttgatggcgtagattctctgagcattaatgttataaatgctaaaattgaattcattaatgcaactatgccaattgggtattctgacaatgatggttcaaatgccaaaatgccaaaagaaaaattcataactaaattttgaggaaatcatcatgattgtatccgtgcctaaatctaaagctggtattttttcttgcagtttgaaaaaccacccaatggttgatatcatgtcagctaacgttaaacaacacaccgttgagtatgaaattgatgctccggatttctttgaattgcctgaatgggcagtgagacttgatgcatgaaatatcatatcttcagtacagtaagattagcaaatggaattcctggagttgtatgtgatacggctccagccattaaagcctactcagttgaaccgtggtatgaagttaattgggttgatggcaatcgttcaatccatgcagaatccgagctttatccaattactcagttaagggctgctaacgacgatgtctattaatcctcacttcggtcatatggttgcccgacgtatcaccagggaaatgctaaagactgctgagtattataatatagaattaattgatatagaaccctcggacgctccagggttaatctggttcaatttcaccggtgccgcaaatagcgtcgccaaatttaaacaagcattgaggaatttccccgaatgtcaaagccagtaatcacaaccgatgttgatggaatcatcgttaagtggcaaagtggtctgccttactttgcccaaaaatataaccttccggtagagcatatccttgatatgatgactactgaaaaattcattaaacccgctgagctgtttgattgtgaagaagaactagctgttaagctgcttctgaagtacaacaacagcgattttattcgttatcttgctccgtatgctgatgctttagctacagttaataagctcaaagaaaaatacgattttgtagctatcacggctcttggtaattcagtagatgctaaccttaatcgtcgtttcaatctgaatgctttgttccctgatgcatttacagaaatcatggtctgcgattatgatgaatctaaagatgctttactggaaaaggctaaagtaaaatacggcgatcgcatcgtctgttatgtagatgatttgcctaaacatattgctgcggccagcaaagtatttgaagacaccgaaactcgggtgttttatatgcctcgtggcgagcgtgaaggttctgtcactgctcctggaattttggtagaagattggcatcaaatcgtaacttgcctggaatctctgaaatccgttaagaaacctcagaagtctctttccggattgtgggaagaagctatcaaagaccaaattcgtaaagagcaacatccttttaattggcctccacggcaagttccaggagattggtggaaacaacctatcattccgtttagtcctggtccacatgttcctcctggaaacgactggtggaataacggtcgtattacatgtgataaccaccaaattaattgctaacaatctgggtatggtataatagccataccctaggaggaaatatgtttgtagttcatactaaggttggtaaacgttggttatcatgtgattatggtcatgttaatcagttttatcgttggaatccaatttggcgtgaagcaaagtcgtgcccgatttggaatgaatgcatcaataacgggtttgtttatattgatggattaacttatcatcgtagtgtaagcgaactttcaaaagaattaggtgaataatgatttttgatatcatcaaagcaattgaagatgctaagggttctaaagccaaaacccaaattctcgttgacaataaagataacgttgatttaaaacgagcttatctgctggcgtattccgggcgatttaaattctttattaagaaagttccagaatatactcccgttaaatatccaaatgttccttcaaagacgttttctgatggtctagattacctccaagacattctggcagcacgagtacttactggtaatatggcaatccaggggctagtagatttgctctctaagatgaatgagggcgatgctagtgtactggtacgggttcttcttaaagatatgcggtgtggcgcttcaggttctattgctaacaaggtatggaagaaattaattcctgagatgccacagatgttagcatcagcctactctgagaaagcgctatcgtatattaagttccctgcatttgctcagcttaaagccgatggagctcgatgcttcgctgaaatccgcggagatgaattagatgatgtaactcttcttactcgttccggtaatgaatacctgggtctagataaacttaagcgtcaacttatcgagatgaccaaagaagcccgagaacgccatcctaatggtgtgatgattgacggcgagttggtatatcatgtcgaagtgaaagaagaagaaaacgacctgtttgatatgtttaaagagcctgagcttcctgagctaagtaaagctaaggaattccaacagacggctcgtacagaatcaaacggcttggctaataaagcaatcaaaggaacaatctctgccgaagaagcagaaggtatgagattccaagtttgggattatgttccgcttgatgtagtatattccgaaggtaaggttcctggatttgcttatgatgtacgtttccgtgcgttggaaatgatgagcaaaggctatgacaagattattctaattgaaaaccatgtcgtacacaacatccatgaagctcgtgctatctataagacatacgtagaccaaggtctcgaaggtattatccttaagaatatcggtgcttattgggaagataagcgttctaagaacctcgttaaatttaaagaggttatcaccgtagatttgaaatgtgtcggttcatacgagcataggaaacaacctggtaaaatgggcggcttaatgttcgtatcagaatgtggtcgtattcgtgttaacgctgggtcaggtcttaaagataagcccgaagaactgcacgagcttgaccgtactcatctatggaaaattagagattctcttccaggaactatctgggaacttgaatgcaatggttgggtaactgctgaaggccgtgatgatggtacagtagggttattcttacctatcattaaacggcgtagatatgataaagaagtggctaatacattcgaagccgcgtttggtgttaactttactgaggcaacaggaataaaatgaaagttttatacgaagtgattgctaaatctcttgacggacgtggtggtatttctgttcacacagaagttcttgagtttaataacattaacacattaagaaacttcaaagaaaacattgaagagtatgagtctgtaaatggactacaagtttggcgtacagtaacaataattaattaaggccttcgggccttttttcgtataaatagaataaacaaacgaggatatgtcatggaacttttaaatgaagttttcgatgaagagaatagtaaaatctatcctgtcgagaacgttaagccaaaacttaaggtaccacaggtctttttgattaaggtgccaggtaataacaatttaatgattcggttagtacaagggtcaggtcaaggtgatgcagttaagaacatcaagatgggtgataaattcatccaagtctatgttttctctgtatccgaaaaaggtaacatcggtgcgcttaaaggtggtttaggccaagacccgattggtgctatcaataccatttttgagaccgtcaacaaagtagttaagcaaattaaagctgatgcggtaatgttccgctttaatccgaagaaaatgcaaggacaagataaagctattcaacgcattcttgctcggttgattactactcgcacaggtggtcgtttcaatctaatgaaagatatggcttactacaaaggtaagtatgcttattctattatggttcgtaaaggtaagaaacttgaagagattgaaggaattcctgaaatttcagaagaactttacaccaaagtagattccaaagtaggcgaagtttatgtgtctaaagaaaccggcgaaaacgttaccaaagccgaagcattggctaattccattggcgaaaaagaagacaagaaatctgaactcgctgtaatgagtaaaatgaaagtgtctcgaaaagatttaatccgagcacagtacggcaaatttgtttcatatgttgatgaagattggccagaaaataaacgtgaacgctggtacgaattaactactaacactccagtactaaacgcagaaggcgatacggtagacctccaaaaagatatcaaagccggattagaaaaatcaattcctttttatgttgatgatatcaagcactatcgtgttcgtggcggatatggaagtaattttggcgatgcagttgagagattatttgtaggccaaatgtcgagaatgcatgacgactggaaggttttcattccttcaggttcagacaaaatgaaaatcgctgaacaacgaatttcagacgttgctgacgttattgctcaagctaaaaatccggcatctatggaaacaatgcgtaaaatcgttgaagtagctactcgtggatttgatatgcctccagctgacgatttcggagctttacgtcaataccaaaatcttgtcaattatatgatatccgcttatgtgtcaattgttggcgattctatatccaaagcaattgaatataaccgtgaaatgcattctcgtttaagcgaagaagaaagagatgcaatacatcattactgtggttctggttattcatttgttaataactatcttattggtatggaaagcttaggcgatccgattattgacaagaaaattcgtccgctcgattctgcctttgaaaaaggtttgcgtcttgaaccaggcactcttttgtatcgtggtcagcgaggaaaatatgaagactttaaagataacattgagtctaaaatgttttatttccagaactatgtttctacttcgttaagtccaattatctttggtgcttattcaaatgctggtgattcattaatgccagacgcacctagttctgatttagaaaacaaagaaacaactattgatgcagtatcttccgttattggaacagacaacttggaaagagttgatagaggcgaggaagttgcctatggtgatgagtttaagtttgggttcgttattcatggggctgataaagttaaggtagttatcccgggtgtcttgtcaagctttagcgatgaggctgaagttattcttcctcgcgggttggcaatgaaagtcaacaaagtatggggaactccttttagaaatggagttggtgtagcgaataacaagacattcatggtagaaatgacggtagttccgccagagcaaatcgatgaatccgttcatctctatgatggtgacatcttgatggaacaaggaaaagtggaacctcttgaagaaagcaagttcaaaggctttttaaatgagatttacttttcgccagaccgttccacagataaggttagctacacacgtaccatggagctactggctggtgctatcaacctggatggtatcccagaaaaacttgcataaagttgtttacttatcacaaggatgtgatactatagacttacacaaaccaatgaggaaattgatatgaaacacgtattccgctttaacggtattgaatggtctgctgatgttaaagatgcagagaagtttaacgaagaagtgcttatcatgcttgaagggtttaacgaaggtactccgacggttcttattcaagatatcttccgtaagccaacagagccatcgtttgttgaagcggttcttaacggtaaagcagaaggtattattcctgttaaagtagtttggactactgaagaaatgaaacttcttcgtactgagccagggtttattggctgcattgcataaaacaaaggggccataaggcccctaaattattctgcttgttgaagtagtgatattagaaattccaccacctgccccgcctaaacgagacaatcttgaagcagacgtactcaagctttgatttggattaatcgtctcaattttctgaatagccttatcttccaaccaatccatagcggcttgttttccaaccgaacctgtttgcatgctacgatatgcaaacgtgacatcaaacactgctatcgtgttttctccatcatatgtaaattcgggagctccacacgctacaggcatagcccccgagaacaagcatacagtatgaggtaatccatttctagcatgaaggttaacttggatatcacattctacgtcttgcggcaatcctcgcagaccagtcaccgggtcttcaactgcatttacccaatcttgcattgctctatagttgcttgcttctgggtccatcctaaatgaaagaaccagcggttccatatctcttcctgtgatttttatattaggagcgttatggaacttatccatttcatatgataatctgttctctggtattttagcagaataaaccatcaatcctgctgtcggaaatgccatattaaagaaatcgagcagataagtacctaccgtaaattctcctaataatgactgtacaacacgctgtgtcattgcgccaatcataaatgtattcacacctgatttgcgaacaacctgtcgagttccttgtgtcactatggttgttataccctgattgaattcacctggtgtcaatccaagccaatttccatctaaacccatattattatacagctctccgccaaagtcgttcagaagagcctgggttttactagagggtacagtagcgaatacaacagagaacatattagttctctggaaatcgatatcagccgcttgactcttaaattcttcgagagtaaacattattcaatacctccgatataaacgttccctctattaagagtaagtatttcacgcatagtaatttcaagcgtaaacgtgcttggaagattaggagcgattgctaacccattaaaatggccgttcggcgttttatcaaagcgaatgctttgaatttggcatggaccaaatatatcctctctaccatccattgatgtagaatatccaaaattacgaacagtccaaatcgttgggttagaaactacaataacattgcttaaaaacgatgttatttgctcaaacactgtgttttctactttagctccatccggtgctgccgatttaagtgttcctttataccattcatcaatagcagctttaacttcttttgcgtatgatgaatttccagtcacaccgtaagaatagtagttaaaaatttcatagatgcgaataatttgtataaggtcatctgcagacctaggagttaaatcccaagtaaacactttcgttctattatcaggcccggcatacatactacgggcagtgttataaatttgctcaccgttatcggccattaatccctgtgttaaagattctatcgacccaaacaccgcagtagaagccacgttgcttaatacgccagtagcagtaccgccgcgcgtaacaagagaatccccaacatcattaaatttatggctaactgaatcaacgtctgacttagaccgcggtaatagaatattagctaccggcgcagtacttgtagtagaacttgatgaattagccagtgctgacattggtgaatcgaatacagacgataacattacatctcgtctaaatgaacgcaaatcaggagtagttcttcctttaaaatcatacgctgtgaataataatccgttacgatacaagtcgtgtactctcatatcttgtgcggaatcgtttccggctgagcgttcggccggaaactgcgccaccttagtggtaggcgcattcgtcagtttagatttaccttgggaaattcgagttcctgattttttgatgttttcaaggccatcggccagttcttcaaaaatcattgtttttccttaagaggttttcatagcgccttgcattccaggagcagctgttgaagtctgtggaggcgttctataaacgtatgtgctattcttatttacagcagtattaacctgaataggttgcgactgtgtattagattcacgtgtacgagcagcttcacgactatccgcagcggctttaatagaagcagactgtttaacctcaggttgttctgttgcaggtatagcttcggcagttggagcaggttctgatattttagaatcaaggagtttttgcaattggtctaattcaacctttaaatcttttgcaacctctggagataatttctccaattctttatatctggtggttgtgctttgtactgcatccttagcagagtctaatcgagtggaatcagatgcgtcagttttttcaacgtacgcttttgttcgcttgagttctgcttcagcattattacgagctgtgatgattttgaggcgttcgtcttctggcaagtctgcatacgctgactgctttttctctccgctcagcaatttattatattcatcgtcatcaatctgaccggtgaatttttggaatttagcagaaagctttcttttccattcaggttgttcgtcatattctctttcttgacggtcaacatattttgctctcattttagcatcttcttcatctagttctgctccagtaacagtttgaaatctgtctaaagcagcgccttcaatgttatctgccgaatcgttaaatcctaatgcgcgtaacattccagcaagaagcttactcattccgagcataatagtttctccgagcttgtcaattacatcaaccaatccagaacctatggctttagctaatccgccccaatcccctttgacgaatgattttactatttcattcgacatctcgcttattgctgttaatagcggaccccattctttggcttgcttgttaaattcaacaaagttcttttcgaacagtttagtccaataattaaaatgaactttaattaaatctataagcattatcacacccaaaaccatggcggcagttttcgccatttgagccaaagcgctaacagtatagctaaatagcatgctgctaatcttatctgttaatgaaatagtttttccaaaaccagatttaacgcttttaattaattctccaaatttcaagtcaagaaactttttattcttatcctcagtttctttgttaggttcttttctttcctcttgctcttctgtgttaggaaagaaatccgcgtcaggacgtctatcatcctgtggaggaataagcctttcgagtaattcctctagcggctgctgaaccggagcatcaggtacttgttctgttatcgtttctaatgatgttccagtaccagttttttggacatcttgttgaacatcatgctttttagataacaagtcagcaagcttcgtaagtttatcattaattaatgatgcagtatcatttaatttcgagacagcatctgttgtgcgttctgaagcttcggcagttaattcaacaccagctgaaacatcttctactgatttgataatttcatttgatttagtttctattacatccgaaatcaaatcagtagacgcttgttggtcgtctaagcgacgaccaatatcttctagcgtattaatctgagcatcagcttgagactcagcctttttctgtggagccgagtcagcaataactcttctacgcattgaattcatttctgatttcttagtcattcaaatatttccattacgttaagcatgcctttgattggtccttcaggtccatcaatggctatagtgtttactaagtcatcagcccactttgtcacaaaagctggaagcttcataaagtttatatccattggttttccatctactgattcaagaaattcgctcaaaattgaatctactgaacctagtttggaataacgaggaggagctctgaatttgaattctttaccatctaaccgctgagttaatcgttggcaaatgtaaactttattcaaatcgtaggtaaaatcatctttaacaacggtttcttttattcggttgttaaatgctaataaatgtagtacaacgatatcggattcggctgctgttaatcctggacaaattgaatctaaaagaagattcatgttttcgtctggtcccttaacatctttcatcagattatggtgctttaatccaagttttggaattgatatcgtcttttcgtttattactattttcttaataggaagaatcacgtttaagttcatttttcaccttaatcaaatctacaggttcaagggcagagccatttgtgaacatatataagttagttatagatgtgttatttgatatttcatggataacttcatctacataaaagtcagttctgaactggtcctttaaatcaacaaaattgattttcattccaggagttagttcaaaattaccgtaacatttagtttgagcatacccgtcatattgagccatcgtagaaatgcgtagtgcttcttcatagccatttctaaaaatcatgtcagaatatccgcctgacctattaatgaatacgctgttttggccttctccattaataattcgggtaacatctttgtccacaaacgagtgtgcataaaatgttgcgtttttcatgggatttctattatatctgtttgatttaacaagccattcaaaatcccatgccaatggatattttaatcctgctgcaaactgacctattgtttgaggagctccaaacatgaatacatttgggttctgggatatcattgattcataatccatcatgttaatcccagtgatatcttcccaggcaaaaataaattggtcgttatcagtagaaatgcctacgtttctaacatatcgtaagtaatctttgagagtactagtccatggaactcgtgggacgtaagcgttaattccgttgataggaggagcaatcaatggttggtcaacatacatcgcgcctatcatttcctttatagtttcatacgcagaactaaaaaacgctctactgaacttgagattcattatgtcatgcagcgttccaagctgaagggtgataatgctatcacctttatcatcaacaccaactgtaaagtgtttaattccgtaaattcgagtttgcgttcttgatgtgttgctatttgcaacagatatttgaaccagttcatcaccgttcatacgcgtgtgcatatttttcgaatcataaaactgaagtagaccttcattagtcccgcgtaatgaatctctcattgttaatgtaataaatgtagctgctaattcaacgaatctattagctagccacgcatcatatccagaatataattttatgcttatattaggatatcctaatctttgtgttgtcatgatttaaggtccttttcaataagcgataaggttatgccacgttcgataggcagcattttcattatagaattcaaatcgtatttaccttgagaaaccaatctatggttaatctgataaaatgtgaaaatctcgtcaggatgtaacaatagcttaaaaatatcgacaatgttatcatattttaatactgtcgtggtatcacagcatgatgtttttaattcaaaattaaagggcttcatctgtgataaaatcttttccaaggtttcaacatctatagcatcgataacggtcaatttattgctatcgctcaattcattccatgtgtattccccagatgaatccttcacagatataatgttgtctaaaatcattttacctgtatcgtcaattatttctataggttttttgaacttgagcgttaatcctgcaacctctacttttggatttatcaacggaggctgattaagattaaaaagatactgcttatattttccgcattttgggcacttcattctgactggtattttagttttaccaatacttgaaagaaataccttaagaaatatataaggacgatactcagcaggatggtcatgaaaataatcatccattaattctgctataagttgtttttgttcttcttcagacttggtgttcatgtcgtttctaaccaataaaaggtctctataatcttctacggtaaatggcttaaaacgttggacaccatctggtaattcgcatctaactatgttggccataaggtaatcctctttatactatttataaataattgaataagaggagtggatatgaacatcacatataaatttgaaacacgaataaatggcaagaatatccagtgccgagcttttacactagaagaatacgctaatttaattgcagcgaagaaaaacggtacaatcgatgaatgcgttaaagcattgctcagagaatgtactaatgctactggattaaacaaacaagaatcggaattacttatagttatactttgggcgcacagtataggcgaggttaatcatgaggtgacctggaattgcacctgtgggcgtaaaattcctgtgccattaaattatacacatgcgcaaatcgatcctccagaagacctctggtatgacttaaagggattcaagataaagtttaagtatcctaatctttttgacgattccgacattccaatgatgatatcaaaatgcatagattatatcgtggttggaaatgagcagatttactttaatgatttaaacgatgcagaaatcgatgatttatattctgctattacaaccgaagatgtagttaacatcaaaaatatgctattgaagccacaggttcaattggcagttcccattacttgtgaatgcggaatttctcacattcatgtaattaaggggcttaaagaattctttaagattatgtcatgagcaatatcgataaactatattctgaccttgacccagagatgcgacttgcttgggataccgatgtgtcaaaaacagtaggagctcgatcagttaaaaatagccttcttggaataataaccacaagaaaggggtctcggccatttgacccagagtttggttgtgatatcacaaacgaattatttgaaaacatgactccgttaactggtgatacgataaagcgtaatatagtctctgccgtgcgtaattatgagcctaggattaaccgtctatcagttgatgtgcttccgttatatgacgataacgctataattgtcaccgtgcagttttctatagtagacgaccctgatacgctagaacgtatacgcatacagatgcgtagtaatgctaactctggcggcagagtataatgggactagtccttccaaagaaacagtagagtggagatagaatgagattagaagaattacaggatgaattggataatgatttgattatcgaccagaccaagttacagtatgaagcggctaataaccctgttctgtatgggaaatgggtgcgtaagcactcgacttgtcgaaaagaaatgttaagattagatgctcttaaaaagcaaaatcttaaagcacggttagattactacaccggtcgtggagatgtaggtggcgaagtatgcatggatgtgtatgaaaaatcagaaatgaaaactgttttaagcgctgataaagaaatcttgggcgtagatactaaattgcaatactggggaattctactggagttctgtagcgatgcgatggatgctattaagtcacggggttttagcattaagcatattattgaccttcgtcagtttgaagctggcgcgtaataaataaacttgtaaactaaggagacaatcatgtcgaatacggtatgtgtcgtctgtaaaggaccaatcgatgaagcattggttgtccaaacagacaaaggcccggttcatcccggagcttgctataattatgcgattgaattgcctgtcactgaagacacagaagagcaattacaagaaacgcagcttttaatttagtctagtgttgatgtagccaattggctttgccccttcctttcggttggggcttttttgtattagaagtcttcgtcttcgtcatcttcagaatcagcttcaagagcttgtctacgccccgccaaagcatcacgcacaatgatatcatcagaatcagcaagagtagtttctttagagcgtttatcgtaatacttctcgagttcttccagaccatctaaggtctggcaagcattaattttactcatgaagttatcgatagtagcctcacgaattgtggcttcataaatatcttcaaatttaatcatagatttaccgttttcattacgtagttaaatttttcatcagcatatcgttgaatacgctctaatgcatgttttaagcaatagtttaaatgtgtgtatttctttttagcattagctgacttcggctttacaccgaggtcgtcaatgatatcccagacagtagctaaagatttgtctttgtgtttacgaagaacacgaccaattgtttggagaacgataatcttcgatttaacgggatgagctaaaattacatgatgcaggttttttacagaaatacctgtagagaatacaccgtaacttgcgacgataataattccctttccgttttctgccatagcctttaaagcattacgtgtttcggtattaacttcgcctgatacgtaataaacttgctcatgaccagtagctttaatcatctcgaatagctctttaccatgagctacatgtttaaacatcacaaaggcattttcgtcacgcgctgcaagtttagtagcaagattagcaatccaacggtttcttttcttaacattggtgatgaatttaatttcttcttgatacgtttttccttttaaagcatttgctgctgcatctggatatcttaagaagattgtattaattttaagctcagttacttgtccgtcttccattaacttagaagttgataccggacggaagatttcaccaaacataccaacatattgcatgatattagctttgccgtctttaagagaaccagacagtccgtacttaaacatgcaattggtgagacccgcaatgattgttgaaattgacttacccgttgcaagatggcattcatcattcatcatcatgccgaattgagaaaaccattctttaggctgcttaacagcggtctgccaggtagatacataaactaatgcattcgaatcacgagcagtaccacctcgaatacccagcatagcattacgaggaaataaacgataatcacaaaaatcatcaatcatctggtcaactaacgctgtggtaggaacgatgataagaattttgccttcgtaattttctacataataacgagcaagtaatgcctgaataagagacttaccggcagacgttggaagattaagaattctacgtcgattaactagaccttcatatacagcatctttctgataccagtgtggctcaatcttagttaatcctgaataaatttctttagtcgataaccaattgtcaaaatcctcccgtgaaagagtttcttgctcgaatatagttggatcgaaataaactttatatccgaattggtcagcgaattttctgatttggccaacaagaccaaacggtaagagacgattataatctagcagacgaattcgtccatcccaatgtccatagcgatacttcgggttgaatctgtatccatcggcttcgaagctaaaatagtctctgagttcatagaaaatcgagtcatcacactcaatatgaacatgactaaaatctttaaatttgacttggatgtcgtgcactgtactatcctcagttataaatacaatcatatttatacattacatgaggcacacccaatgctagataaagactatattaaagaaattcaggcactcgataaaaaagaagctaaagacaagctcgacgaatatgccaaaaccttcggtattaaactgaagaagacccgctcatttgacaatatggttgctgatttggaaaaagaactggctaaattggccgatgagcctatgccagaagacaacgatggtctatcaattgctgatttaatccaagcagatgatgaaattgaaggaaaagcacttttcaatgatgaagcgtctgatgaagcaaaactactgtttgatgctccagttaatgctggtattaaaattcatgatattgacccaggtttctataaagaaacccctaaggtaaatgacccagggtttgaagtaaaaacaccttctatcaatgataaaggtttttatgctgaagctcctattggagacagcgttattcatatagatgatgaaggacaagttaccaatattccggttagtatcacggaccctgaagaattctccaaagcaatggacaaagtagttaaaattattaaaacagacgaaatcattgagcttcctgaaaactttagtccaaatatgcaattgctaggtaagaacccaggatatattactcttccatggtggatttaccaatggattaaagataacccggactggaaatctcggccaacgtcgtttgaacacccatcagcacaccagacactgtttagtttaatctattacatcaaaagaaacgggtctgttatgattcgtgaaacacgtaattcttcatttgtaactttaaaataaggaacacctatggcttatagcgtatctattgctcctttggctgcttcggcagtcattggagcaacaaccaattttactgcaacaacttctggcgccgcagttgaaggcacagaaacgtttgtatggacagtaaatggtgtaaaacaatcttctgttaccgcagctatgaattatgttgctgcaggacctgcaggtagtaagaccgttaaagtagttgctactgttactccggctgaaggcgatcctgaaacggctgaagcagaaactactctgaccgttaagaacaaaactatgcctgcgattactttaactttgagcccaacttctgtttctaaagaaattggtcaatcccaagtagtcacagctgatgttactggcgccccgtcaggagcaagcattgcttatgtttggaaacgtggctcttctgttatttctggccaaacgggtaaaacaattaccttaaccgagtcaacagaaactagctacacgttgaattgtgaagtaacggtttctgctccagactataataatggaactgcaactaaaggtattgctgtcgcttttactaaaaagaccatgagcggtgtttctgttactctgacgcctagttcaattaccgctgaaaaaggagcagaagcatcttttaaagccgatgttactggagctccagcgggagcatctgtagcttattcatggaccaaagacggttctcctgtcgaaggctcaacaagtacgctagaaattgatacatctactatcgggtcgcaggtaattgaggtttcggctgttgtttctgctccagattataaacctgtcacagttactaaaaccggtaatgtaactattactaaaaagaccatgagcggcgtttcagttactttgactcctgagtctattacgaccgaacaagggtctgaggcgtcttttaaagccaacgttatcggtgctccggaaggtgcatctggtgtttattcttggaccaaagacggttcacctgtagaaggttctactagcactttagtgattgacacgtctgatatagggtcccaagtgattggtgtttctgttgaggtttcagcagatgattacaccccgatcacggtcactaaaactggtaacgtaactattactaaaagggtagcccctgagccagacggagaacttccgtatgttcatcctctaccgttccgtggaacagcttatatctggtgtggatggtgggtaatggatgaaatccaacgaatgactgttgagggcaaagattggaaactcgacgaccctgacagtgattattacctgcatcggtatactctagctaaaatgctagatgattatccagaagtcgatgtacaggaatctagaaatggatacattgttcatcgtactgcgctggaagcaggtattatctatccgtaatattcgggagccttcgggctcccttttttgctattcacggattggtttattatgtcttcatcacatagatgaggttattatgaaagcactacaagctcacttgatgcatgaaagtggtaaagatttccaagaaattgcgagagcattagatatcactccagcggaagctgctaaattgtgggtctcagttgagaaagcacacgaacggtttaagcaaaaagaaaaagtcgtttatcggaaacgcttaacaaacgttggtataaaatctcgtcataagaaacttgttaaacacatgaggactttatgatgtctaaagtagacccaattgtagtagaacgatttgaagaaatgctttctaagaaatttacaccagctgctaatggggtaaatgtctggttgtttgcatctaaatttgttagtaaaatgatggctgttcagagttcttactactataaaagtggtgcacgtaaaataacggatttgattaatgaacggtatggaaaaattgattggatgctgatggataaagatattccattagtacttgaggttggaagcaaaagtcaatttgaaatcatgctaactaaaagcggatatatcatgtatcgcttcgtgccgagcggatattaattgctttaaaaatcgatgtggtataatgggctcaggggaaatcctctgataccattatccttatcccaagatagactcctggttttattttatttattgagagaaaaattatgaaccttgccgatagaatggctaatacagctattaatgttgctacagaagaattatcagcagcaaaagaagaagtattaacccagattgagaaaaccgctttagcgggtaagcgtgagctaattatgtatccgagtagtctagttaagaaacacattacaagcgttcttaattatttgcatgatgaaggatttgttacaaattataccagttcccagcgtaacggtgatactgactttatgaaaatcacattctaaggaaattataatgtttgcaaaatattctagtctcgagaaccattacaacaataagttcatcgagaaaattcgtggtgctggttttgatatgcataccgttgagtgggtagctcgtgagaagattcatggcactaacttcagtgtgattattactcctaccgaaatcgttccggctaagcgtactggtcctattttagaaggtgaaagcttctttggccatgagattatcatgaagaagtacaagaattctttcgctaagatgcagaacatgctgaacgccatggatttagtatctgttcaaatctttggtgaatttgctggcggtggtattcagaaaggcgtagattatggtgagaaagatttctacgtatttgatatcctgtcggactctggtaatgaaaaagtttattgggacgattatgtagtagaatcgtttgctactggtcttggtcttaaattggctccacttcttggtcgaggttcatttgccgagctatctcagtatgtgaatgactttaaatctattgtcaattactataatgagcttgttgacacgactgaccttgaacatgcaaataaacatgtgttcggtccgcaggtttcttctgaaaccggcgtagctgaaggctatgttcttaagccggttcatcctaagttcttcaataatggtactcgtgttgctattaagtgtaagaactctaagttcagtgagaaagctaaatctgataaaccaatcaagccgaaggttgaactcaccgagaatgataagcgtgttctggaaatcttttctgagtatgtaacctggaaccgtgtaagtaacgttctgtctcatattggtactgtaactgctaaagatttcggtcgtgttatgggtctgactatgaaagatatcattaacgaagcagcacgtgaaggtcacgatatgttattcgctgataatccttctgcagttaagaaagaactgactattttaattcaaaacactattcgtagtaaatggcatgaggttttagaataatgagattggcgctgattggttcaagagaagcgccacgcagagttctgagtctaatgactataatcggtcaacgcctctcggaagaggggcatttttcatattcaggtggagctccgggttcagatgaagcgtggttggcgaaatacgataggtcaaattcttgtaggattattccttattctggcttttgtgaccatgttcctggtacaggtgttgttgtatggtctgaattatcaaacgaagccaaaatcaaaagcatcattaaggcgagagaagttacgtcgtactgggacgaatgctcgaaaatagtacagacactatttgcacggaattctatgcaggtattgggcctagaatgcactgagcctgtagataaggtattatattgggcacctgaaaaaagatgcgggagtgtatctggagggacgagagtagctgttgatatagctcgcaggcacgggatagaatgtgttaatctatatgataagaacgtgtttaaatccctcgaggaggaatactccccgaggtttgacatatttagtttataacaaaaaggggagccgaagctccccataaattagtccgcaataagcttaggtaacttaacaccgagcagtacagacatcttacttcttcctgccatcttatccatatccgcagcattaatcacacgagcttcgtcctcgtccaatcctatagtatatgggttaactgacagtgcatatcgtaccagtaaagcaacagaaggctgcaagctagctgggtcaacaataactttaaatgcaccaacatgctcagggtcgtctaaatcaagaccttcggtatacggcgcatagaataatgaacctacagtttccttcccaccaaattctgccttaacaccaacaataacgtaatcaatcggactgttagtatcacaatacagtggaaggccgttattcagaatgccatatgcgttttctggaatagtcccatcgttcttctgcattaaccaaccagaagctgccagtaccgccgcgcaacgagtagatgctactgcataggtaccagaataagaagtattacgttgaactgctgaattcatttcacaaatgaaacggtacagagtacgaccttgttccggagcagaatcctgcttagttaaatctaatacacccttatcggatacaccagctactttaaaccgagaagaaaccgtaatcaatgattgcaggatgtctttattaatgtcttctgccatttcagtagcaagtaaatcatcaataagctctggagcatcgaacccattagcttctaagtcttgagctaattctacagttaaatccgttttaagcttacgcgatttaacagctgtttgccatttatcaattttaaaactggcttcggtgattgggtctgaatcaggtccttcgaatttttcagtgactgcagcatctgacagcatacgaatattattagctgctactgcttcagatacaattccgaattcatcggtttcatctgttccagtaaacggtccatctttaagtactttaaagaccacattctgatatttgaacatatcgtctttattgaatgagtctttattcgccatagtgagttcttcaattgactcacgttctgtggcgccgatttgacccgcgtaggttgcacctgttgcaaatgtcaaatcaccatttgggttaagatatttaatgccatataacgctgctacaggctgtttagtacgctgtgtagcaacgaggtcagtatagattaatttagtggttgcgcgcgttaatgcaacgagattagggcgaccaattaagttgctactcgttgtagttgactcgcgcagaagttcgttgattttagccattgcgctttcctctgtggatttataagtttatttatatccattaaaacaactaaagggagcccgaaggctcccttattggtattagatacctttaacccatacacgacggaagtaagcattcttaccaacagagttgacgatagaaggcataccagaggtaatacgacctttcggctgttgagcagcagaatcggcgaacgggttaataccgataccgtaacgggttttgaaccccatgaccggttggaagttcttcggatctgaaccacgcagcggggtcagtgcaacatacggagcatagtagataccagcatccatttcgttagcacctttataaccgatggtgaagtaatcctgacgagcatactggtcgatgtatacacggtagcgaccacccagaacaccagcaaatactgctttagtggtgtcggtattataaccacgacccagaccctgagctgccggagatacgttggtatcaacagctgccagtacgttaactacgttacgggaagcgataatgaagttaccttcaccgcgaccggtctgacgagcgatttcagcggattctttgtcaatctggaacagcagagctttaaagctttcacctgcccaacgagcaccgcggatatcaatcgggtcttggaagtcgaatacaccggctttagaaccaacagtctgggtcataccagatttaccaacctgagcggagtagttaatccaatcaacaacttcacggttgatttccagcataatttcggtagccaggattgaactcagttcagcatcagcgtccataccgtgaacagcacggaggtcctgagccagttcgatggaatactgtgctttcagctgacgagatttcgcttcgatagtttgtttatcgatacggaagcccatttcattccacgggttatctttagaaccgttaaaggcttcttgcagttcagcaacagaagtagccataccttcggcgatttctacaactttaccagcttccagagcagcagtaactgcagcgtccagtttagcagcatcggtagcaccagcgtctacagtgaaatcttcaacaacctgcagatgagcacgaccggtctgtgcgaaatcgtgaacaacgatatcaccaacagtcagagcatcaccagctttaactgcttcaaacttctcggttgcaccctgaccagagaacattgcatccggagcgtacatcggatggaaagcttctttagcaccagcagccagcgggtctttgccgtaaacagcgcggagcgcgaatacctgaccagttgggttggacatcggctgtacaccacagatatcgaaagcaatcaggttagggatagcacgacgaaccatacccataactgccgggccaatctgggttacagcaccagaggtctgaccagctgcgatgttctgtgcatcataaccgtggtcaccgccaatttctgcttcagacaggaaagaaccaaatgcttcagcgattttttcatcgcggtattccggagcctgattaatatcagcttcctggttttcaaaaatcttagcgatcagagcttttttgctagcgccaacaatttccggcagagcttcgttctcaagcagcggctgccatttttcgataagtttattctttttcatgtgttgtataaccttttaaattaagaaagacgagccgcttgggctacataagcatccataacggatggggttttagtcgcaggagtttcttcgactgcttcagttgtgaagtttaaaccgtctgcttctttgtcgatagtatttatatcggcagattccgttacagactgctctacagaaccctgcaccatttcaacaatagctttcagcttagttgaaaacgagtcagaataatccataccctctgtcagagaaactactttctctttttgagtatcagtcaattcacgggttgcttcttgaatagcatactcgcgttgggcgtaattgatataagcatcacgcttagaaacttcttcaaataaacgagcagtttcttctttttgctcagcaagttcttcttccatttcagcgactacgtctactgattcttcaggaattacaacattgtgctcaacaaacagttctttcataccgctaaacatggattcaaacagttcagccttaataccgcggtcaaccgccagctgattttccgccatccattcggcagcgatatggtcaaagtatttagaagcagcttctttcagctcttcgcgagcttcttctttagctttttctttttcttcttcaactttttcttctgctttctcagcaatcttttcaatgtgagattctgccagagctacggcgtgttttttgactgttgcttcgaatacagtgctgaagttagctttagcttccggagaaagctgaactgattcgaaaatactgtcaagagcgacggaagcatcgatagttttagcttcggtcattaaaagttctttaagcatttttgatgtcctgtgttaagttacataattatttataacgcttttaacttctctgcgagagccataaaagcatcatcagcactattggcaacttgtgccgaggtattttccgaaatttgtttcggttgtacccatgcatccggagcactaggaccccaaactgcgtctacaccaacagtcaggcgaaagccttcttgtacgatgttatatccttttcctgagtctttcaaagaaccaagtccacgacttgatacaccaggaatccaaccagcacgaatgttagcggctaatttatcacctggaccgtggtctccttcgatgattcttgcacgcccataaacatcgttgcctttccaccacatatcttcgataatgattgcggcttgcatcgggtcaacatttgcgcgaggtggatggtttaattctcctagagcctgacgagtagcaacctgttccttaatataacggcttaccgcagtctcaagaatgcgttttggataaagacgtttattacggtttactacttctgcctgcataaaaacaccttcgatatacagaccaggttttaagccagattcattttcgccttcaacgataatagattccagcatgggtttaccatcaatcacatcgcccggttgaccccaatgctcaattaaaagttgttcattgaggttttccattaacttagccccagagcctgacggcgtttaagtgctttcttacgtttacgtaatccacgaatttgagccgatggattagcacgttttgattttactgctttacgcgcgatttggcggcgtttagctttagaaagtccggttgtttgaaacgcgttacgctcacgtgttttacgatctttggtacgggtaatagtacctttagaatcaacgtgcttaacgataaattcatttaattgtagagattcgttaattgaacctaaagcaattgctaaatcaggctcagaagtaaccatgttctctacaattttatttatatcatctttagagagcgctgcggacaacttatcaaaacgtgcctgggcttcaggaagaagagcttcgacagtgtcgataactaattcatgattttcaggcagtataagcattactcgtcctcttcgtcgtcttcgtctttatcagacttatcttcgtcttcatcttcgtcctcatcgggctcttcaccctcaatcatgacagacgctgcgataaattttttgcgctcttcaattaaaccagatgtccgttcagccataattgcaccaaaagcttttttggctgctacgaggtctctggattcaattgcggaaatataattttccattagaaatcctcttcattttcttggtcttggaagcgagcctctttagactctaattcaatttgcttggcttcttgttcaatttcttcatcagacatctgaaggaaatctttcattgctgtcttatgagaaatatacttgccgataaacggttcagccattgtgagcatattgattctacgctccataacttcagcatctttcagctcggtgaaatatgaatctttatggaacacaatcttaatattatttatttcgtcttcccactcatctttagacaaaacttttttaagaattagattagtgcgaagcggatcaagcataatctcttcgaatttatgctgtaatctacgaataaatttagcaaaatcaagctcatcacgagtaattgttgtgccagcatcaaactgcacaccaccttgattatttgcatctggcatgcgcgaaagaggaactcgcaatgccatgtataatgctgttctaaagtaacggacgtcatccatatcactcatacctgacataccaggaagagtatctacttcagtaactgctttaccatctctacgctgcaaccaatagtcttctgtcattgacatattatgttgctgatttttaatcttaccggttgatgcatcatatacaacgcgatttttcatcgtgttcataatatgttgcatatgagctgccgctttacgagaaggcatattaccagtgtcgatgtaaaacacacgacggtcaggagcacgagtaatacgataaattaccaacgcatcttctaatagctttaactggttggcaggtttaacggctcggtgtaaataaccaatgatgttttgacctgagcaatcaactagtccagaatgtgcatatacgatagcatcgcgtggaattttaattttcgttccggcagaatataatctgccatctgcataatagctttctttgccagtatcgtaaatgaaatactctttgtaccccttaacgattttagtaccagcgtcatcagctgtaacgatttcgcgaatgaattgtaagttgcgcgggtcaagacgtctcagttcctgaattccgtctttcattttcttggtgttgacgattttatggaagaatattcttgagtcaacataccaacggcggaaatggtcagcgccctttctctcgaaattaaggcatgttaaaactgtattaaattcttcaagaatgcggtctttaattgcttgactgaagtcggtagaatctaaatcaagagaaactactggatgaccgtcttcgtatacaactgcgtcagaaactatttcttcaacagcattgtcaacttcgtagttattcattaaactacgataagtgttgattaaatcagcagttgttttcattccaggttcattggaaccaaacatcatttggttgaatgaattgtactggatttcgttttcgtttgattcaacttcacgagctccatcatcaaattttggagcagtgattgactctaggtcattgttgatttgttgcttatattcagcttcgtcgcgtttttcccacggagcgaataagtccaaaatatgaaaggccattggagtctccgaaattatctataagtatatttatatcgaagttttgtcagatatttaagcaaataactcacagaacttcgatacggggccgaagccccataacattattcccaccagtcaatagcaaaggtagtttcgaacgtttctacctcattattcgaatcccagtccatctgtacttcaccaacgttagttggccacagaccggtaatggtgtgttcatttgtgacagttttgccatcacgactaaactggcgtacagtagcaacctttttgtaatcagctggagtcataccagagatatcattgccttgggcgtgggcctgagcctgccaagcaataattgccttacgtacttcatgtttatcatcgttatagatggtaacagtccagtcgtcataagtacggtcaccagcgacgttaatcttacggttcatgtacccgactggaactttttctacgatacctgccggcatcggtgctgctttacatttgaaactgaagttacgacccagataaggaatttctacctcaaacaggttaggacgtgcaaagtcaccagattcaaacgcacgagtgatgtctgttaattccatcgttgtttcctatagatatttatatagcctctcgattgactacatcatcatagaggctattaaagtgtgtggtaatataatttatcatctaaaggttagatgaccccagaatgtcctggggttcatattactgtggtccgattaactcatcaaaatctgcgccagtttccgtagcaacgaagttcagagtgatgtagttaattgaacgcgccggcttgatgtagaagctcgctacaaactcgttgcgatcgataacagcaggggtgttgttcgtggtatcacatacaactcggaagtcatatacaccacccagagctttaatacctgcgaggtattggctggtttccatacggaaagaactacgggtaaagttatcgtttaattcaaacagctgccacttagaagaatcaccgatgttgttcttcagcatgttaaacaagcgacgaacgttaattcggtcaaacggcgttggaacagtggttgcagtcttatcaccaaacagaatgaaaccttcaccggtaccttgacccgttaccgggttaatacctgcttggtacatgcggtcacgatgtgcctgacgcggttcaattgccaatttgatacaatttaaaatctgaccacgacgatatccagctggtgacatccaaggctgagcaatatcatcagtacgagcacacaggcctgcaatatcagcagctaacggaacccaacggtttacgtcgttatatttatcatactgatatttatagttaccatcaattgctgcgtacgtagtattgatgttcatgtttgcagagtcgtagcttccttcaccttgacgccaatcaattaaattatcaacagcacgggtcagaggaatatttacaatcgttgaccttggaggcgaaatgagtgctaaacagtcttgacgctcatctgcaatagacgaaacgtgtttttgtactgtacttgcgatttcatcggtttcaccggcacaagcaccagcaatcagaaggtttacacgcaatgcttcacggtcaccaaataaatcccagccttgaattaaatcgccagcagtaactgattcattagctgaaaccccaccacccagacgaataacaccggaaaatccttcaggccatccttgcgcggtagcaaatatataacgtgaagaacctttggagaaataatcgtccataaagatgttgtttccgtagatgtctttatcttggcggcttgttgataacaccgctgattcaactaccgcgccatctctacgaacaatgatagcgtactgagtatcggtctgaggaccatatccaaatacagcttttgcggttgatgcacgctgtccaccactcggataaatcgtcagctgttcgcctttatcaaaagcggcttttgatacaatttcaatttccagttggtttccgagctcgccaggatacgcagctacaattccaggcattttatattgcgcaagcgcagtctggaattcggtttttgtcatttcttcatgggcagtttcatgttcagtcagtaaaactgtagactcagaaataattttacctaaagtaatgacagcggaaacaccagaactctgtgaagtaatggtagttgtccacgaagaccctaaatctgggtactgattaatgctttttgcatatgcaataatctttgatgtcggaatgaatacagacagaattttcccgtcgctatctaccgcagtaactgaaccgccgtcttcaacagtttggtctgcatatttaaccgtaattttatcaccaacttcatagttactaccagcagtagtgatttcccattcaatattatcaaccaatggagatgcgtttttagcagcttcacggttaactacacggacggtgcgtagatcattaccatattgcagaaagttcattgctgacataaagtaatcagcagtttggttattagggccgccaaacatatcaaccagttcaacttcattagtgatttgagtaacttgatatgcaggaccccattggaacttcccgacaattgcggcacgacctgtagcgttaagtactaccgtgctctgtacgctcgtttctttgagctcaattccaggagagactaaaggcatgatatatcctcaatgttgtttgctttttattatttatacaaatgaaagaccatgttcttgaggcgcatattctgcgctattcacggcgtcaacgaacactacaggagcgtaatcgtcgttcatatcttctaattcgcgtttaaaaacttcagatgctaatcgcatttcatctttatccacgaaatcagcaaatttttgctgtgttgttaaccatgcgaaaattacgagtgacataattaaatcgtcatgatatccatcttctgccgcccaggatactcctttctcagagaaagtacgaaattcttgaacagtagcacgatggtgaataatgagtttatctttttcgataaggtcttttagtgcagaacatccaacggcttttgaccttttcgtctgtttcattcctaaatcaactattgaatcgcaaatgacattctcatattctaaatccatataaagactcttcgctacagaaacacctgtagagttaagttctatatagatcggagcttcgttgtactccattagatatttaataactatatccgggaggattaagtgagaaattgtattagaatgtaatactccaacctgttcccattcagatgtagtcacgtcaataatatttagtgcatggtaatcctggccgcgtccttcagcagagtcaagagttgcaatatatttgtggtctgcttccgcttctttaaatttataaaacccgtgcgagtcaggagtaacttcaatccaatccatattagcaagtttcataccggaaatgagagtaccggatgtgccatgaaattcagcgcagtgctcttgtttaaactgttcaagagaagaagcactgatagtttgaagtgaccattgccacccatcatcaaacatatcttcgtcgttatatagacgttctttaaccgagttccaaattgcagtataaggcgtaaagcctgatttaccttcaacagccgcagtccaaatatcatagaagtggtttaatccacttggcgtagtcgtaataataattttagaacgacgacctgatgaaataacaggttggatagcaagccatgcatcgatgaagtttggaataaacgcacattcgtcaatgtaaatcattgcaaatgagttaccacgaacggcatcaggactcgaagcatatgccccaatagatgagccattatctaattcgattgagcctttgttccattcaacaataccaggctgaagaaagtcaggaagtaattcaattgcttgcttagtacggtcgagaacttccgcagacattgagcctttatgtgcaagaatacctactgctttatccttattaaaacacacgaagtgcgcaaggaagattgctactacagtggttttaccaagctgacgactaaggttacaacaagtcatacgtttggctgccatgatttccagcatgtccctctggtaatcacgaagctggactttaatggtaccatagtcaatgtgagtaattgcacagtaggtctctgcgaagtacacaatatcatctcggcatttcttccattctgcaactatttcacgcgtcaactgcattttaatatttgctcgtttaaggtttggcaatcccatatagcgggtgcgcttattgtttttgtccttaaacgtttggaaatgagctgggtcttcaccttgcaaacgaattttaactatcccatgtaacttaagatagtcttcaaatttctcaggataccatttatcatcccactgcgatttaaagaaacgaactccgttttcaattttcgtttccatttcagacgggtggcgaataaccacttgtttaccgtcatttaaaggatgtgcatcactcagaacgttaaacggttgagtctgttccatttactattttctctcgagcttcttgtgcttcataggcatcaccgaattcatccatcatatcagcggtagaccctacaaagactgttgcattttgaatattcattccttgttgaggattagctccttttccggtactaacctgctcagaagtaatgtctttcatttctttatgaagcttaagaatttctttgttagttgtggtcatctgacccataagagttgcaaatacttccatatgtctaggagagtcagcattcttagcagtttccaaaaatattttagctgcgtccattaacatctgttgttggaagtgcatattcttacgaacgacagaatagtcgtcttcgaggtcaggtttacggtcatttggattagatttaacttcaactaattcaagtttttcataaactggaatttcttgtccttctattccaggaattccttcgatgtctaataatttagccatatctaattgtaattcactcatttttcacctctcggtccaggagcctccggatttaccggaataggaatatcgtgagaataagtttgtttactagaaccatcccagtcttcttgctgaacatctcgtggagtgacttcgctatctactgattcaaagtttccttctggggttaactctttgctgttagcgaagaaatctaaataaatggttctaatttcgccatcaatttcagctacaggcggatacagccagccattgacttcaaacatcagcgaccattctaatctacggcgagttatattatctccatcaacagcttcatcctgagaaaatgactgtaatacaattctaacatcacgattaaagcttgtgtctttgtcgtaaagctcagttatagtcgtattgaagtgaggctgaaaataaggaacgatttgctcgatgatttgatacatatcatcttgattgcgtgtataaattcctaattcaaaaatcatcttaataggagtaggattatattgagatgtaatttttgaaggagttttatatgattttgttctattcagctgtgatgttttatacatcgcgttgtattgcatatcaaccaagtgcaaattcattcttggcaaaacagtttctatttttgctttattctcggtagactgaacagcagtccattttccaagttgagaaaggaacttttcctttgaagcataagtgataggtactttaatatattttagtccagtgtcttcacgccaacgagcaatttgcacatgagaaaataaatctccaagcaatacaatgtatcggcgtaaggacgaattataccaatgtccaaacatgatttctcctaagggacccaaaggtcccatctttattttatttattcgaaaaatccgtcatcaaatgaatctgctttaggaggagattcaagtcctcttccgttattaacataatacggatgaacatattcagcagcttctttattgatttcattgctctctgcgtactgcacatcagaaatatcagcaagagcatctatatttttgattggttctaaatcaagctcagaaaattcaggaatattaatgccttcattacgttgcaattctggctgaagctgctcaccagaataaatgtatttttgtgcagtaatcttgcgttgaacattttgacctaactgataaaatggatcgtatggctgaacccagttaatttcaaataatgagttatccataggaaaataaattaggtcaccggcttttggttcagaattattagtttgatgcttgaataaattaggattaatagtcagattgacttcatcattaaccatcataccaaatttactaaagaatgtgttatcgccagaatatccttcaaatgaatctaaataagcagcaaatttccaagctttggtgaatttacttgatgggtcttctccaaaaagcaaatcaggattgttatattcacgaggaaggaaataaaactcaattcctctcatttgaatagcctcagccgataaagcatctgctaacgtttgactatttctatgattgtaaaaattcacataaggattgagaatttctgtctcattagttttattgtatcctcggtaatcctcaaggcgagcgaataaactagaatcaaatgtagacatcttttaccccaacagaataggacaacccgggtcaagtaaatcaagttcctctcggagcctctcgatttcttcttgggcctctaccttaagtgtttgaccatcaactgtaactccacctgccaattgcagaccctgatgtttaaaaagaatttcaccccacagctttttggttaatgctgtagcataatcttttacccaacgattattatatgcaccttctctgtttgtattaccttcaccagcatattggccgttattgcgaaggtcaggattctggtatctatctcctaaaccccagtggtcagcagtttgcggcccagcaaatccgtatcctgctgtattgcctaccatcgcatctgtattcataaatgatttagtccagcattcacaaacaatgatgtctcccttcatgaagttgcccattactttaagcatttcattatcagagttataccaatagtctggaagtggggcaagcaaatcctgcatcattgaccaataagtcattaattgagtaaaatagcccaggtcagcaccgaaagcgtttggtccataactcttattacagcttgaccccattccaccattaattccggccattcccattaaaaagtcagtaaaccacggataggtagcattaccatccattgaagttaatgaacctacatttgttctaacgatttgagtgacagcaaatacattacgaccacgcaaatcaaacacaccatttaaaaatcttgcgttgtcagcttcatcttttccaatataaaaaacttgatagcctttattcaatccgttaaagtggtattcaccatacaactctaatgctcgttgaatacaatcataaatttggtcttcagttacttcgacattaattaccggcgctcctagacgtcgaagtatagcgtctttaagcgtttttgggttgtacgtgttgtatgacatatgaactcctctttatattcctatttatacgaaaaagggacccgaaggtcccttttgttatacagctggatgaatagtaatatccaaagatttaattttaacaagaacctgtgattcttctgaagcagctctatacacgattttgattgcatcaccagatgaaaactcaatgagtttcttggttttaatcaactgctcgcccgttaccgccttaacaccgagcccgtaggaaaacacctcgatgttattaacgagaataacaattttcacgcctttatctgaatcagaagcttcgataactgtatcagtttctacgcaaaatacgccatcgtcatcaacaacaatgtcatcgacaatacgaatgccagcattgaatgaagcagcgaccaatgagttaggatttaccaatgcatcagaacttaaatcaacagtgaaatcttctttactgaattcacctattgatgaaggcttcttaaaccattcgccccgtttacggaggtatgctccatcttgttctacatcagtaactgcagtcacgaatttatcttgcaattctactacagtggcatacacaccatcccgctgaaccggattttctgacgaaaagtcaccattcatttgagtctgtaacgtaaatacagaaccttttaacccttcattgttattgccaagttctacttgaatgtcctggatagcagactgctgagagttttgcataccttcaacattggtcattctcgctaaaattgacccaggaggaatcggctgctcgctaggaacaataccaacctgttggtttatccatgctacttgaccctgaagccctgatgaagtatcctgacctacgacatcagaaatgtatctttggtcagttgaaagagaactaatctttccttcaatgctatcaggtttatcagaagaccctaaacgagtatcaatattattgacacgaggaactaacccggtttctgcagagttaagtgttgcgtcaactatacgataatcgttttctaatctagtagtgcgagctccaatttttactggatttgtaaaatcaattgcctggttaatagcaaagatttcattgttagctgcggaaatagcatcagcgttatgcacaagccttgcataaattgaagctgaagtggctccggatttaggaccaacttctttacgcaagtcatttacttcaatagtcaatgaaccaacatccgaatcattatatgcatcctctagcgcttgaatacgctcatcatgttttactatagctgacgcgttattgatgattcggtatttcataccagaacctggagagtcctgtttaggctgtccgttaatgtcttgtccaggatatgccccaatttcccgtttaacccaaactatattatcacgaacagttctgtaatagtcatctttactagaatcataaacaccgacatcctcttcaagaaaatcgaggtcagttctaatctttgcggcgtcttcttctaatttaagaatttgcccatcgtgtttttcaatattctttttattggtataaacctgctcaatagcgtcagaagaacctgtgatttctaatgattttttgatttggtctacatctacttgaatattttctacagcagttccaacgttgttcaagtcgttatgtacttgaaccacatttttctgaatctgcacagaagctctattcagttctccatcatttccatagcgggttgaagccccattaagaggctctgtattttttatccagttaattctctgttgaaaatcgtctggaattccgtctacgaacggaagcgaatctactagtttggtcatattgttccttacggtctatttgtgcagaaggtaagcatgcagtcataaaatataatacggctgtcttctattggtcttatttgaacagtggcatttggaggaatgtcgtagaagaaaaagttgctagatgcgtaagcttcaaatctccatgaatgaccatttcgtccgcctttagtattttcaatgttaagagtaagttcacctccccattgggagccattaactattaaaacacatttgaaaatacgattgtcatatccgtcgttgttacgctcaaattttacattaacatttaaagctaatttactaggagcttcccatggtgaattacatgtaaacgttgtacctcggctaatccaagattgtccttcaacccaagtaacattacctactctagtcccagctggcatgtagcgcccgtcggattcttgtcttgtataacaattaatatcattattagtaattgttatgtcattatcaagagtttttccgtttattctacgagttttaaaaacagcatctgttgcagccgctgccaatgaagcatcagtagttggagaacctgataatctggttaatccatatttatccttggtggattttagcgcttgaagactttttggagtaacagccaaattgttagaagtagctgaagccacatctgagtctttagcaaattttactataccaaatacgctgtcagacgcttttgatgccatgaaggtttttggagttactgcgtatccatcgtgaacagcacctgctgctacctgggcttgggttgcgacacgaactaatcccaagttgctttctgttgcagaagtataagtaggaggactgacgctgaactttccaatcatttctacaacacgcttaggagttactgcggtagtttcgtcagttcctgcttgtgcttgagccgcagtagttaacctaacagttccatctacgttttcttgtgctttcacagttttaaacacatgaccaagagcggcagctgtaatagttctgtttgctgctgttaatgctgcggcttcggtattagttgcgtatcgggttaagccaagaattgcggtagttgcttcaggccgagtaattgtggattttaatgtagctggggtaaccgcagcattacctacagttccagcttcaacttcggcctgtgtagctgtacgaattataccggctacggtgggagatgctgcaggtaatccagtgtcagttcttgcccagcttccaatcaacgctaacgctgattggacgtcttttgtagcaactggccattgtgtatttgctgggtcaaatatcgtatatttggccaaatcactgtagtgattatagttattctgggccattatcccatccttctaaaatagtggaatgtaaatgtgtttgcaccgaaggttttagtttcgttaccaatagcgtcccattgtccataacccgctttagcaggtgaagtaacagtaaactcaacagttaaaccatattttttatatgtttcaaaattatggttctgataatccagatgaataatatcaacatattgaggagttgcaggtgattgagtaacttgttgaaccacttttccaacagcttctaattcttttaccttatcataccacctggtagctactgcagcaaagtcatcaccattcgcaattctaattggcaatccaagaatgtgaattattactgggtcgccatcagaaccgtcttctttaggttctaatgaaaccacacctgaaaaagtagcgcgtgtaatttgctgcgctggttgtggagatattccggtgtcattacaaataatagttccaatttctgctgactgtaatgacattaaatcattaatagcagcttctgcgtttggataccaaacacctaaatccatttgttcaaaggttaggctccctataggagccttatttcccaccgcgatattctgcgggtctacacgatattctgaaaaagcagttaatcttgaattaactttagctccttcgcgagttttagtttcaatagtcattttaacctaccctaatccaacgataaacggtgattgttggctgaattttagtgatgtcatttggaactacaccattgtttactgcaacagtgtcttcacggtatttagaatagcctggtccttgtgcgtctgggtctaattgacatccgccaataactacgctgccatgttcagggtctgaaattagaactttgtcccttgacattaactcaggaatgtgttcttttcctaatgtaaacgtcaaatcaccaaccgttccacctgctgttaatgatggctgcccgttttcatttaggttattattgttccgcgaaaaataaggatcagatgaatcattattccaacccgcagtaacacgaccctgagagtaaagcttccatacaccaaatcccatgtaatcggcagggtttgcgtggttatgggcgttttcgtagatagtgccaatcggataaattacatcaaagaatgctgcaatgttattgactttaatcataacatcatcagcaacaggacgcatatttttctgattaggttcatcatagttagtgtattcaatgcgattttttagagttaccaattgctcagcattcatatacacatgatcggtttctgccatgatatcgtcaatatccatagtagtaccgatgttattattgaaccaacggacggtaagaaggtctttatcttcaaacgcctcaccaaaaataatagcttcgacgttagtaccagttgagtcaaattccagcctgtaatctttgttagaatttacccattgaccaccattgtttatacagtcttctgcatatccgccttctgcaccttcgcaataaaataaaggaagaccagcagttccagcttcgagtaattcctttccgttcaatgaaatttcaagtgaattaggatttactcctacgcctggaagtacacccatgtcatccagagtgattctgcgcagagtagcaaggttatctactataattgacccaggaatcgtctgggatgcagtctgggctgaatctcgtatctggatagctaacttgttgtatgaagaacgatatacaccaattccatctaagaaggtttcaaatgttattacttccccttcaacgcatggaacttttaaacgaatgtctttaccgtttaattctaccaattgacccgctaccgttccaggagaaccgtaatcagcattggctttatccataacgctggtttcaccgtaatataaaatattaccacgacgatatacgttaagtgagtcttcgttataatctacgccatcaaaaatgttaagaaagtcagtctgacccgcagtagcaataattgattttttcgctacagtacttaagttgccattagttagcttgtctactgttttattttcaatatattcccagcggccaggtgcgcaataaactaattccaaatcttggaagttagtattgaaaattttaggagaagctgaaccctttaatgtatcgccttgagcaggaataactgtgattgggcttaatcgccaggttgaccaaacatcacgaagtttaataactttgttatagtcgttggctgtaccctttggaagctgaacgttaactcttgctgcctgggtattaatagcaaaggcctgaccaaacttagcatttaaagtagttccagtagggctagctttaaaagttttccatgcacctgctgcgaatggaactgaaccatcacctaactctgaatataaatcatcaaagttgttattaattttaagaccacctttacggaggtaatcaccagacccatcatctactgattggcctactatcaaattttgtttcattattgagatacccctacggtctgtgtagcaataactttaactgccaaacgtgcgtttccataagatgttgaagctgtgcatattaaatctttctgcgcgttaatagagtatgaaatagaatacatcttttcattttcagatgattcaccacttcttaacactgcatattcagtgtcaaatactcttccgtttggcgctgatgaagtaatagtcgggtcaatcataagcataacttcagatgattgccttttaatggtttgaccacctggatttgcactgaagcttaataacaatttaacggtggagtaatcatcattatatccaatgcggatattaataggagaacttgttaaattatatgtagcttctaatggcgaatatgtgctgccaaacatacttgaaattgaataatcccaaactgcagcaccgttagctttgacttcaacacaccacaattcaattctacatcttggcgtgttgataatcaactctcgcgatccatctttaaatgcatctgctacaccttcgccgtttgttgttatttttataggtctagcttttgatgctgatccattactatttacgatgaatacagcttctcccgctttaccttttgaaagacgaatctgaactgccccttctgaacaatctgcgtctaagcatgctcccattggaaccgtccctgccgagttagcatcaccaaattttaccttttgataataactcgttgcatgaattttttgacttccttctccagaccctgcagcaaataacctttggtccccaaatgcgttataaatggcgtcatagttttgatttattttgacgccgccagcatataaaatgtcgcccgtagaagcattacctacttcaccgacgtcaataacttttttaccttcatctacatacatagtagtaacctcttatcaaagtatagtcctatttatataaaaatggggagccaaaggctccccataattaaaactcgaaaattaaatttaactcttctgtttggtccattgaacgaataataggttgccgattttccatgtaaatcatttcacctgactgtctttcaagaccagaagcactataccaacctttttcagccttaacattaggagaatttggcattggcttaacttcaagcggattagttataattgacaactgtctaaatccagtatttcccggaagactgaactccggaaaataaaccgcatcaagatatgctttaaatctaatcgtattgcacttcatgcgataaattaaattaaagtcattttgctgccatgttaagttgttttgaaatccccaacgagccggagattcttgaatctcttctggccaaggaactacaatatattcatttgtacatctgttaattgatacgtcggctggaatttcatatagatattcccaaagatatccatcgcccaaatcgacggtaccatttgcatcaccacgaccacgaggagctgaacctgaaatagctgatggtgtccatttacctccaagcttaatacattcatctttgcttgtaagatttccaattgaacacattccgtcttttggaacatcaatacatctatataccatccatccaaatccagcgtcagttctgttatatggcgcagagttagcaacaacaatgtcgccaatcaaaaatgtacgcgggttaggatatctagtatcaccccagtctcttcttggaacaacacaatcaagcatagatgattcaattttgactgcccccatcatatttgtccaaacatcaactaccccatctccattatcagcgggatatggaggtgcaaatccaggttcagattcattatctgaccacggagtgcttttgccaaatgaaacatacagtgtgttttggtccgttcccggaccaattgatttataaaatgtgtacatcttttcagttctgaacttagatgtaatgatagcacgataaatcgtgctacgcgttgaacttgctcttgttgaattactcatcaatttttacctgtgtcggattttcaggatcgcgaggattacctgcatcgtctttaagacgttggttaactaaatcacgataattggcaaacgttactgctgattggtcaaatgtagggctcaacggcttacgtcgttgccctgggttttgtccagcaataatgctgttattattttcttgattgtagttagcaggtaacgggaaaggttcaccagcttgagcccgtgaagaatacctaggctcattagttattgggtctctttctattgtatcatctgaagcgataatagcaactctatcaggataaactgatggcagtcctgcatcccatttatagttcttgagtttatttatgatagtctcaacatgcttcatatttaaaccgctattgataaacattgtcaacaacgttataccaatgaaaccgaaacctaccggatgaacaaatctcagtacatcatcacggaaccgagaagtaggaagctgagacttaattttcataacatagtaagaacggctgcggtttatataatcaatgttattactcagcatatcctttccacggacaccttgaactataataccctcaaagtccgtacgctctgatttaatttcctggccttcaatgaaccgtcctgataagttatgaatagtaatacgccataacagacgaccatcccggtattctctctcgatataagtcacattactacgaccggaagcagtataaatcgtacgaccaactaaatcgtcagaaatatttgtgctttcaacaataatgtcatattcggtagtgttctttgactcaatatcgatttcaacatcttcgttataaagaagtttaaacaggaacttatatgagtcttcaattcctttggtagcatagaaatcattcttgcgtgcttcaaagaaacggacgacagcgtcacgagcgtctttactcagataaatgttgcgtttataaacttctgaccacagatattcccatgcattttcttcgcgaggatatttgttcttaacaagattaacgagactgttgtaatgcgttccatttccatctgaaaggaattggagatagtacttacaaaagtgctcaaaattactatcttgtagcaagtaactatccggcatcattttagtaagatacgggcgcaaatctgggtcacgtaagcctggagtatgctcaggtgtccagtcttcttcccgtgtttggttctgcagaaacgccttaaacattacatcagttggtttccagttaagcgttacctggtcacgaacacggtagtcaaatgcgtaatagcctatcagttttccgtctggttcgtgaaacatgatgccagaagcatactgcaaaaatccattaaatgaaactggagggcaataaaacgttgcgtcgcctttatcccacacttccgaaagaatgcgctcggtagttccctgtgctgctgtatctactcttttctgataaagaatatcattatacacgactacagcgttgtctgatgtgcttatccaacatctgttaccttcgcgagccatccatacaaaccacggttcagcataaaacctcataggtccaggaacaaatgtttcccatcttgaaaattcatctgctctgaaactcatcatgtgataatgcttatcagagtgatactgaattggattaacatttttaactgcggtagaaattagttctggatatttcgtctcaagctcaatatcctgagcgtactctgttgtcttaaaattagctgatgaaaagaatatttcctttccgtcagttgacatagaagtccataaatgctctatacgacgtttttcttcatcggtattaccaaatacacgcttccaagtatttgtgccttcctggtaaacatagacgcctttagttgcagaatccacaacgttccttgggtctgttgggtctaatcctaaggttttaacttccccggtaataagggcaaagattttgcctccaacggaatccattttaaagcatacagatttaggattgcctgttatatgagatacttccttttcaaacaccttttcaccaaatgtaggacttaaagggtcagtatctattggagcatcttttaatttaactttacggacagtgtcttttgcaacaacgtacaaatagtcatcattacatgtaaacgcttcagcatatttggtaacgtcagcaggcaatgatgcatacgttccgaataactctacttcaaagccaagctttaactggtctcccaatttagcaaatgtaacttcattatcgctaaacttaacttcattcgatgaccaacgtacgtcagatgatttccttccgtaaaagattttatcatatcctaaaacataagaagtagttttagattgataaattaccactctagaaaccggatttccgacacggtcattaaataactgaacgtattgccaattctgtcctttatcatttgatactttaaccatatgttggaatctttcaaacagatacaaaattccgtctatttctcccagcatagttctatttttatcaacacacactgcttcaataggtccctgaatttcatgatatccagattcacctacaacgaagttttcaatagctgataaatgagaatattcaggactaaactgaaaagactcagtcatcaaagacgccatcatggcagatgtgttgaagttaacatacgacatgttatttaaagaaaacttctgcttaatgaattctttcactaaactgaattcttgcatgtgctcaaatgtgtatgcgttttcttcaaaagtttggaactcttctgtttcaacccattcagacggttcaaatcctgccgacgtagtttgaacacgcattttataataagtaagcggttcaatacgattttgttcgaaccaatcattatccgcggtataacccagtgaagaccaactcaagttatcagcggggataacttcccccgctctgtttcgagtttcggccagttctacaaaatagtagaagtttgcaccaacgtcatcccaacgaatattgacctgattcgcagatagcttatgaattcgtaagctggtgacgaacggtgcaattgtcattgagtaataggctccaatttaatagttgtgtattgaggacgaaggtcattctcaaatacgataagtgttccatcgcgggcgaagacgatatcctgggtaggagtagaataaagctcaatactctggtcttcaaactgaagaggatcggctccaatagctccaaggctccagtaaatattatcaccataataatctacttcaccgattttgtaccaacgagttctttctccattagtagttctatcaaaatcgtcttcagtatatggctgaatatgagtattctctttaatatcacctggtttaaatggtccaatgaccatatttcctttaccatttttatctgggtcagttccaacgatattaactggatatgaatctgcagttggagtgacagtaaagaccaaatcaccagaacgtaacgtccgcggagtaatagtattatagtatttaatacctgcgctaggaagagtgaaatagttgacaatttcacgaaccatctgaatatccacagaagaaccgatgattgagtggtcagtgtcatcaatataggtcaataatttagatttactgaaatttttgttaaacatttcaacttcatcaacgtaatatctattaattgagtctataatttttgactgtaaccactgctcagattcttgtaacttattcagcgcgtaagaggccttaatattatgacgaatgaataagtaatctgggctcattaccgaaggggtaatgggagcaagacagaatggacgaagataatcctgaatgtcttctcgttgaaccgcagttaactgcagtccagattttggcttaattgcaataaacgcataccctggcttatcttggtcggtaaagcactgtactgcctgcacaatagaaccaaagcgtgaactaacgaatgattcatagtcagttttagacacgcaacgcatttgagattcgcgcttaatctgtgcgagctcacgaatacgctcgatgtcttcaggttcaccaccgccatcagcgccaacataatcaggagaatctgaccagttttcaatgattctatttactacgatatattgcagagtatctgcataactaaattcagtcgcgccattagcagcttcaccgtcagtacgaatatattcaataactacctgcgcgcccttagtaggttttaatccaccaatgaaattactttcaagaactcctcctgctacagaggcttctgccacgccttcaccaaagaagaattcggtatttccgtcgacagtttcacgcatataataaatcgttgaaatggatgaagcatgaaccattgatcggtctgtccagttagtccattcagcgccatccacccacagcttaacctgcttgcggtcaatcgactgatcacgaataacaataggtttcttcgggtcatatgacaattgagtacgaataatacgtccttgtgccaaattaacaatgggccaatatttctggtcgttatcacgaatagcaacaacgttttcagtaacaacgaagttatatgggttggctttatcggatttcgagtatgctaaaaatttagtccctcgcggaattacaactctcagtgtgctgcttgggttcatgtgagttacctcaagcataatagacgcagtggctgctgatttggaacttggcaaatacccgttctgttgggctgcttgaacaacagaacttctcaagttagctgttccaataaagctttcgtataaagcagtattgccgaattgctgtatatagagagtgttatatgctaataaatctaatagcacatttaagcgcgaacccgcaaaatcaaaatcttggaactctttttggccactaagccagttaataagctgatttttaatttcgtcgaatgttgctccagtaaatgcgtctgggatagcgtttgcagtacgcgttaactgataatttaaaggttctttaatagccattagtgtatgaatacctttgagcttgattgcgcgacagtgtcgccacaagaaattggatcggccatttgaacagcttttttgcctgttacaaataccttggatgtgcgaggttgaacaactcctccatgcgtatcatgagggtcaaccgtcttggtgtgtggggtaattgagtcgccatcaactaataccgctattccaccagtgaatactttactttgtgtagcatttacttctgtcggaggatacgcactatgcccggcagttaagcatttattaaatgatagtccagccatttaattccccgcatatacataagcacgaagctggtcgccccatctactccagttgcctttaactgtttgagagtaaatcttttgctttttatgttctgttatgattggagcgctagaacctccggatgaacctccggacgattcttctgtcactgtatatattatctcaactgtataggtaaatgtcttctctagtgttctgggggctttccacaaatataaatcagcagttttgggattaggtaaatcctcccacgctgaagcggactttagctcatcgccttcacggtatttaagcacatcgtttccaaaagtaaaaaccgagttataattacctttataataggtttcagacacagagatatcagatactggttgatagtcgataatatttattgattttaatgtttcgttggtagataattgagcagtaaagtactgctcaacatattcaccttctattacttcacgtaacgtagtattgattgggagtatatcagccatgattaacctacatcaattcgtgaaccatcaacagtgtattgaccttgggcgattgagctcatagaagccattgtctcagtccaagccccaccaacattccaattcacagtacctgctacttgccaagttaagttaccaccgacggttacgtcgtggttgccatctactttagtagtggcatcaccgttgacttggatatcagcatttccttcaacgactatcttaatgttacccttgacaaaaatagtaccatcgccttcaatagttttggtttcatttccacgtacataaagcgtgttatcgccatcaatttgctgtcgacgattatacatgttataataggtctcgttccctccaacgttaaccttcttatccccagagattaaaatatttccatcgccctgagtcatgtcatataaatcagctacagtttttctggtacggcgtccatcgggagctacttcttcgtatgaacctgttgggtgaacaatacgatagcgttcatagccaggtgtatcatcaaattcttggatgtgacctgattctgtttccatcgtatgaacatacggatattgaccattatatgaagactcaggttctttgaaaagaattctcgaatcctctggggtccacgggtcttcaggattaccaccagactttggttctacgtaagcagcagacaggttttttccttctggctttggagcaggaactccatacgattccatgttacccgttagaataatcatagaaacacgagaagcacgacctttcgtctgattaaaccaaacagagtttcttgcttccgtataggcggttttccaatcaccaatgaacatggcatcaagcattttaccaaattttgctaaaccgcctacacccatttgaaagctcatattttctaaagccatctgccttgacttgttgactttagcatatacaggtcctacccgtgaatttgttttaatgtcagaaagcattttatcacggtctttcttaaatagtgcaactgcttcgtccattgtaatgataccaggatttcctgtaacggtacgaccaacctgattggatagggttttattgatgacagacatatcacgtactttttgcgccatgataagatgcccaatacctatggtaggatatccttctgtgtcccagtagaccttcaatctaagaccttcatccctattaagcatatctgttattgtaattgcaggatttgggtcttcaggaatatcacttaagtcagcgtcatcaggattaatgccaatgtctaaatttctgtcctggatgatatttggtacagcactatacccagtttcatcgccttgaactaacgggttagtatctgatcccacctgtctaggatattgacctgtaggatcagaaaagccttccgtgtagtttggctttgtttttctatgagcagaatatgttcctattaccaatcctgctgttttgaattcatcaagccataacccaaacactgatgttccttctaccattccggttatagatgagccaactccagaaatcccagctgagttggtaggctgaatcactgacatccagggaaggtcttcagtaggaagaccggttatagctccttgcaccttttcaaatggatgaagcccgtaaacacgtactcgcactcttccttgctttaatgggtcttgtctgtcttcaacaacaccagtaaaccattttaatgaatcattcatttcaatcataaaacttctccgattgtagtctgggatttatatcggcctgattcatattcactgtcaggagccttttccatttctcgtataatatcagaaagaaatgcttcaatatcactaggattgataatgtttatttggcgcagtttttcattttctataatagagtcttcataaatgtcaacaccagctaaagccccagtatattgaggatactgatgattaaagtcccctttatcataccaaatgcctgaattttcagggtactgttctagattgtaataacgattgccgtttgcatccacgtgatagagtatttggtctccacctacatctgcatatttttgttgtgcaaattgatagcatgcatcctgggttttaatccaatctctaaacgggtcatatacgttattacacattaaaagaatccagtacagctgactatttccataaagaatatatgctaattcttctggtctaggagctccacttatgtaatatgtttgtaaaagatagttttctgctacagtgtcgaaatatttgcgataattacgaaatatgtcagcggttgggatagcttttgccttagcaccttttacggtctttgcagaataatctatcggactaaaaaatgagaagagcatagtttatcctcttataaatattaataacagtatttataaggaggccactatggcatattctggcaaattcatgccgcagaatctccacaaatataaaggcgactttagaaagattacttatcgttctacatgggaacagtacatgatgcgttggcttgacaatcatccagatgtagtccaatggaatagcgaagaagtagtcattccatactttagtaatgcagatggaaagaaacgccggtatttcatggatttctgggctaagttttctaatggtcaacagttcttttttgaagttaagccgaagaaagaaactagacctccggtcaaacccacaaagttgacgacatcagcgaagaaacggtacattgatgaaatttacacttggtctgtaaacgttgataagtggaaagcagctcaagctactgccagtaaaatgggtatagaatttaggttaattaccgaagattcacttaaaaaattaggatggaaaggctgatggctatatttgaatttatcactgaagctgcagaatcgcctaaagctaaatcccgtagtgaaaatcaatgggtagcattaggagttgaatactctgctgctcgtaaaaaaggcatgacgtcaaaatcatttgctgaaagcaaaggaataaatcctgctacgttcagtaaagcaatggctcgtcatgcatcaagaattaaaacggcaattaaagtagcagaaattgagaaaaaacctgctaacaaaatgaccaaacaagagcgtgctcttgtgatggtaaattcatttcgaagctctatcaaagataaaattcgtaatgaaggcgcagcagtaaacaataaatctgctaaatggtttgcagaaactataaagaaaaatatacgtggtcattctgtaaccaagcctcaacctggaaagctatatgcttacatgtatgacgctaagcacaaagacactcttccattctgggataaatttcctttgatagtttatcttggtcttggaaagcaaggtacaaccacattgatgtatgggttaaaccttcactacattccgccaaaggctcgtcagcagtttttagaagaacttcttaaacagtatgctaatacgccagtgatatctaataagaccagattaaagataaactggagccaagttaaaggatttgctggcgctgacaaaatgattaaagcatatattcctggtaatataaagggtgctttaattgagataaaaccggctgattgggcgaatgtagtcatgttaccactgcagcagttcatgtcgaaaggcaaacgctactctgctacttctgtatggaaatcataatgtctactggactgtttaatcaaactaacacaactaactttatattagaggtccctgatgggggcctcacccaagcgtttaaagctaatcttcaaacagccgtagttcctggaattcatattcctgctactgatactgtaggttcgcctcaaggcatgcatcgtgctaaattgcctgggtctacttttgagtttgacgctgttcctgttagatttttagtagatgaaaatcttgattcatgggtacaaatgtacaaatggatgttaagctgtcaaaactacattgaccgagacaagtctggatggaataacggcggtgaaggatttcctggcgcagttttaatgcatgttcttgataacgataaacatgatatagtattaactgtccgctacatcggaggttgggtgagtgatttatctgaaattgagtattctttaaccgaagaatccgacccagcaatggtatgtgtagcaactttgcagtacaaatacattgaagttgaaaaagatggtataataattactggtagaccttctgtcaatgatactcgcgaatcccagtatcaacagaaagttatgggaatgcatccttctatgaggtaataatttgaagcttttatttttgattggtaaaaaacgtagtggcaaagatacaactgctgactacattatggataactataacgcaacaaagcatcagttagcaggtccaattaaagatgcgttggctgatgcaatgcttactgagtggtatcgcgatacatcacgtcagtttcctcgcattactcggtcaatgattgaaggtattgattacgatcgtgagcaggatttaaatctgtctactaaagacgtgattcgtattatggcgaatgccattgaatatgtccatcatgatttgcctttacctggcgtggtttatgataacaaacgtaaaatacttgacggtgatacgatggaagtcatccgtaaagttgtaataaataaacctgttgagccatggtcaattcgtcgtctcatgcagacccttgggactgacattgtctgtgataagctcgatcgcatgtattgggtgaaacgattcactttggttatggctgatacttttggtgattatgattatttcattgtcccagatactcgtcaagaccatgaacttgatgtagccagggcgatgggtgctactgttattcatgtagttcgtcctgagcaagagggttctaaaaaagatactcacgtcacagagcgtggacttccgattcgcgaaggcgatatcgtaataactaacgacggttctctagaagaactttattcaaaaatcaacactatattaggaattcaaaaatgactactgaacaactgcaagcccaagtcgatactctgaaagttcgtgtatttgacctgtctgaaaccatccaaggtctgtccgctctgcgtgcacagtatgaagaagtactacagaaactgattgctgtgtccggcgttgaaatcagtgaagacggtcaggttaaacttgatgacctggttgcaaaaatcgaagcacagttcgcagaagaaactactgaagaagctgatgcctaatgaacttcagtgattttagcactggtctatatgtagctgctaaattctctgagaaaactcttgatgctattgaggaccttcagcgtgagttgaaggtccctaatcctgtacctcgtcataagattcatacgacgatatgctattcaagagttcatgttccatacgtttgtgcttcaggaagttttgaagttgctacatcaggtaaacttgaagtatgggacacacaagacggacgtacgctagttcttaagctagattcagaatacttaaaattccgtcaccaatatgcaagagctttgggagcaactcatgatttcccagattactcaccgcacattactctcagctacaatgtaggtccagctcacttcgagggtgaagttcaagtacctgtagtgcttgacagagagtaccaagagccgctaaaactggactggtcagaagatttgaaatagaaatttatttcacaaagttgtttacaacgggttgtagtagtgatactataaccctatcaacttgaggagaataaaatgaaacgttgtgaattaattagaaatgttgcatcaactatctgcatgggagcgttaggttttggcattatcggtgcagcctttatgtctcttcctgaaacagtatcagtgttaagtgttgcatttctaatgggtatcatttcttttgtaatggataaaatagcgcatgaaaaagattaagcaatggttcatcaaaaactatgatttaaaccgtgaagaagtaactaagtatgattatgttactttgggtgtaggactaggtgcactactggcagcactgcattcatcactacttgctattgcagtgcttcttattttggctcactacagctggaaacgtaagtaatgtatgcactttaacttggtctaattattatcctgctcctggctctgaccaaatcagaggtgtttactctacagtagaagaatgctatgaagccctccagggaacgtatcaagactattttgagatactgaattcccgatttgagactgttgctaaaggttcaactgaagcatacaaagattaattgtgaggaaattgttatgaatatcagagctgcatttaatactttctatcaagagaattataaacttcttgcccatgaataccatgatgcacaaggcgttccaattcctaatgatttagttacgcctaagcatgtcaaaactgattctcttgacaatgaaatccagcctggtgatttagtatcatactattgtggcgggtcactttctgcagcaagcgttggtattttgctaggatttacgcctaaaggttatcgtgtggttccgttccatacaagtccaattcctgagcaccgggtattgctctctcatatggattcaccacatcgggtattcctggttaaatcaaagagctcaccgattgtgtaatatgctttaggttttctttgttattattaatctatcaactgctctgattaattttagagcagtataaataaaattacccattggggagttagaccgtaggggtagcgggacagactgtaaatctgttgctcaaaaggctcgagtggttcgactccattactccccaccaaatttagggatactagctcagttggttagagcaccggacttttaatccgggtgtccgaagttcgagtcttcggtgtcccaccaaattcgggtcgttggctgagagggtaagcgacggactgttaatccgtgtcagaaatgactaggcaggttcgatacctgcacggcccgccaaatgaagaagtcagaagacgttctgataaatcgtcggcacagaaatccctggcatggcgtttgtattaaggagtatgatttcatcctgcttaatgcttgttcatgttataatttcttacggcgttgaaagttcgctttcagggatacatcttagagcagagtgctaaacaagattcatctggtaccaaggtgatgagagccctgttcccctttgcttcggcatcgtgccagagtatctctgaaagcgaattatggacctatagtttcagcggttaaaatactcccctgtcacgggagagagcacgggttcgatccccgttaggtccgccaaataagaacgtggcagttcttgaagatgagtttgagtcctgtaagataatgccgaggacgaagctgtttgttcccacgggataagctctatattcgtaagattatatctttagcgtgttctacatcaagctacttgttagtacttcaagaacccggataaatgcggggtaacttcagttggtagaatgttgggctcatatcccgacacgcgcaggttcgagtcctgcctccgcctccaaataattggactatagacaagcggttaagtcaccggcctttgactccggtatctctggttcgaatccagatagtccagccaaattaatattcattcaacgcgtctacaggggttgaactgatcattcttctcttaatttcgtatgaagtcctcatgatggatggagtgaatattgatgtggccgtagttcagttggtagaactcagcattgtgattgctgtcgtcgacggttcaaatccgtccggtcaccccaacaatgaaggaatggtggaaaaatacacggcccgcaaaacgctgtggctgtcgctaagcgaattgtgtctatatgacacttccttcaccaaatactggagagtagcgctagtggtagcaaaccggacttgaaatccgggccatcggaaacggtgagggttcaactcctttactctccgccaaatttatgaaagttaaacgctgcccatagcagtggtacatcaacaattagatgattagctttccatgggagtatagctcatttggtagagctctcgaccgataatcgagcggtgactggttcgagtccagttactcccaccaaataacaggttcttagtataacggctattatgctgggctccaaacccagtgatgagggttcgattccttcagggcctgccaaatttgcatccatcgtatagcggatattatgtctggcttccacccagaagataggagttcgattctccttggatgctccaaattactccgtatagctcagtctggtagagcgctccatttgggatggagaggtcgaatgttcgagtcattctatggagaccaaattatcggtatgacacaatacaagatggcgtaagctgagtagcgggattgcagtctcgttcagatatgctatcgagtatgggtgatatattaaacacatggattctgcaaagtccatgtgactcggttcgaggccgggcataccgtccaatcacttgccattgagaattatattatgaaatattacggcttcaaaacatcccatttcgggaaagcatatcgtacagaaaacattgatagacgtcgagcatattacgaatcactgcataaagcaggacgttctcgtgcacgacaagaaggccaaaaacaagcgaaggaaatagaatgaatatttttattggtgtatcaaataacgtaaatgctattacggtgaagctgtctttggatggaccggttaatttagcattagggctttcatcttgtgctaaacggtatttaatgattaacgctgactttgcatatgcatttgatgaacgcaaaggtatgtgggtatggattaaatgccgatatgattcactgattaaatatgaatacttcagtgagcgtgatattcaagaggttattgcttatcactctgggtgtaaaattaataaactgcggcaagttactccgttaaccgctgatactaatgtagagcaacttgtattagattttaaacaaatttgccaggcgaaatatgatgaaagattctaaaggtcgagaagtacaagttggtgatatcgttttctacggagaacgcacatacaataaaggtggtcgcggttctatgaagtgtggccgtattactgatattgcttcaggattggctaaagtagataacgactacgttgcaatgcgaagcaaatcattcgttaaggtttctcctatgttcgcaacaatgtgggaaaacggaacgattttcgagatttaatgctacaagaataacctgttattattactacatcaaaacaaacaaggaaaaagaatgaaacgtatcgcactgattgttgaccaagaagctatgttcgctgctaccggtaaatttcatccggtgagtaaatttgttgctcgcagcgagaaaatcgttggtctggtagaaactgtcgcaggtgatgtaattgtttctattaaaacatctgaaatttctccggtggttaaagtagcagttaaaaatgacttctgggaagtagctgattttatgtgtgagtaattctgcctagcaggtggataagcccgacaaggcgccctcttcggagggcttttataaaagtcataagatttctataaaggccctgtagctcaattggtagagcgttcccctcataagggattggttgcatgttcgagtctttgccagggtcaccaaattatcaactgaggaaattgaaatgcatattaaatttggacaagttattcctaaaggcttagcaatggcaattaccacttgggaaaatgatgccgaccgatattctacccaaatggtttatggcttagaaaaagaagagattaatcaagtaattcacgttcttgaatggttctcttctaatggtcggcgtggtgaatgtcttggaaataatgattacaaccatgaagcaattcttgaaaagcttcatactgaacagaagtatgtaactcctgaattttccaagaaattctttggcgttgatgttcctgcatatgattgcacagacgaagagtttgatgcttatttagataaccactattcttgttcaaatgaagttatgtatgctattcaggcttggttgggtaatccaattgaatatgactatgatttcatgcgagtatttgagaaagtagaaatcttcaacattgaagaagaaattcgtattcctgatgctccagttgcattccatgttggaattacgtataatcagaaagaaagcccattaaaagttgattggttgaaatacgtgaaggaaaagtaatggatattggttcaggtagttcatatccatcatgtgctttgagtaatttcgctcctcataaatttatctatgatggcgtagaatgtgcatcaatggagggattcttgcaatccctcaaattttcttcgcctgaaatgcaagcacatgtatgtacactagtcggaaaatccgctaagttcaaaggtaagaagaaacgttggtggccaacacaaacgctttattggaaaggtgttcctattcaccgtgcctcagaagcgtatcagaatttactaacaggagcatacgatgcacttagtaaaaatgaaggattcagaaaagctttggctgctacccggaatgctacgctcactcacagtatgggcaaaaacaaaatttctgaaacgattttgactgaacgcgaattctgtaatcaactttatcgtttgagaaatgctataaataaccagtaatataattatcttgttcagtggtgaaatcggtagacacgaccggaatagcttgtttgaaccctcggttggtacccgagtcagtaaggcggaaaccggtgcaacagacctaagcgtgcaggttcgagtcctgcctgaacaatctcgggcatagctcagttggatagagcagcggacttctaatccgcaggtcgaaggttcgaatccttctgcctcgaccatttcgcatcgatggtggaactggtatacacatagcacttaaaatgctacgccgcaaggattgagggttcgaatccctctcggtgcaccaaattaagaccccgggaatagttgcttaaacttagtgaggaattcaacggcagatacgtctgtgcaactacataaggttcgaatccttatttccgtcttaagccgatttagctcagctggtagagcgcttcacttgtaatgaagatgtcgcgggttcgactcctgcaatcggcaccaaattcgaagggaaacttgcgtatgccctcgttgagtcgtcagatagaagagaatggttcgtccattgccgctagtcggttgttccctgtcgcaagcataacctcctgacgctatactcctttggatgagactgatgcctccgagttcaaaggaatgaatttagcaggtcatctgccagtaggtgatgctgtcgattctcagagccctgtcttcggacggggctttttagtatacaataatatcaaaactacagcccagatatcttctagaggtcgtctgggcatttctatatccccagctgtataaatccattctaccctccagaaagtccttccagattccctaaaattatttgaaaatttgtgcacaaagttgtttacaacgctagtcaactcggttactatagctccatcaaaacaaaacagagtaacggagaataaaatgtc

SEQ ID NO: 2 - DNA, 112884 bp, Unknown
  bacteriophage strain capable of infecting bacteria of the genus Klebsiella
ccggacagcgggaaatcagcagttggcagaatgttaatttccgccatgaatgcaaagcctgtttcacggttgcccaaaaacacgttttcatcacaaatgaaatctgagaaagcatcatcatatttcagatcatcgttgccctgcccattctggaagccttttttgttgtaggcgtatttgctcactagcagggttgcaccgagatatttcgcggcctcctgtaaggttttccagaagttagcatgagggaaggtattattctgaatcgacgttaacagaaaacggcggcccggaattaccttccagctttcgacgctggagttaagctgaccagcggcaacggggcgggaatcttccaccgcaacacgttgagcacgtttttcggcagcaggtttaacaggcttgttattatccagccaatcgcaaatttcgctagagtgtttcgccgtgccgtaatgctctttgctcaattcgtcgcagatctccagctttttagcgcgcagacgtttaccccaaaaattgaggttatttgcggcggttaaaatagctttttgtttctcaattgcaatgatcattatctaaattctccagttaatgggatataggcaaaattgccaaatataacgccgtgttgctagtggcgttataatttgcgactttaaactattgcgggaataatactggctgatattccgaacgtcaccgctagaataataaacacaattgaccagcggcggcaaatattcgctttcttaaaccagaagtcacggcggaataaatccatttgttcactgcctatttccatgaaattatagtaaccatagagacaagcggcggcgaaaaagccagcgataagaattaaggattcagtagggaaaaagatcattttacaacctccttttcttctacgctgaaagcgtagttaagaaggtaaatttcgcgggaagataattccaacatttccggcttaaatacttcgcggttaattgccatcccgaaagtatccgcatcaggattaacccacaaaacaatatattcaggtactttgacgctgggaggcgtcattacggcggcatcttgataacccgtttcgattaattcgtcgataacggttcccgttaatttaacaacggcacctttaattaaagccatttttatttctccagttatgggggacaaaatatttaattatgcgccccgctagggaggcgcattataattattctgccgactcttttacttcatcctgaacgccaaccatacgggcgataacgtccagttggtcgagcttcatttgttccagacttgccaggccgtcggcatcttcgatcaggccgtcggcaatggcgtgctgagtgagaacgcgcacatagtgagctttacgcagggaggaaccgccgccgactttgcgaggcttatcggacttctgatacacctttgcgctaaccagtttagagcgcactttaacatgcgattcagcaccgacagcctttgcaatatcgataagaccttgcgagttagccacctccagaccttcggcagcaataataccttcatacatagaaatcgcagttgcggcgttggcttcgttccatgcgaatttttcggttttagtagcagtcatgatatatctccagttttatttaagggtttaggctagaaagttagccgctatatattctagctagaatatataacgaaaactctttattttagttttcaatttaaagctatttaaagcggcattgtatatatacgctgcctttaataattacgctattacgtctatttcacgctatagattcgtgttaactcacaattgccgttcaaagcatgatataagttccagcacataagtttaatttgcgcaccataacattgcttgcgctgcatggaatatacatcggaagtctaacatatggggaagcatcccattatttgccggggttaaacttattggctgttaagcgacagccaaccacttatcatctttgcgaataacctttacaacgtcgccggaatctacccggacgctgtaaatcttcgcgtcgctgttttttgctttttccgtttcggcgtataccgcattaattttatcaaacgggatcatcgccgcccctttgatatatccgattttttcattttctcccggcttacttacgtcgccagtaacgaaaggaataaaaacggaatcaccgatcattggggttttaacgttttgcatgtttcttactccagtttagtttattgggttatccggttaacactctgatattttagagtgttaacagaaaactcaattacccttactgagagaatcgacttttccaaatttttaaagagcggtgttgcttattgagattctataataaagcgttatcggcagattgtcaagcgttattttgtaaagattttagataacgcatcatgttatcccaaatcatcggtaagccttgctggcctccgcgctggtaagaacggtaacgccgcgccatatcgcgctgcattttgaccaattccgagcttgccattttgttcaattttgctgccggtttagatgatattacaaagcgtttcatgttgtcaacctttaattagtggagtgtatgatttcgtttagtttgcataatgatttgaccgtctctatgaatgaaggctaaatctacgtcgtacacttctttataagtcttaatgaagtattcagcgtctgctactgtgaactcgtttacaatctcgctactcattacgttttcttttaacatgttttcggttcccttattaagtaaagaaagccgataacgctttttatagaatcccaaattgttaaagagcagtgtagggcgggggcagactatacttgtttcggcctttccgttcggggtagtcggggctatgttaccgcctcctgatacctgactactagtgaaacgctttcgtgtttcccgtttcgtcttgccgccctacgagataaataataacacaatgacgtttagccgcaagcggagaattgtaaagaagcgtaaagagaaaacaggcccacgatagataggaaacgcacgcacgtgacacaatatttaaagaaagtcaacgaatatttttactatttttctttaaaaggggttgacaaaatctatttcacacgaggtgaggagatcgcctcatacccggtatgattcatcggcttttatctaaaaccgcttagaatcgattctagagcgttttagaccctgttaataacttatacaaaaagcaaaaatgaaatttaattagttatccactagacaaatgattatttttatgaaaacgcaaaataatgcttgcgtttattttatgctgtactcctgttttccgggcaagttatccacagcacaaaataacttgacaagctgagaagcggtataacgagatatccccagacttatccacaggttatcctactgtatatttatacagtatattccagcagcggtaatactctaatatacccctagaacgctctataacgcattctgagcgctttaaatttagaagccatattaaaggccattgctagagggcgcagaaaaacaaaaagcctgcttataatgagcaggcttgttattagttagctaactattagcggaataccgtttcaattgtttcgccgctagagcataccgacccgccacgataaaacaggcgttcggttttatatttggttagcaggtcatagagatccagatcatcggaaagcgggtaagattcccccagcgcggaaacggaaacaggtttacccgctaccagatcacggcaaatcagaatcagcaaaggccagctaatattgataggatcgccacgcaatccgattttaagtgtagccacttcatcaatatgccttgcattctggcggctaacatattggatcacggtttccatcgttttatagtgagccagaaaatatttgttgacatagatgtaaatcataggtatacgaccccgctaaccttccaaccggattttaaaccttcctcaatatgaaggatagtttcagcatccgggatatagataaacgttttcaattcgcgcagattaataactgcctttccgtcagctatctggatgtaacccaaatagattgcccgctctagaacggaatgaaggggcgaaccaccattaacgaggttgcaggaatgaccgggccagtacatataaaacgacccttctaccccagcattacagtatttttcgtcgtcgtcttcttcccaatcatcctcgcctaacatactttcggcatgttcgcaagccttttcccaggaaagggaatcgacgtcaattccacgacctaaaaaatgaaggtcagtccagccagtaccgcaaacgttagtatcacatttgaggacggcggcgacttcctgagactcaattcgcccgccctctaaatataaaccttcttccgcttctaccgtacaattaatgcccggtacgcaagatttcatatgaaacatggtttttctccaataatgggggcggctagagattcagccgccgggaaggggattttacagcttatcgcggaaagtatcaagccggttgttaagctctttaatcgcatcggcgtggatttcgtcatacgttgacacgatatccgccagctcatccatagttagcgaactaacaataacggacgttttcacctccagcttttccggttccggttccgctggtggcgtatccaaaaacgtcagtgatcctaaattaattaggaatacttcgatttcggtagcgccggattcgcagtcgatttcaaagctactatcgccaatacagatatcaaagccatagccgtataccccgataatccgcaaggggattcccagcatatcatcggtatccgggtaacaatcccggcggtcaatctggcgagccagattatccaagttttttggctcgatgaaaatagcaaaattgccacgatcgccattctggcgcaggcgctgccatacattagcgatcgtcatcttttcgccttcgaaggtagcggttaaccgttccataacattctccagttagttagcagggtaattattatagcgccccattatagaggcgctagatataattattctgctacgtcgctttcaatcaggctagaaagattgacgcctttcaatacttcgtcaatcatttcgcctacattgaaactttgtaccagttccaacatggcggcttgcattgcagcatccgccgcgatcaccgctttgcggttgttcggcgcatactggctaaccgcgaaattcagcaggttagcaattaccacacgacctaccgccgtgtcaacataaccgcgaaccataaacggcgctttgctggcggcgatgccggaaacttttttcaggacgatagaaccggcttccagtttggcagcgtttacagcagcgtttttgttagcggcaacgatagcggtagcggtagatttaatagtattcatttgtaatgctccagtctcaaaattattagggttaactacattttcagtaacagccggggcgacttcttctagctcgccatcataacggtaatttccagtccttgccccttcttcgatatcaatatcgtagaagttacatggtaacaggatactcccatctttgtcaagcacaaaaatcatcatttcgctagagattcgtgctggtggtagttccagatgatcacacagatttttaacccatgcgcgggcatcagtgaaagcaagcagttcgctttcatggtagcaaaaacgtctcgacgcttgcttaccctcggacgccttatacaaataagcgtccgtagtagtagacactatcagatcaataggctggctgtcaaccaaatattgatcatcgtgataaataacaatcgccgcgccggggttggctagagcgtagtcacggcaatgctcaaaggcatagccggatctactttccatatttgcgcgataaacggccaaaatatgaccaatagaggcgcacttactgccgtctaacaggttgcgagcgccaccgcgaaccatcggcaaattagcaacgggggtaaatctctgtaacatcttctgttactcctttgtttggctgagaatctattatagcaagattcccagctttttagcaattattattttctagaagcagataccacggccccggcctacctcatcccgattctcatcgaaaatgatcacgttggcattgaacgtgctacggttaacgatcatctgtattccgtccttgcccggttccggttccaccatgaatccccaagtgccggagtcaaccgccacggaatcaaaatcctgattccgtaacactgccgtaacagtaccctcctttgcaaaggtcacactgacacggcattcaataggccgtactttttcaggggtaacgatagccggggcgctaacctccgcaagtgcagcacctgaaagcatagcaaggccgaagccaacaatagcgagtctcataacattctccagtttttggggttgttcccgttcaagagatcgcattatggcggaatcaattttgattgtctactactaaaaatagtagttgcttcccgctagagttatgttattattatgactccaaataaaggagatcgaaaaatggctttttcaatgttggcgctcggtttagttggttctatgatggtttttggttttatcgctttttgcggctatgccctctatgataccttgtttaataaggaggctttttaatgagaactttacgcggtggtagtcccaaaagccgtagccataacgtttaccaattgaacgttattcgtgatggtcagaaaaaaggcggtgacggtggcggcggtgagtggggttttcgtgtcatcatggttattattatgaccctaatctttttgcagagttgccaatgatacttacaatcctatttattagcttgctatgtattctgcctggcctggtggcgctagaggtctggtcacgatcaccggctgacgcggagcgcgaattagagcgcgaaaaagcaaagcgtgacggctgcccgttgctatagggcggctttccctcctccaccgcgtgaccccttactaaaatacctccccccaaatttaaatcgcttagaacgcttcctagaccccttaaaatcgatatcagcagaaagtgttgctgggaaatactgtataaatatacagtaggataacctgttgataagtctgttgataactcgctaccgatcgattgaggcgtcaacctaatttacaattttgtataactctggggataacttaaatgatagtgtttctcacttcctttccgaaatgcgaatcattctcattcgtattcagcttatcaaacgagaataattatcattcgcattcaacttctcaaatgcgaatcgttctcgttcgcatttgcatttccgacccctgtcccttcctgcgcttatgtgcgaatccgacaatttgtcaagcaaaatattacgtgaggctgctagggtatgtgcaaatccgatgaaaatttatttttaccgccctgggggcatgtgcaaatccgacaaggctagctgacacgggaaaataatttttagggggaaggcgcgcagtttgctgcagcgcagcggtgggcgcgagtccgggagagtatgtgcaaatccgacgggtatttttggaggagggataaatggggttaattggggcaattcggggatgatgggggcggggggcagataatggaaaatattatgagttaaatgggggtaaaggggttgacacagaaaaaattcctgtggctctaaaaaacaagcgaactcacggtgacacaccgtgtaaaaaggcttgaaatttcaggagatattttatattcgcagaatcaaagattttgatccacagctaccgttcttcagtaataatgtgcatatccgacaagcgtttgagtatgtgcaaatccgaccatgatttttgaatgtgcagatccgacagtgtttttggatttaggagtaatgtgcttttcctacagtcgttttgatatgtgcaaatccgacaattgctagaaatctagaaatgcttgacttctttaatatttgagagctagagattttatatagaaacagtgacacttagaacttaggcgaatgatgtgagtttgtgtaaaacttcgtgaggactttgtggagtgacgcttaggacttgggagaatagctaggtaactagaatttggtgtgaggacttcgtgagatgtgtggaacttcgtgggattgtgtgagtttctggaaattgctttccgaaaaagtgggttggaaaataaccgccctccccttaggtgtgtggaaagaaccgccctgtatagaaagatgactagagttcaaccctagagccgcgaaacgatggtgtgtaaggattacctacttttaaacgtgagtaatcgtgagttcattcccacgtttccctattttctccttagtttaagtttaatataaatgtaagctccccaaggatttatatgagtctcaagccccaccccgacacagactgatgtgattttcgagtgtcccttgcagaatccttgatgacttgtctagacgctccgtagactacgctaacaagccagtattctagtgactactgaaaatcaccacctgtggtggtggaactccttgtttagaattgtaattttttctttcttacagagttataataacatacattttattttttgtcaacgattattttgtgagtgtttgaaaatgtaccagggctttggatgtcagccctggtttcggcgggagttatagagaacttagagtttctaaataacgtggatgagttttgtcatttgtgctatttctagcgaggactttttcggagggagtgaatcctggtactaactttctgaactctggtgactctgtccatttgtctatgaacgccgccaaacctgaggtaaagagacctgactctaggaactcttcgtgttcgtcgatgtacttctgatatgggttagtggtaataacttcttccttagtctcttgcggaaggagtggattctggtagcgtggttcttcaaaattaatggaacgacgttcacggtacacatacaatcctaggtctgatggagaccttccagagtagacagccattactactgctttgccatctgatgctcttaccggtaggtatctgttcggatatgaaactagtccatcatgcataggagaacccgtgtattcgaaacgatctccatataactcagtaaagtccatccgctcatcttcgaagatatggaacgcatcgaaattgggctgagcaaagtattcacactttagcgctcggataagaaaacgatgctgatacgctccaatctttaatactgttctgccggaacctttactggagtttcctttctctgtaacttcggaacgtttgcagaaatattccaccagccgtttctcatctaatgagagagaagagtaggttcgcccactgagatccagcagacattcaaacatcgttcctagtttacgttgcagactctctggcaactccgggaaaggtttgataaccgaacctttaaaagtgttggtttcttttggtgcgttacgtcctgcgttacttgctaatttatttttgaagttatacatctttagtttccttttacgtcgggtatgacgtctttgtttgccactttcaaaggacagtggccatcctatttaactttattcactccacctaggatgtgagaacggctctctacctgtcaagcgatccatcatcctccggtgctcccgctctctgtgttcattaaacacctgaagagcggcgaaactgtccactggcgtgtacggcacgccgttaactttgaggatatcctcgcctctgatcttgaatagcgggttgtcctgctgggccttagcgtggcattcgctcaagtattctgggaaagttgtgccatcttcccgagtacacagggtgcggagaagatagctacagttctcaccaaccggagtccatacttcatatttctcattcattgtgttatcctcttacataaagaaatcttcatcagattcagctatttctttataaaagccatgatatgcggcaactgcctcgctaggtgctgccatgtcgaataagcgtgctctttgttttaattcagctttattttggcactgcctaatcatttcttcaacttcgtgctgcagccgttcgtccacacgaaccaccagctcaccttcgtgaatagctccaactttgtacgtcaacatcgtgagatagcccgggtgctgtcgagactttttgagaaccacgttagtatacgaggttaactcatgaaagaatacagcacctgggaatgcgtaaggagttagcttcttacgagcttttactgccttaatatctattaaatgaaagaagtctttcggagtcttggatatgtcgtccggtacttctacttggaactgattccagaggatacgtactttgttttcagacatgccgtagacaatgtacgtttcgttagcttcttcaaaatcaactgtacagaataacatatcctagccctcttacttgttgtagaactctgtagcactatcccattttatgagactctcgacattggcttgatcccagatatttctggagttagtcaatgcagaaacatgcggctgaataagttcgaacttctcaaccgtggcaccactagtcagcagtaacgaggttaatgcttcgaacttaacggtatcgctaccggacagctcgcttactgctttaaccttgtcaattatagagatcattttagcttcttcgcctacgaacgtaaagcgcaggttgcggaagcggaaggagattccagcttgcaatccatgcaaccctgttgtggttgcatttggcataaacttgatctcagatactgactggtctgtcagatagttggtacttggattattcagggaatcgtatttcatctttaacctccaaaggctttatcaatttactggagttattataccaaataatggagtctccgtcaattgaaaatttgtgatagtatgctggcacggtgtaacttccataatccgtaactctagtaaccatgcggtgtctgcatttttggcaaccattgccctctaggtgacttctagcagtttgcataaagtaatcttgatggtctggacaccatatttccaccagctgatttaggctgtgaaacactagcttctcatatccgaagaataccccatgagcgtctagagcacggttaataaagatgaggttcttagcatcttgcctgaaatctggcctaagttgctttatcttattatggttgatcgaaccgtcgcgtttaaggaactgattaatggggaaggatttagcttcccatactagttcttgatttatcttctgtcttaattcttccactactcaaattcctttttcaacctctcgtataggtctctggattgcttccagttaaggtatactcgattaggttgattacctcccccacgctgagtaagtataaaacactctttcctaaccttttcgatagtaactgctgattgatctacaggattttctccccgtaaatagttgtctatagatttcatttaacatccttaaaccacgaaaggccagagcaattagccctggcctctttgttaggtgaacagatccagaaactcctctggataatcggaaggatctccaaagtcgatgtgatctgcgttaaccgggtagccttccttcgtcttgatgccctgaagaatatgggccaatacgtcaaagtctacgctgctgttgttagtgcagcttgcccaggcttcctgacggtggacgcatttaccgtccaccataacctcaacaccgtagccagtattccagcaaccgtattcgcaatccccagaatcttgttctaggaagtttaccacaacgtgtttcttagccatttgtcaccctcttagtgaatagtaccgtcgatgccttccacatggatatcgattgccattttcagcatcgactccgatttatcgaactctttcttcgaagctaggagtgcttcaccacgagctttaccatactctgcaatagcgttcagggtatgtttcaggatatcgtcggcagataagccctcagcttgccaatggatctgagctgtggcgatgttcaccataaacttactcagctcaacacgctctttgtcgagcgcctgcattacatgagttttgcagttatagaaggagttcaggcaaatgtcttcttcggtcagaccttcgaccagaagcatcttctcgacttgtgccaggcgatcaagccacggattttggagcatcaaatttttcacttgcatggtataagttcccgtcgttaattggtgcgaatgattttgcgttgcgttcaggacgttgtttagcgatccagcccatcatcatttggcgaggtagaatgacttcagtgttcagatatacctcgtaaatccagtgacgtgcgttctgatacttcccgaactcgtacgctttcttgaacaagccccaaactacgctaagctctagcgtctctgcatttgcagtctgtcggaatggtatcactttagaaccaatgagttctttcagggcggagttaatatcctgatggctgaacgtggtctcatggaactcgttgaagaaacgatagtccagagcgttattagcgttgacgaacatctggatgaacagatcgctgaactcttggtgctcacgattaaaatattgatttaaaacttcagttgatgcggccatctttccacccgttaattgctacgagatacatctcgtaaatgaatacagtgactggttgaattgcttccatgtagaacgtcgctgggacgttatggaagactgaaaccaccatggagaggaacaatgcccagcctaggaaacggctggggagttctcgccagacctggaagttgcaatccaggaagttatagattcgaagctgattaagcattggtcagtctccagtaatagtgacgagtattaaactcgaagggttcgtcggtgatcttggtgtgcagagtgatgatatctggagagtaggactttgccagatctctgcgaaccatcacagtgttaaacggagcgccatcagcacgctgaaccacaattgccaagcctagaggaggaagctcactcaaaggacgccatgagtccttttcagcaagctcaattttggcgattaaggcaattgactcaacgatatcttcatcacaaagcaaatcgtggtctactacctgacgcagagcatctactaacacttggcgttctttggagttaagattcatttttcttccttcttaatggtgttttcaatatcgtccagcaatgctgtgcagttatcgtagttaactttgccccggccaaagattctcaaaacacaggcgtagtacccggttaacagaagtgccagaggatacagaggaaccagcattgctgccttgatagtaccttttaaaccgaagccgtggtacttcccggacaggtagccaacaactactaagtaaagcgctgctacaattggtgagatcatttcttaatctccgtgatcaaccgcattttggttgtcttcgacattgtggaatcctgaccgataatctcttcaatcttagccaggcgaactaagagtcgttcagccgcagcagagaattcatcagcgtctcgtacttgatccatcaatttttcgtggagtccgttattggtcaatctcattctgcgattagtttcccgcagtattgatacccaaaccgccagacccgttccagttacgagggctgctatcaacagcccggagagaatttctagtaccattactttttcttcgccttttcacgtttcaggtcacgttcgaagctctcagcacgacgctcagcaacctgctggtgttctttggcccaacgcgcttcatttttagcgaggttgtaggccgcagcgtttttgttagtaccttcgtacagagcacgaagggccgggagcgacagtttagcaagctgaccttcgaacccatccatatccagcaggattaccagtaccgcaaccatttcgtctttggtcagggtgttagcttgttcgtcagcagttttaccagtggtgtaagagatagtgttcttagccataatgatttccgtccgtttcgttaatttatgcgtatattataccgaaattctaactacttagcaagtaaatttttaaactttttaccaatcgatccggtaagcgtaaacttcagaatgaatgtgctcttctaccagcttcttgacctctggccagttcttttgaatctcatccagaacgtagtcgtttgaagcatcatcccactcctcgggaagtttcatgaaagagcctgcatactccagcacactctctagaacgtcagtcaggtaaactatttccccgcgattgcagtaagcgtgttggtaatcccgacgatcttcgttaaacggggagtcgcttagatagtcccccatatgaagaagttcatcggcgaactcctcaaatgccttaacacgagcagacagcggtatgctttcatcacgcatcagcaggttaaaagaagcacgagcggtgttaactgcgtggcgaagggattccatatttgcattcagttcgatcattgcgtttttcatatttgcttcctcatcaatttataaagctattatacagaaaaattggctcggaagcaactgaatttaaaatacaaatgctacgagcgcccagattccgcctacaattgctgcaccgactaacgcagccaggattaagaggccaataaacatcttggccatatcatttcccattccagtatacatggttactcctcgattaccagtcttctcatgtagtcgttccaccctgcacagaatggagaaacaccccggagtagttcagtggactggtgctgcttatagtgatcttctgcagccttagccccacgtttcttctccgcccttttattaaactcttccagcacgatacgtccttccagagcttctttagcgataggatactccggccaatcctcctctagaacgatatagttcgggaaccctaccttaccgtcagcttcccggcctttaaagatcagagataagctgtcgtttatctcccgaatagcagtgctggttagatacttagcagcatctgactgcttaaatacaatatagcgagattcgagtttcatgatttacctcaggcagtgaatagaatgtcgtccagtaggtcgtccattgggcgatctttatggatctcccagaactcttttggttcccaggtttcagtgtccggggcaaccagaaccgagatactcgcgtcatctgtaaacacggagtttccattgtccagcattgcgacacatttctgcaactcgaaaccaccagcaactacgaatacttcaccttcttccaaatctttgaaaagtttcatgcttcacctattaaataatgtcagcggaaccacagggatcatcacgatttgtggtaaatgtgtataattgacctagaaccggcgacgccacggtcatgcgaccgttaaaggtgccacctgtgtccagatagacacggttcttccagcgaatcgggaacggaacaccagtatgaccatgaaacgtgtagtctactcccacgatttcaggcacatctactgcacactcctcggagaagctggcgtaacgatcgaagtacggatgcttttccccactacgatacaggttaaacccaacttcctggattacatcacgatcccacagcagtacacccaaacgatgtagaactggggcagattcgtgttcatgcacaatatcgtcccacaccggtacatttacacccataccttgagcctggtagcgtagagggataccagcatgaactaccccgtaacgcttgccacggtgttcaacggtcatcatgtacggcatcttgctgtccatgtcctctgcaatgcctttcagggtgtccgtatcgaaaccttccgtgatagtccagctaccaccattatacatccagttggcatagtcgtcttggatcatgaactcatcatggttcccacgaacagaacggaatttcgggttgtacaggaacttcgctagaacctgtaagttcttcgggccacggtcgataagatcccctacgcagaacacgtagtcacgaccttcttcatacccagcaagtttcagggcatccatcatcatgtcgtactcgccatgaatatccccaatgaagaagatattagcattgtcgggtacggtaactgtttcatgaacgttcattaatacctcgtctctaaatagtaacgttttggcagcgagaagtctgtgggctgctgcctgtgatctcttacatattcccctcgataagggtcgtatattacgtattgcactagaccttcgggttcccaggcaatcagtatttcattgcctattcgtttaaatgcgtacccattctgcttagcccacagtatgcacgagtagtccaggctcctagcgtctacttttatgccagaaaagcccctctctacattgtaggtgatgccctttattaacttatcgagctgtattttcttattatagtaggcagcagctcgatttttacgggccatatcagaagaccagtctctagagaatttttgcattatgcacactccacgtcgtcgtgttcatagccatagttagtgcaggtgttagcttcatcatcgtccttacagaacgcaacgtagcagtcaacaacttcccagaacgcttcgttgatcagagcattttggtgggttaggtctaactcatcccactcttcttcgctctggaagtctgtatgtacgtgagcatcacagcctacagcgcctagagatacgacaataaccaactcgtcatctaccatttccacgtaagcctctgcatactcccaggcggcttcattaacaagctgagtcttctgggcagcatcgagagcttgccactcttcttttgtataccccagatcaacgaaggtagtaccaactgcaaaaccattattcaggataagatatgcttgcttagtcattgtgtaatcctctctcaattcaatataaatattatatcaaaattttaagcgtttagcaaataataaaaaaccccggtctcgtattgagccggggttaggtattattcttctacgtagtcgataaagtcttggatagctttactaactaccgcagagcgaagtgaggcaccactcaagatatggtgtgcttcttcacgtccgttctccacatccactagaactactgcgggtacggtgcgaagaccgaatttacgtagggaatctacgtcgtccgtgcgtttttcaacgggcaggttgaactcagcggtgagcttatcaaaaacaggttcaaactgcttacaaggggcacagttagaacctttaaggaatacaatcttcttagacattattaatactctccaatagtgttttcattgtttttacggttgcggtatccaggtctagcttttctccgaaagcttccattacagcttcctgatacggctttttcagacgaccctcaggcactgctacttttttaacatctcctgccttgacttttgccaaaatagtggttaaagttggcatagaaagtttctggccctcaatgttaacgccgagcagttcagttagcgcattgttaaggtcaattcgggtcattttcttaccgttggacataacaccctccgatttcttagcaattttcttaaactccggtgactcacgatcccgcagagctatatttaactcgtagggagctactttaaaatgctcgcacatttgagtgtaaaatctgtccgacattttgtatctcctctctcgaatttataaatatattatacgctaaatcgagcagaaagtcaattgaatttttcattaatcgcagtacttgcctcgtcttacgaaaaatagtgtaatggggtagactgagtacatcaacacaggagaagtaagagttaggatagacgtcacccctcctgcgtacattagtggtataaatgctagcgttatagctaggactatcataccgaataacaatgccaaggacaatgagaagcaattctctagacctaaccagagccagcaaaaccctgtccctctctttttctcacatggacagcgaaacacaccaaaaataccaaatacgaaatgtaggagccatctagcaaccctagctaagcgtgttctgcgaaaataaatggcaccgcgtattaaaatccatgttgcggaaaagaatactataccgaattgaaatatcttgagtagcattatagttactaaacttgcaaacataaccacctcctatttgcttgctccatacaaagaaggggagcctaaaagctccccttaatgttacagtaactctacgtgtccgccgtcataagtaccacgttggatttcatcacggtagtcgccagagttattccaatccgctccgaaacgaacggcaatgttcatctcatttgcggcctttttaaatgcaccgacgatagcccagaatgcttctaagtcattccagtcaatcttaccattgatataaggggcgaagtcaatggctttgcccgtaacgtgtttagacttgctagggtctttcaaaaatgaagtaccattagcaatgttctgggcactctgttgtacggtacgtttgccctggatgatggtaaaatcgtgcggtgagagttccagagcacgaatagctagagccttgagtttaggatctacagtatcgagctgctggagactacggtttccaaatctgaaactcatattgatctccctagtgatctctgcggtgatgcgcagatttttgccatatagtcattaaacatacccatgtcttcgtctaccagtgggtatttctcccatgcgacggcaacatatccagcgtagatattattaaggttaaaatatgggcacgtgtacacatactcgaagtttgcactcttgaacggtggcaaacccgttccagaccacttcgataaaccttgtttattccttgcatctattgcaaagtttagaccgtctaaatgcgctcggtagagcatagacgtcttgtcaactgctttgtcggatacgtcggatttatccaactgaacgttgctttcccaagctatgatagtttggtaatcatttatagcctcaggcttgtatttaaccacgaagacagcatcagctcgagtctgtgagaataggatcattgccttctctcgtgccacatttggaaactctagtgtgcgttgtattttaacatcttgtaggaccgccgaagtagagaaagtctttaagtacgacatgacttcactcgtattagctataaagaggtagataactagaccaaccagtaaggttagcaaacgtttaagaagagaagctggatccttcgcttcttgtagtaacagcgatatcaactgtataaatttatccattaagaacctcctctaaccatttataattataccctttattggaggaagttgcaataaaattttatagttattgctcggatcatactttgagacaaatgtcaagtagaatttagataaagaaaaaggccagagctaaaaagccctggcctacttagttttattgacccgcagccttacgagcttcttgctcccggtgcgcagccatacgatctacacgttcgttgatctctttggaggtcagccaaatgtccttaccaccttctatcatctcggtgatctcttctaaagagaagaaggggtagtacagatccagcatcatatcctcaaagaatgagttgaactgatctgcatagtgctggatctcgtttttacctttaccgtagtgcgcaccacgataagtatgacccatcagcataacgtaagggtgtaccaaccagccgtggcaggctaggaagattgagcaggcagctgatgccgatggcccaaccagatgcccaataacggttccctggcagttcatgataaggttacacaactgaactgctgtatcaacgtatccgccgggactattaatataaagattaagagtgtcaccctcttgcatagttgccagagtgactgataggtcgcggtagtagtctacatcgactatcggcccatcgagatgatagtggtaaatattatactctgccttagtcgccaccatggaggcgaagtaattaggagtcttattgccacctttctgctctacgttattaatttgtcccatactgttaccttatataaagagaatcctctcgtcgcaaaatgcgtttacatttttacggaaattttccagtccgtcaaagttatttgttaccacatcatcaataaactcaggtgcaacacctctagcggaggcatgagtagattgaatagcgtggatgttgttaggggcgtgaactttaagaatactagagttctgcgcaccggggaagttccgaactagagcggcttcattatcaaaacgaacatcagaaataatactaatgtcagctttggtagcagtgatacgatctaccacaatattcaaccacaagttctcatccaccagagcgcgtcctaactccgtgccaacaaattccagcattttacgaggggacgtgtataatgggtacagcggggtctcgtgaccctgatagaagtcaggcgcagattttacaatcaacggatatagtgttgaagcctcaaactgaggccaaacgtaagggaaatcggcatacttatcgatcccaaagcgtttccagacgttggcagtacgttcgagggcttcctgagttacccaaaaccactgcttaacctcttttgttctgcgctctgccagcttttctggcgtgactccaaggattacagctgcgagttcgtaaactggagctgcaaaactgaatttactgatagaatactccggaccgaggacttcccaggcccaaaccttagccatgtcagcaaaggtgtctttgcctgcgccggcatcaccaactaatcctaaaacgtatttcattttgtttccttattgaatggtttgcaacgatattcattaagcgacacgcgataggtacacgttaatgcggtcagattggcaatataagtgtagacctgctcattacacttgcccattgtgatccaatcttggtaaggtatgcgaacatacactttaccttcttcatttatgaactcaaaattgaacgggcaagtctgtaggcttgctggccacggtaggtgttgcggctctatccccgttactgagctacttgggtctggccgttctgcacacccggatgcgataattgcagccgagagcaggagtccatatttccagttatgcatgaaagtctctcctggaactcattaactttgtcttttgccaccttggtagcaagtttaggtttagcggcaaccacgccctctttggctctagctgcatccagtttattaatacgtccatccaggtcttcctggttcttggctaggttggttatataggtagtagtgttgcgatctcgatttcgaatctctgtttggagattaccaactgtcttttctagttgttcattacggtttgatagggactgtaaagaactggacatatctgttagcttattggtaatgtagtaggcaccaccaaaggtgcctgctgcaattgccagaaacagaattgctccagtcttaccgctccatattcctgaaagaaactttagcatcgaagcccttagcaattaaccgatcacgatcagacgtagattcggtctttggttccccttgacccagcacaccgaagatatatgattctagggtctggtgccagcgatacaggtttggatcaatttcctgccacggaaaatcttccgcatggaagttgaaatcagttttaacggtaatgtttaccgttgggtcagtctcggactttgaagcatcccatgccatcgcaatgggcttgttgaaagtctctaggaacttagaagccgtggcagttgcgttacgcacatgagcatcaatcttttcgagtgtgttagtttcccaacccagacgaacagataacccctcttcttccataagctcgataaccttggaaggctcgaaggtttggaagtgatagccaatccaggtgttaccaccgttagggcggtatgtatgatacccatatagccaacgcaaagtaccgcaaatcagaaccggacgaatctctagggttcccacctggtagaccccaaacttaccgttcttcacagtctcaaacagattggcgtagaaaatgatctgttcgaaatctgccggtacgttcacaacctgcttaatctctccacgataccaaacgcgttctgcgtcgtacatggtaccctgcaggtcatatacatctttaactttagagataatacgcatctttgttctcctctcatttataaaaccattatacaacattttaagcgagagtgcaagtaatttttaaaaaagaaaagcccaacacctttcgatgtcgggcttgggtatttagcgatttaacgggtggtgttccacacagtaatcgttaaagatcttggctcgcttgatactatccgatttatacttagcgaacgggcctttcaaagccccctgtaggatgaaaatagccttacacagtctgccgatagtcttgcggctcatacagcggagttctacggcatgcttaccattacgaagctctaggatcttatcgaaggacttcaggacacccgatgcatctttggcaccgccttttgcgataatggcctcgatatctttacgggtggcaaactttgccaggaactcgaaggctttagctgacagcagcttagcagagtccagaccatgattgataccaactgccatccacgctgatactgccaggataaataaagtaaacattttgcttcctcagtttgtctttgaattagttaatggtcggcgaccaactcaccacttcgttcatcgcgggcacgactccggataggaacaggaaggtgactcctataacggccctaccgttatacatgtggattcatgttacacgtcatccgagtcttttctacttcccgtcgtgctttgcgacgttgccgccgtagcttgtattcattttcaataaccttatggaaatggtcattgatgttatcctccggcagcatcaaacgaattgttgccaactgctcgatctgtactcgaaggtgggagttaggcatgcaaagctcttgcatctccacaaagccagataaccctagagcggtcatagaggctttagcgtatactttgtcctcttttaggcttagctcaacggttatccggtagcgagagtcaaacacagtacaccactccgagggaactgctccagctcttgcccagacacagtaaggagcttcctcaaaagcgcactcctcattgatccagtctagggtctcctgaagtttaggatggagattactcatcgctatcgtcctcatcttctacctgacgaccatatcgatccagcgtcacagcgggtttgccataggttttgttcgtgtagatcttagtttccccaaaacgggtttcagatttgcgaaacttaccagcttctttagtaatcccattcgttgttacacgaacccgcccgttatcagagatctctactttgttacgctctgcggccagagatactccagagtacatcatactgaatacgatgattgctgcaattgaacgcttactcatagtcttcaccttcgttatcttgttcatccacttcaccttcgaggtctggctcgcagtcccggcagatttcctctatttggttctccgccctttcaaaagcaggacaccaccacccgcaattcacgcaccgaaagatctccatatcttccgcggtctgccagaagagatcctcgataacaccttcgtgaagattatacccgttagccaccagctcttcttcgataacattgagagcctcagtttcgcttacacaggaaccttgtacatacccgtgcattaacgggcggataatgctttcaatacttagtttgctcatgaagctctccctatcaatttatgtaactattatatcgaaaaatcgcctacaatgcaactgaatttttcaatactttggcttcggcacgctttcttttgtattcggcagctcctttttcgagttccgaattaaggtagtcaaccatggtatcccatttacggtttatccagtgacgcgtaccataatgcgagaatacctgtacggtatagtctaccggactggcgtctttgacgctataccaggcctcaggactaaactgcttgagatcgtccagctgtggagttggtatatccagagctttttgatggtacagttttgtcaggtcaaatactttctgctggtaacgttcatggtcacgatagtaaccagagagtcgctccactagagattgggctgcttccagattacgagaggttacaacgcaaatacgatccggcaacccttgctccatgaactcatgtactacacaatatcctagatccatattaacagctccagctacatttaggacacgggcaggacagtgcgtgtacgcacatcctgccgtctttatcaacaccagtaccgtgacacttggtacaggcagcatgtaaacacaccggtcgttgctcttcgactaacttcttaataaacggagcgctttcaaccattttacacaattcttcgtgagagtacccaagacctgtactaatcattttctacctctgcgttttggagtgggccaggagttagtcttgccgtgcgtaacctcctggcgggagctacgtggcataaagttattaccaataggatgttcgtgttccatttcccgagcgtaggattctaactctagaaagctggcctgggactctcgctccattctttctagatcagtgaagctaggaaacccaccgatgccgccgtagccaataagcattattttcggcacctcgacattacgttcttccagtcgtttacgaacaagttctattgcttcccgagcaattttatcgtccattacgttcccccttcggtaagtaatcatgcagctctacataagagatgttctttctttctttatactctggcttaccatacataccatgcacttctactactttggcgcgacgaggattattaaacataacattccccggtatgactactacatcacctatctccggggagtatttccaataactaggtactcggtaaacatatgttctgttactattggagaacttaattccaacgtggcgagtagttgaagccatgatataaagccttagccgcctgccgcggcatgtttagtttttcagccaattcagaccagaagtctttaccgcttaccatgttatatgctacgatgttcccatcgaaatctttgagacgctcggcctctgcctctagagtcggtcggttcttttcaacttcgagctggaactcattcagacgcatgaagttacttttgtcgcctagaaaacggacgtaggctccagctacaccgtctaccgaagatgcaccgcatttacaggtctgcattttgtggtcgaccaattccagggtgtcacggcagcattttacgaaatatacaactttactcataatcattatatccttcaactgtaaaccagcgtttaacttgtgtgaagctcacccaaatgccctcatttgcgtcgctccgtactttgtaccctgctctactatcgtgtagctctacgaagtagagcttacctggggtgaagtattggaacttgtggcccccaacaattttatactggaggccaaccccaggagtgaagcgtaatagactagctttcaccatatttcttctccaggcgtttttcacgcagttcggcttttctcttggccacacgttcacgcagtgtgccgtgttctttctcatagcgcaggtgatgcttgttgaactcacgcttcatacgaacgttatgccagtattcttggctggcaatgaagattgccgggcgagacagcctaggaacatcgtatagctcgaacatgcgcttcatttctttatattcggcatagttcataatacgatcaccgggagcaatctgattgtcccaaacccacttttcgtgctcccaatccgtatagaatgctctgataacgccaggggttacttcaatttcgtaccacgccgtcttagacacacgatcgtgatacaaccctgggcggttgaatacggggtttcgctctttttctcgccaatcatagaacgtaccgtctagtgcttgctcaacagtgcgtcgtgttgctttgccccagatgtagaaagaatcaacaagactagaacgaaaggctcggataccacgtaaagattgcttgttcattatttaatccccaatgcaagaagatggttggacagcttatccagggcttccagagcagctttgttgttttcgctcaagttgctaatagtcttctggagactatcgataacaaagtcacggactgctagctccgcagcgatcgcagacttactattaagcccttcggcggtcattgcgttgacgtgtcgggtataataaccaccagcgaaatccagctcgtcaatagcacgttcggcgtaatgcaattcgttcagttcattgagttcgttcattgattactccttatccatcatttcgaggcgttctttgacgtataccagtctgttgtgctgttctttcgctaactctgctaatcggtaaatatcggccactaactgcattgtgtggtcgtccataccctcaggtggaagcgtatctgcatacgcagtacagatagcgataaactcttctgtgttttccattgttactttcatcttggaaacctctctcatcaatttataaatctattatacggcaaaattggcatttttgcaagtgaatttataaagaaaaagcccctcgctcaaagagacaaggggcttttgtttagaggtcaggaggtgcctcagtgttcttttctggttgttgacgatatttaaccgggatcatatcatatagcatttcaatcgatgcaaatgtgaacggtacccgcacattagacggtgtagtcagtatcagcagttgacgcttttcatcgatttctatacagttagacatcttgacgatcctcttctaaggatttttgtgctctcagaacaatctggtttatttgctccagagagtcgaaggaaagttgcaggccatgaccttcatcggtggcttgtatgaataaaactctcttagaggcgtctacgaagacttgaaattcttgttccactttactctccaaaaataattacaggacactggttttctctggctatacgagccacgtaactgtttacgctatgcttaatagccaagctaggctcgtcaaacatgacgcagctgaatcgacgacctatgcgataggtttctagcatgctatacgttgtaattttaacgtgaggttgaagctcattatacttcttctctaagcgtgccatttcccagacaccggatgctacatatactgcttgaatacccttaaatactgcaaactcatatgctgtattaatagcctcaaacgtcttgccagtagctcgtcccggattgactgatagaggccaacgaaggtcaagttctaggaacctgaacagttggttacgatctatgtacatgctggctccttaaaccaaactatacggaaacctgtctcgtcctccagagcctgtacaatttgttccagtgtcagaactttatcggatgagaatgtaaagagaaattgctctaattctgcccaagactcggcctccataatcggaacaccgatttctcggccgaagtagtcatcagtaccacggacgtcaatacgaccaccggcgtaccgtttagcaaacactttgcgagttagttgtcctccctctgcaaaacgattaggctcggttacttccgtatacggaatgcccatacgaatgtaccaattgttggagatcggccccataaaattggtgctataagtgatcatgatcacccctttaaattggcaaaccccaggagactcgaactcctactgcacggttttggagaccggcgtgctgtccagtaacactcggggaatagaattagctaccgtggtagacagatactgtcttaccattctgattcataacgtaggctacctcatcttctttcaggaagatatgctgatcaagaccagcaatagagatgcttttctgcttagggttaaacccaacgcttgaaccatcgtgaatttcttcgccaccgctcggtgacattactttaactgttaacatttgcttctcctatagtttgccatctctggctgttaagtgacgtcctaactattatagagtcgagttccaggcagacgtcggcaccctggactacattggctctagaacagtgaaattagatcgataaaatggccttaccggctcccagttccttgtttaattccccgcaacgtcaggggacggtcattttaccgaatttggagcgactagggggaatcgaaccccgctcagtaccgcttggaaggcggacgctgtaacccgtacagttaatcgcaaattattttattacgcaagtgcagccacccgagaatatagatccgtaacacttgtcacacataacgtcttctattttaagaactttaaatctcatagagagttattacctgtagtaatatttatggtgctggcttccggaattgaaccggaatttaacgacaatgtaaacttaatcacactgtaaccataaccagcaaaaatggtgccccaagtaggaatcgaacccacgacctaccgcttacaaggcggttgctctcccggctgagctattgaggcaagattggtctcccctaagtgatttgaacacttgacctgacgctcccaaagcgcccgctctgccagactgagctaaggggaaatatttggtacccactcccggactcgaaccgggaaccctgaagtcttaagcctcatgcctctgccaattggaccaagtgggtgttaatcgttatccaagtaggcttctatagcctctagggcttctagagtagagatattgaatctctctttaagcactaccactagagtttcctgattccaggaatctacggaattaatgtaattctcgatgaaattagagtagccgcccattatcgaatctccagaccttggaaataccgcgggaacggagagcccacttcaaagctaatgccccagttgagttccaccagctctgactcatccaaaagcagatcattgccttcaaagatgtagccgtatacagttgggaacatcgctgctagatcttccatattggagtaagcattatgctcctcacggaactgctcaaactcttcaaagaacttctcaaggaagaactccggtacaatgaacgttacaacgtcagtgctgtcatcaatacgatagaccgttgcctggaataggccgacaccgaccaagttgatagcaggagtagtaaagatatccattattaatataccttgattaaagtattgtcgatggtgttcaggaacttaactgctgcgtctctattagagaatgtctccagcacgataatgttgttctcaggatcaccgttacgcactcgtatctggtacgatacaatcacttcccagcggaaccataaagctcgtggattatatcgcataagaattttttgattcattaggtaagccctctcattaatttatattattatattataaataagagtgtttagcaaatgaatttttcgaactttcgggaaaatgccaccctaagtcaatgccactacttgagacgttataggcaatctatctcaagttgtctgccccattgctttcagtgatttctgcacgcagaaattcttcttgactggaggactttaccacgtcaaacggccggaaatcggtggcttattttatcctgtcacccatcacctgcttgtctgagtttaatcagagagcctgtaacgggctacttgggatttggaagtaccagttgggttcgaaccaacgcaccggctaacctagagatcaccagacgtttccaagtctgctcattaacggccagctgctttaccatgagctttaggactattcagctccataagctattgatactattaatttggtgcaaccggttcgatttgaacgaacgacccctggactttcaaaccagtgctctcacctcgctgagctacagttgcgaaattcatgcctgctcctttgaatcaagaagtccaccccggtctttgggtctttgcagtacatcacgctgctctgatgtttggtggaacttgggagactacgtgttactcccctcacagaccgggattccccgctatccatgatgcttaaccgattagctgaagtcccataatgtggtagaccgcccgggactcgaacccggaacctatcgcttaaaaggcgagtgctctaaccattgagctagcgatctaaaatagtgtttacttcccatacatgagcatagcagctttttgatactatatgggtttccgcttctgttaaagcggcttcaaatgtatcatgtaacgttgtaccttcgaatttaatacttgaatctcccgtttgggactctcttgttacaaacgccttatacttaatcatgagtacctctggtgattggagcaccatcatggattttaaccatgctgcgagggtttgcaagcctctgcctagtcactcggccaatgatgcattgtttaattagggcgcaccggagttccaccgattgctaacgcttcactgcaacctaagtcgctgttcttaccctaaattggcgggagaggtgagattcgaactcactgtcattcgcttaacaggcgaccgcctataccacttactgcttctctcccaaataggtttaacaaccaaagcgctttcgtccatttaagctataaggcctttatgccgcctgttgcgtacgcgggattcgaacccggatctctttgattgtcaaaattggtgggggaagatggagtcgaaccacccgagccgcaatggcaacgattttacagaccgctctgctaccacttacagaatattcccccgtatttgaagaagctctcgtgagaacctcttcaaatacctcgtcgaaacgagatatttgctaacttattgtgactagggctgacccttgtgtccgaggatacctctagacggtcatatctcttagcccagagagaatttggcgcggctaacgggattcgaacccgtggctccgacgtgacaggccggtatgttgaccgctgaacaccatagccgcttaatttgttattccggttcgtactccatcagatcgtctgactcacatgtcggacactcccaatggcattcacttaactcaccgcaatcggaacaaatgtacatttttacttcgttttccatttgcttttcctctttcgtttcaatataaatattatactaaatttcagagtactaggcaaatgaatttttcattaatcgtcttcttcgtcccacgagagggagtgcatgaagatcggtagaactgtaggctctacgtcaagcgacgggtagaagtaagttttaccttgagacaggtcaatgaatgtaggagttctgccctcctgcatgtgctcatcaaccttgtctagggcgtcgtttaacagttcgaagcagtcagtattcgctccgcaaacaacgataaaatccattaacgacccccattcgggaaaccggaggcaagcaggaagcgaacaacgtcttccagcgacgggccttcgccatcttcttcttccagatggaagggcaggatagcgtactgcatatcggccggagctaccggagtaaaggtaggctctgcgggagcttccgccatgaacactgcggttccgtcaaccagacgatcgatcgcttcacagacttctagctgttcttcgatcttggcctcgcgttcgcgcattagagccagcagttcagtgcggtactcttcgatacggcggtctagagactcgatgttattggacaggttatcctgtacaatcatcaggcggactacagcagaatttccattagttggacgtgtgtacatagtatttcctcagttaattgttaaataaagtcaccggtagaaactaccagtttaatgcttttacggaagatttccttgtgatcgccttcggctcgatgcaccataatggttccaaccagtttgttaatctcaatttctacatctatgataccgtagggcatagcatgctcatcggtaagcctagtccatagttctggctgaagcgtacagctataaaagaccatccattcgtgatctccgtcccatccggcccaatcaaccaccagtgcagattcaataccagttgcagtaatcttttccatttgctaactcctctcattaatttatgtaactattatacagtaaataagagcgtttagcaaataaatttttgaattatccgctccgaagagcggtaatccaggcttgcagctgttaattgcacttggtttgaagttgtctaagacattaactgaaggttgatagccttcccgtttctgcaattaacaaatcccaacttgtttttaacgtggatgcttgggtattaaaggaaccactacgttacacactagggccgattgccggaacctagtcactaacgctagggcaatgaccgtctaagtccctagattcgccatttatactcctggacggcatggagtcgattccctagacttttactcagcattgcgctaaaacctgtaaaggtaaggatggggtattcttacgaatctgggatcatccccatcagaaattacagcttctcggacgttttacggccctgaccgaagtctcactgtaaattggtacttgctgctggtttcgaaccagctaccctcgccgtgtaaagacgatgctctcccgattgagctaagcaagtatttggtggtcaatagtggactcgaaccactgtagtctcacgtatgaagcgagtgcataaaccatctctgccaactgaccttatttggtactccgaactggactcgaaccagtgacctaacgattatcggtcgtttgctctaccaactgagctatcgaagcattattgttcttgctggcggacgcagatttcctcgtccgggtgtatttgagctattctagcatcttcttcagcttccttgtacgtgtcatgaaaagccggtgcccaaaatacgatctcttttgtgtgggtattaattagcataccttgatagcggatcatagttacctcaacgtttaccgtttcgtggtgctccgggacgtttagcagcttctgccattcgtttcttaattttagcgatattctcgggtgtttgttctgacttgcgtaagcctgtcacgttacaccagctatcaccatcccaggaagtaattagcattactccagtacctagtactcgttctgtgaaagagattttcatcatcctctcctagaattggatgctccggcaagattcgaacttgcgatctccagcttatgagactggcgaggacggcctctcctctacggtgcaattggcaggggcagcaagattcgaacttgtgacctaaggcttcagagacctccgctctacctactgagctataccccaattatgcgcactctgctgagtacaacgttgtgtctagggccagaacataaatgcttgcatttatgggaggcggctagaagagggatgtgacccagagggctaacctcgtcactctcagcagagattttatggtacaccatcgaggaatcgaacctcaaccatagagttcgtagctctatattctatccattaaactaatggtgcagtaacctggagggatatcttggactcgaaccaagatagactcgatccacaatcgaggtcattatccagttatgataatatcccaaatttgagtaccatcgagggctgatcagacctccacaaatagtatgtacatcgcacacactatccggttagaccgcgtattggtacgttgcacttcgtgcagcatataactccaacaggcgactcatcgaacgatgatactcaaatttggtggccctaggaaactcttcccactaacaactagttgattacttctggattttcgcccagaaaattctctagaaaggggcaaccgttactcgtcgggccattgtgaatgggctggtctctcagccccggttactacttgatccttacgatctgacggcaaccacgtgcagcgacccttcatatattgtatagtgctcagaaggtcattagaagcactacaactttcgttgtttggcggaaagcgaaggacttgaaccttcatgccctttcggactcatcattagcagtgatgcgtggctaccagtttcaccagctttccagttgtttggcggagaataaaggaatcgaaccctcaccgtttccgatggcgactgatttcaagtcagcttgctcccatgagcactactctccagttaatatttgctctacttctttacggagttcatcaggatcggcatgatacgtgatttcccagacgtacagaactccgttagcacaagctaagtcgaagatctcgctttccggtagcaccagccccatacacttaatatgaaactctagggcttccttactcggaaaggtatggactttacggaactcatttttcttacgatccaactgcataatttctatgttcatcacgaactcctgttatttggtagggatggagggggtcgaacccacacggatatttcaccactagaacctaaatctagcgcggctgccaatttcgccacatccccatttgtttggtggaggataacggatttgaaccgttctgattcccgcattgcaagtgcggtgtccactcccagcagacccatcccccaataatttgttaaggcaattaatccggtgcgcgtaataccctgagcaattagccatgcaaggatacccgctcttcacaaatacgatacactctacgcttaccaggcgtttcggagagccactccgctattcttgcgaaccctcagttcaatgacctagcaagctgcaagcgtgttttttggttccggctctgtatcagattaattccttaacaaactatataaatattatatcaatttgttaagcatttagcaactgaatttttcagtaaatttggtactcccgacggggttcgaacccgtgttcccactgtgaaagagtggtgtcctaaccagcttagacgacaggagcattttaaatttggcaagggaaggaggagttgaacctaccgatctcggagtcaaaggccgatgccgtaaccacttggctattccctttcaatataaatattatctcaaattctaaagcatttagcaattgaatttttcaagtattttggtagtgacccggcaacgcaggtcactatgcaaactactcgccgtggtctacacgaatgagcggacaaagtttgtccttcttatagattcgcatcttctggtagatgttaccgaagcgaagctcttcatcgcgagcattatactctttctgtgccctttcaaaggatttactcgcgttccattcctggatccgatcccctatcttagcgcaggtccagccgatcccagatatcgccagcaaaatcactactatcgtagatagtcctgctagacttaaccctacaagcatgtaccagggagtaattcccagctcaaaggtgaggcccaagaacgtagataagatacttcccatccccaaggagaagagtacagcaatagcagttacgccaatctgtagcaggaaataccacactgagtgccaaaataggctacataaggtgactctgttgtcgttcagccgataggtgaaagacgcggaagagaaattaagccacttgtagaaaaaacctttacgtttaatattcagcatatttagcctattacttgagttgattgattaggaaaacttgtagcgcgataatgaatgcagcgtaggagtcagagcctttaccaccttcgttctcattaacttcttttagtagggcttcaaaagctgctttgtgacgctcatagtgccctctgactgtcgggccagcatcctctaacatgcctaaaagcatatagtactgggtttgtaattgggcgtccattagtcctcccacacgattttaatcgagagaagacgatttacaggaatgaccagcatagtctcagaccgtttattaaggatttccaggatatccccatcacggtagagcagacgtttagggctgatatccgttactgtggactctagaacgataccattatcatccacaaaggatacgattgcgtttttagtagacattttagtctcctgttatgaaattggtggctcccggaggattcgaacctgcctaccttccgcttatgaggcgggtgctcatacccaatgagcttgagaaccagagaagggctatttctagcccttagttagttatactgctgcttcgttttccggggtgccttccacctgaggctcttcagtaggggtatccgctaccggaggttcttccgtaggagtatcctctaccgggggttcttcaaccggctctgggtctttcacgaaacctgcttcttcgtcggagattacgtacagatcctgaatgtcttcggtattgatcatacgagctacgctaccgtctttatagaatacggttttagtaccttcgttgcgggccatattcgcatcaataaccagttccgtcagaacatctttctttaaatattcgattttaaatgccatgttatcctctactttctctttgatttaaagaactattatacaaaatttctgacaaaattgcaagaaaaattttgtagaattaatctcagtctgcgccctgcgggctttttaccgctgcccactgaatattacgtgtgggcagcgattaaagtggtactccctacaggattcgaacctgtgacccacggtttagaagaccgttgctctatcctctgagctaagagagcattaataaagtttgagtgtttttacgaccagatcatgaacctgttcagaataccggccaatgctcttatgcagcgactctttaaactctagagtacgtctagcgattagctgtttctgttccggggtcagattaggtgccggacgttcatacggaggagtatgcacagatgccaccattattagaccttgatagagtttttgagacgatcgcattcagcagcgaactggacatttagggttttgattgcgtccgtacactgatctatttgtttgtctagagctttgataagtcccagcttcaccatatcgtagcagggtttcatctcgaaagtatagtttcgggtcagctctccacacaaatcaaacgtaagatctccagcgcgtaatgtaaagcgctgttgcgtaccgccactgatgatttgtttagccttagtcagctcactacgacgagagaccatagactgaatatcagagcgtatcttagttaacatacttaaatcgttcatatagacctcgtcaattagtatctttaagaactctcttaaaagctcttaaagataccgccagtagcaggggacgaatccccctattaagcgtctcgttggtacgcactactgtcagacgtatcttccagttatagtcaaggtgactaatataacccgacatagtttccacagccgggcacactccaaacaggggcacttctagcctgtgtaagggtgctataaatagtggttatgctttcgctcggggtgactctggtcatgactccattgtcacatgcttacacagggtatacgagcttccgcggagctgtatactcaaccgtgtcccacataggtctcggagcggccgtttgtacggacggctatccgaatactctttcccacttagaatcaggtgagatcccacctcaccaaaagttcatacgatcaccatgccgtatttaaggattatttttcgtcacttaaaggagagacgtcctccacgcggtctgttaaaatcacacctccgaattttcgatgtgaagttcatgcagattcagcttcaaactggtttaggtactgcataaccttccagagttccgagtttggatgaggccgtcaggtttcctcgtggtttagctgtttcgttcccgcgaatctcccaagtctttccctgagaggggaggaggtactccagcagcgagtggttcgccaatagaaccatcagttatctagctctttccgaccacaggattcgaacctgcactttccgcatctggggatagctccccgcgtgcagaagtctaccaattaacttaggacggcagtgttgctacataagtgatttcgacaccccactatggtggcaataactagcaccagacgctatacacatgtctccaatttgcaacctaggcaggtcagtgtgggagctatacgagtttctcaggctcagctccccacctctccggcaggccacgcaccacgcttcattctggtcgaacaagttaaagtgagattccaccattttctataaatcaggagaagagtttacgagactccgggacagctcccgagttttacaagagatctctaacctacgcccgtccaatacgctccctggccggtatccggactggatgcacgaactttgtcaggtgatcactcttaactcaccgattctattcaacgaatcttaatgctcgacgagtcttacattaaaacaagttcagcgtaatcggcccgctgttctctctaatttatgaaactattatatcaactttttaagcattaggcaactgagattttaatttatagaacacatggttgccaattttacttgttcttttgaagtccttgtcttttgtccagtaaggtttagtatccttactgtgaaagtacaaagctcccttcgtcggatctactggaagatccatatagtaaactagtctagctatctctttagcttgtttccactcttcgtctttacgatcgagtttatgtttctttttaccaacccagctgaactgccctggttgatagactactttacaatatgtggacgggaattttccatagttaacacgatttttcgttacttgtgcaactgcggtcattcctttaactccttctcctctagcttcaaagtacacatttttagctatgcactctatctcatgcgcatcaatctttgcctgcgcatggaagctagtgaggatggagatcattagaatggctgctttcattatttctcctttactctttgattcaagaataatagtatatcaagaaatcagccatttagtcaaatcaaattttcaatttcgattcgatagttttaatacagtacgcttctaccagggcgtcaaacaccggatcatgttttgacgggtagaccccctcaggaatcagattgtaacgctcgattacgtcatgtgcgtagatttcagcacagcgtaccaatgctttccaatcccctcctagagcctcaaagtagtcacgcgggttgcgggcgctagaaatatcccagaacttccacggaacgatcgcaggatcagatggagaaaagacgttagcctgagctgccactgtttcatagatggacatgtcgaactgcgggccattaccatagtggcgcagagaacgagtgtcaatgccctgctcgtcgataataccttcgattacctgttttgcctctacgaacgggcagatcagatccatgaacgtatgcttggatactggtgactcatgagtcgggttgcaaaccagaacagtagactcgccgtctttagcgttcagagcttcaataatggacagcgacggagcactaccagcacgagcctcattcatccagaatgcaatagttccggcggagactttagcaccgagggccaactgctgggcaacgttaggaatgcctagaacgatataaggatctagcgatagatctttcatcagtacgaaagcgaaagacggcatagcgataaaggtgctcttgcaatctcccggagttcccagagattcgatatcgcaaacagagatccagcggtcttgtaagttttgcatattgtttcctttgttattaaagttgcttctagatgtgttatcacatttagaagccacctccggtggtggcttagtcatatcttcggacacatcccagttttcttccatagacggccagtcagccgcccaatcttcgagttcttcgtagcacgaatccatcagttcccgggagttgaccctagagtaatctagggccgacttatgtgtcgctgcacgattgaaatcgtttttagctacaaaatttcgcattatgccttcttagctggtttgcgtttttgattacggggcttatttgccttgcccgtaaatttaatacctacgccgtagcacagagcgcgaacattctcacggctgtattcgcaaccgaagatattcggcttgacgctgccgaaacggccctgggtcttgcgcagaacttctttggtgtccgccttatccggcgtactccaaccaacgatcttggagacgtagccagaggtagaacccttagttaccggcttcttgcgacgcggggccggtttgcctacagctgatgctgcttgagtatcagccggatgtttacgcagatgacgctccagacgtgctttgcgattcgcttcagttttgggaaaagttgcaactttggtttctactgcttttttagaggtctgcttagccatgatttatttcctttgttttgattggtttcgttaatttatgaatctattatacgttaatttttagcgtttagcaactgcgttttttcattttcatctacaagctcatcgaagatgatgagctcgtacctgttaccgcccgatgtgcttcgcttgctcttccgagctgatgtactggtacccgcctttgttgtacgctggtgctgtacagagtttctttcgctcaatttctttaagagcggctcgttctctttcagccatctcaggatccaggatttcccgtgcctgcggtcttggtggtagacgcgtagagggttccccgattttgacgcttccagaaacgcggcgcagagatcgagctggtactgtggtacgtttgggaacaaatccctcaaatctggtgccattataattcatctccacccctcagagctttccactccgcttcaaagatttgggcttccatacgtgcgattcgcagtttcattactacccgatccacaccgtgctccatcagcagcacttcgtatttcatttcactaactaagcggcgtaaattctccaacatcacatatcctccatttccagttcggtcatgcgaacatttagcaggttatctgcagcctcattaccttctacaccggagtgacccttaaccttaacgaaagttgggatctcattatggttgagacgatacttcttgagttcgtcaataatccacttccactggtctaagttcagaggtgtctcaccgtctgccttcttccagcctttacgttcccaaccccaaacccaggactcacaaccattcttaacgtaggttgagtccaaatagattgtcattggtcggccaggatttttgttagaccatagcagagcctctagaactgcttgaagctccatctcattgttagttgtgttgcgtttgggagcagacttggtgccgatttgctcttcgctggagttgtaaactaccatagcccaagcaccaacgttgtctaccccacgggtattaccgcggcaaccgccatcagtataaacatgaaacattatgcgttctcccaactaatagtgatgtagtcagtatctctctggtcgaaagcctgatttacccgtacctcgtacccagactgctctagatcaaggattatttgacgacgcggggcaactgctatgccgtttagtgcataggagtctacttctgtcttaccggaagtggcggcgccatcgatagcggagataatagctcttcgagctgaagtcactgctatatcatttgcccgtttggctttagctgccattgcttttgcatcagtaaaagacatattcatttcctctctcaaatttatgaatctattatattagaaattcacgtggtttgcaaatgaatttttaatataagtggcccgaaggccacattatttacctatttttagctggcggtttaggggcaaactgacgcattagtgcgtccatgcccttgtactttaccatccctaggataacgtctatatgtagtcccgaagattgaaccagaaacttcagctgagactcctccctttcggagaaggttattttggggcgtctgttaaataatcccataagtcctcacgcagtgaacggataggcaatagggtcatgagacttataccccacgattttaaagtcgtccttagaaacccaggtgagtacgtcctctagggtttttatttccgggttgatctctagacgaggggccgggaaaggtttacggtcgaattgtccatgttccatgagaaccttgtactgattctcgtagatgtgcatatttactatgcgctggtttgctctgattgcccggttccctgtgatctgggccataagcgcaaggaacgtgtagcattggaccatgttaaaggcttgtcccaataggaagtcattggatctctggaaggagtcgagatacagatttccattgagtagcgagaactggtgggtatgcatgcacggtcgtaagcatccttgatcaaattcgccagggttccagaaggtgagaatctctccgcggtcatcaatgcctcgtcgtaaattctcgtagatcttatagagttggtcaaagtgggaaccatccggtcgaagccacgttctgccctgtaccccatagactctacccatatcgtcggttccctttctgttagggttgaccagccacgcctcgttttcgttggcgttagcgttccacgtattgcagccgatagcacggaattgttctgcggaatcatatcctcgcagatatccgataagctccatgatggcctgaagggcatacgctttacgagttgtgataagtgggaatttctttccgagtacatcatattcaaagtttgaccctattacggttaaacaacgaacccccgttcgaggattctccagccagacaccttcttcgagaatgcgtttgccttcattaatatagtgaatcacagatagactccttccataacaaaacgatagcgctcgttttccccagaagctatatgagttactacagcgtccggaggagtagatgtaagtaccgggtgttccagatacatgatgtggtctaggcttggtactgtacccgccctaggataaatggtggagcgataaatcgcatccagacagcccatagttgctagagtttctagcagagctttcccgccgatgcagactacttctacttcattacagaagtcccggattttggaacccaagtgggtaataaaccgcacgttacggggaggattttttatcagaaccggagccttagaacctactacgtacaccatggatttcttttccagtgcttttttcagtcggggaggtgccgttgtgtaggtattatgtcccaggataacaacctgataggtatccaggattttgtagaactgttctagttcctcggggatggagccccagggaagttccccgtaggcatccatcgtagccggattaaaaatcccgaaggctccatcaactcgcattgcgtataaagctgtaatcattacaggaactctccaaattcgtcagacagatcgtccgggttagcctgagaggttgcaccaacacgatagttggtaatctgtgcttcttgcggagctacttgctggttcttggtgttcagccaacctttcatccagccaataggatcttccataattaccgggagatcttccggccacggaatgttgattgccataaatgccaggcgtgcgttgtaatacaggtactctaccagcaaatcggcgttcagaccaggaatatcttcgccctccgggaaaatataatgcgcccagttaatttctgtctccagaatactgcgcaggatcttcggagcattagcctgagctgctgctacaacatggggaggaaattctccactctggataatacgcagaacttccatcgccataacggtgtggagcgcttcgtcttttgcgataagctgtaggttcttagcgatacctgtcagaatatcgttctccgccagagcaaaggtacatgcaaacgatgcgtagaacataatggcttctagagcgtatacagcgtagtagaactctaggatcttctgctgtagttgttcggtcagctcttggaattcgtggggcgataggcacatgacatcatcttcctgagccagttcaattgcctctcgttctttaagccagatctccgctaattcggccagttcatcgataacagaaaccggcagtgctagacgtgcgaatgcttcgtcgttagcctgtacagttgcaatgaagtcgcccggattagggagaacgttgcgaataatgttggaatacgcacggctgtgaatattctcaaagtagctccactggataagcataccttccagctcaggacgagataccagtttcaaaatagcatcttccggagcacgggtgataatggagtcggcttgggtttgccaagctaagttcagcagggtcttgtttttaatatgctgaggcagattaggccattgtttcttatcggcttccagggagatctcagtctcaacccagaactgcgagcgttgcagtaacgccagttcctctaggcgaggatagcgaacgtttacgtagtcagcgatccccaggtcttggcccaggaatagtttagactcagtgtgatcccattcgcggttaaatactgttgccattgtttaatttcctctctcatttaatatacgaatattataacaaaaaatccaacctacttgcaaataaaattttgctttcggttggatcgagcttaattacagagtacaaccgccactggaacaaccctgctctgctgcagagcctccggtatctacgtcaaagtttgcgtagtagaggttcttaatcccatatttagtggagttaaggagatctttgataatctcagtacccggaataatacctccaggatatttgttaaagtcgtagtacaggttggcgctaatagcctgatccgtgaacttctgcagaaccgctaaccacttgatgtgctcagtacggtcaatgtcgaacgcatacttataggactgcatggtgtcccaatcgtctagaccaggggctacagtaattactttgttaacgcccgaagtcttgatagttactgcactgcgaggaggctctactgcgttggtaacaccaatcagtacagagctagactcacccggcatacttgcagtcagaacggagttacgcataccgtgagttttgatctcttcacggaggctctcccagtccatttctagacctacggaaaccaggtcatccacagtcttcttataagtatcgatcaacagcgtaccatcagaagtgtgagtgcggtggaaccattcacatgggccgatctcttttgccagacgtacagacgctttgtgaaggaagaacgatgccttctctgcctcacggtggatccagttacgggcttcttcgccttcgaatgccaggccttcagcggccatcgctcctgcagcgttcatcagtccaatacctacgttgcggcggcgtaatgcagtgtatttcatagctgggaatggatagtgctgaatctcgatgatggtatcaacgaacttcaacaggatgtaggagattttctcccattcttccagagttttgatacgacctagggcgaatccgcctaagttgcatagagatacttccccgtactctgaaacatccattttatccagttcttcgtctgtacggtacagatctactacgtggggaatcgggaacgttggctgtacgatctcaacacaaaggttggacatacgcaccggatctttgtaacggctgttgcggttcacttcaccagcgtccatagtgtacaggcggcccgtttccatacgtacagttttccagaactcaatcagttctgcggcaggaatcaccggggctacagggagaacttcacccttgaaaccacgtttggtaacacccgctagacgtttttcggctgcgatgtatagacgttcaaattctgctacgtcgccggagtcaaatgctgcgtatacttctggagcgtacaggaagctcatcagtgtgatgttctctttacgcaggaagcgtttcaggagaatactgttaaacttcaggttgtagtccatcttatcgattttcttttcatcaggggaacggttgctcttagcctccattacctgaatgatttccggatcgaagaacgcagtgtaaacagttgcagaaccaccacgagactgctgggtgttagcttttacggagcggtcgatgtgtcgataatatggcagttttccagagtgtgggaacgcgccttttcgcaccggatcagcaattgatctactctcaagatgatagccgatccctgctcgggcagcgaccattttgaagacgacgtgctctgctgcgtcaatggagtccagggtgtcagtaccatcaacaagacagcaagaagcgaagcccctgtcagcgctccgaaggcccacgagcggcggagttgggacgttgattttctgtagcgacagcgcgttataaaggtcgattgcatcgagcatactccagtgaggttgagaaagcattgccattgccatacccatgtaggcaaactgcggagtttcatagatctcttccgtatagatattacgtctagagtatttgtccatgaactgcttcagaccggcattagtgaacagttcgtcacggctgtggtcaataacttcgtttagagcttcaaactggtcgtcagagatccagccgctcatgtcttcccatgctcccagctctaccatgtggtcgtggaagaaacgcagagatggcggggtgtaagaatcaaacaggttcttacgtagctgtgctaagcgcagctctagggcgaatcggtcgtaacgatgatcacgctcgatcattgattcagcagatttaatcagcattgtttgcagatcgtctgagtgtacatcacctttcggtaggttcttaactgcggctaccgctaccggagaccacggcacatcgcttcggataccgatgtattttgcccagtcattcagcttctgagccatgaacggctcttttgtaccgtcacgcttgataacgtattcaatacgttgggtcattggtaactccttttggaagttgtcaggatttaaaagatattctactttgttttcggccattttgcaaatgagattttacagacaaaaacaggcaacccctttcgaggctgcctgtgtgtcggtctactttaataaaagtgtaattttttcattcgactaactaactctttagtaccgaggggttggttaggaaactcgttcgctatcttgaaagcggcatggtgtcgccgctcatcctcaggatagttagcattgtatttattgactgttgccagggatactggatgcactttcgttttacgagtgcggaagttgttcagtgtaaatacgttgttcatacacgctcctagagttagaggtcaggacgttcgtcgtgagaagtgataccttcaccgaagcctacaaagccccagttttcttcagaggtaataccctcaccataaccaatgatcagttcagtaaccatattagattcccatatcgttaaagattgcctggaatgctttggattcagcggaacgcacgttatcatgcaactctactaaggagaatggcacatgttcgtactgatcgtagatatccatgatcagttgcagaccagaatcggatttaatgtctttctgcgctacgtcgccacagattactaatttgcaatcctgacctacgcgggttagaatacacttcattgcttctacggagatattttgagcttcgtcaacaattacataagaattgttgaaggtacgaccgcgtgcatgttcgatagcaaggtattggattgccttgcgttcaaccagcccctgataagaacgttcccctaaggcccatttaaagccatcggcgattggttctaaccacggtgccatcttctcattcagatctcctggcagcatccctagggatttaccaagaggttcgttcggacggactaggatgaacttctcgtacacagaaccaggcgttgctaactcttgagcagcgagaacagatgggataaacgttttacccgtacctgcttctccgataccaactgttaccgtaaagttacggatggtgctgatatagtgtttttgctcagcgttcttcggcttgagttcttttgcggttggttgaaaacgctcccgtgcttcaaaatcaacagggatgacgttttcgtgacgttcacgttttgcgctaccgttacggcgcgactccttacgacgtgctgcttttctcattgcgatctccttagaggtctacagagggtcaaatttcgaccatgtttatcaatttagaataccagtataccaagttttgccgtggattgcaactgaaattttctagaatgatacggaggacatatcctttcctttattcgcgcgatgcgcgggcgcacacgaataatataaaatgggggagataggcaaataaaattttccggcttttattgttttgatgatccagatcaagttactgttgattataataaaataaggttgacatagctgtgtctatttgatataatatatgcctaactggaggaatatatgaacgaattagacctgattgataatatctatagtatccttgataacgagggtgaagaagaccttatgtttaataatgccaataaggcaagcgagcagtttcctacacagagggacatgatagctggagaggtttctaaatatgtggtggcacaggagcttccggcatacctcttggcggcgcataatagaggggagatacacattcacgatatggactaccgcgcacaggggtatactaactgctgcctggtggatttagcggggatgttcaagaacgggactaaaatcggtggggcagagattgaaactccaaagtctatctcgactgcagctgcggtaactgctcaggttatcgcccaggtaagttcatgtcagtatggaggtacgtctatcgatcgtattgatgaggtatttgccccgtatgtccgtaagtcttatgataagcacttagctattggccagcgttggctgcacgatagtaagaaggctgcggtatacgctactgaaatgacggagaaagaagtatatgatgcttgccaggggctagagtatgaagttaacactctattcaactccaacggtcagcagccctttgtgacatttgggttcggcctaggggaatcctgggaggcacgtatgttgcagaaagctatgctggaagttcgtatacgtgggcttggtgcctcaggtcatactgctgtatttcctaaacttattttcgcagttaaggaaggactcaataagtccccaagtgatcctaactacgatatcaaacagctggcgctcatctgcacttctaagaggatgtacccggattacgtgagctatgaaagagtaacggctgttacaggtgattttaagttccctatgggttgtcgatccttcctttcagctattgaatcgggggaaactgcggggcgcaataacctaggagttgtatccattaacctgccgttagttgccgtagagtctgagggatgcttcgataggttctgggagttgctagacgaatacattgataaagcgatggctgcccacgattgggctattgagcggttgaagcgtgtgcgtgctaaacaggcaccaattctctatatgcatggagcctttggagtaagattgaaagccaatgatcttgtatggcctatctttgagggtagggcatcagtgtccttggggtatatcggtattaacgagctggttgaggtaatgtttgaggataccgaccctatgtctccacctgcggttgaattttcagtacaggttctcaaccacatgaaagaccgttgcaacagaaaagctgaggaaactaatcttggattcagcctttatgctactcctagtgagtctctgtgcaataggttcaacactaaaattgccgaacagtatccggagtatgactggctaacggataagggctatctgactaatagtcaccacctggatgttcgtacaaaagttgcccctaacgtgaagtttgactatgaagctaactttaccaccatcgccaatgggggtaacatatccttcgtggagcttccggagatgcgtaagtttatctctgcactagagtgggttgttgattacgggttaagtaagtcccactacataggggtcaacattccagttgacgaatgtgaggaatgtgggtacctaggggaatccgtatccggagagcacggctttgtatgccctcagtgtgggtcggggaacatctcggttacccgtcgcgtttgtgggtatttgggtagtccagggagcaggccgtttaaccctggtaagcagcaggaagtaatgcaacgggtcaagcacatgaatttgaaataaatcacttgctaaatacctccgtttttgatatgatagttgtaattgagaaacggaggcgttatgaaaattcataaatgtgatggtgatcgtatttactttactatggattctggggctaacggctctatctcccgtaaagatattcgtaaactgtgcctggtgaatacttggatggctaaagctaaggttgaccctagaacggacgagtgtctgtctgttcctgccggaaagttggccgatgactatatgtttgaagagctggggatttagtatgcgtagattgattattgtgagtggtgctggattgagcgcagatagcggagtccctacgtttcgtaagggtgctgtcactccactgtgggataagtacaagctaactgaagtgtgcaacattcaggcgtttgataaggggttccactatttagacgatcctatgcccccgttggaagccctttctgagggtactgatgacgagcctagtcgtaacctgtatgaactgacccatgagttctacaacatgaggcggcaggagctaggtacggtggagcctaacattgctcacttgagaattgctgagtggtatgagcgcttcccaggtcaagtcgttaacttcaccactaacgtggacgatctgctagagcgtgctggcattccccatgatgatgtgatccatgctcatggctacctgacggagataatgtatcgccgtggtaaagatgtgatcgtggaagatatcggatacactgcggttgattaccgtaagtacgagtgggttaagcctgcgattacgttcttcggggaaaccgctccgtggtacatggggcagatcaacctgtttgatactctgacaacccaggatctggtaatcgttgttggtgccagtaaccaagtaatcgactttaattgggaactattcccagctcatagtcgaggtactaaggtgtgggtggtaaacaacggtattaactacctagagcagagtttgtacgaagaacgtggaatccctgtctggtatgatactgctgctaacgtgttcagcaacaaacatttcataggtcaagttgaggcttggctggaggagaaaatctatgtaccatcccgatgatatcctgttatggcctaacggtagttggtgctaccgcagtgatataggtgacatgagtcacttgtctgatgactatcaggttttacgagcggactctaagcagtggcacgaattcattcaaatgggagaagagtatgctggtcaatgaaaaggttgttaatcaaggggttgggctagttccttgggctgaaattcctctggatgtaaaagagtctctactggaccatcttcgtgtgtggtgcgataatatggaggtatacttcgattatgacaacatgcaccttgggctatgggttcctatggacgaagatcaagatgaagtcctagactggggcgatctaactgagatggggctggtgtttgcactaggctacgcgtgtctgctgcgtgagtcctatatcccggttggggttacaggtgtttcagcaggtatttgggtcggacgtaatgaagattattacgctccggaaaatattaacagttggatccaggtgctgcgtcgcttcggtttccaagttgaagggttaactaaatgagtattcctaaaatggaacgtatctcctgggcggatatccccaaggaattgattgatgtagcagagaatctgctgcgagccgcgttgagggacgaggagctttgcttcatcatccagcatgacgtgtgtgttggtttgtccaaaggtagtttggcccaggattatgagatcctctttgattgggatgacctctcggacttggggctaatggttctggtgaacaacgttgtgttccatccttctaactttgctgcattccgggaaccgggggcaggtatttctccggggttcttggtagctgacgagccttggacgtatgccccagagattcttcgtgagggcaaacaaaatgcctcttctaactcaattaatattatgggttggaatgcctagttgaacacttagaccaggggattatcctctggtcttttctatgtttaaacccagttacctaccacgtatttaaatattttacttgcaatctcgccacgatttttatataatatattcataggttgagagaaatgatgtgagttacaaaactgacataattcctctcattcacttccgagcatacagaacagtccggctgctacatgcttggttgggtttggcttattgggaaattggttccgaacggaattatagataattgatctagaatgcgggtaagagaggttggcatcgcgaggctctcagatatttgttcgttagtcatgtggagcaaatagcaccgcggtctgaaatgaccaagaagtgaagctgtaagtagcaacgtacctctgcgcaatagcgacgaataggggtcaaccacatggagcttagcggcgattacatgctgtgtgggagttgtgcgaagcggccagttctagcaatgaggaagtgaccacccctccatctataaggaaatttgttgagtcagtggacttttaagctgttctatccttgatagttcgagatcgctttattcttcaacataggagaaaacgtaatgttttctattctagaaggacacgcgggtttctcccgcgatcccgcttccggcaattggaaggaagtgaagacaactgattacctttttgcgaaggagttttctcacgagcatccagaaggtaagccagcctcaatgccctacaaatttaacgtagtggatacggttgacccaaaaaatcttaatgaagcgtatgagctgatggttcagctcactcaagacccacatctcgtagcagtacgaggtacatgcttagttgcagagaaggccgtgcgtcgtaaacgtactaacttcaaaatcgaccacaagagcaatattattgctatggacgtcgatggaatctccgatactggaggatgcgacaagtttgacatcgtggggatgggacgtcatgttattaagttattaaatagcattagcgaggacatgttcccgctcaacgcagggtttattgcccatgcgtcgtcttcggctggaattaagccggggattcgtatgcacatgctattagagagtaatattcccgttactcagggtcagttaaagtttctatttacgtccctcaacgatagctctcggcagaagtatggttttgatattgccgacttagcttattattcatctgtacagctacactatttcgctgacccgattttccgggatcagtttaccgatccgtttaaagcggagggtaagccacgtctggttaaagttaacggcgctaggattgaactgccaggcactatgccagattacgaagccactcgtggggaatttaaagaagaatttctgtctttactcaatcagattaagggcaagcgtgtagcctctgagaaagtggaacaaactattgcagagctggaagaagcagacgatggagtttatctgcgtattattcctaaactgtaccacagagcgctggaggacggtgttgatttcgcatggcttgagaaagaaattacctcagccttatccgattatattaacacgaaggataactcccgtagcctacaggactattttaataacgggcgtaagcaggcgttaaaagcgtttgtgaacaactctatgcgagatattcctgagtcgaatgttaaaggcgttcctgtgcacaagttgacctctgatagccccgatgggatgaactatttgaagatcaaccgtccaccaccggaaggtcatctaacgtttatcaaggcttccctaggtactggtaaaactaccgcagtgacgaagtggctagagcgtgatcagctgaagggtaatttccttgcagttacgaatacacgtgccctggtttcctctaacgccaagaagtttgaagccggacagtatgataagtccgtagatatgttaaacttcaagcgcggtgccattgatcgtatgtctactactattcactcaatccacaagtttaaaaactttgttgggcagatcgatgttatctttatcgatgagtgcgacgcagttatgaatgacctgttattcgctccagttgttaaacaacgtcgtgagtgtatctcagttcttcgtgaaattctgctatctgcaaaagtagttatcctgtctgacggagatatcagtgcagaaaccattgaagcatatggatctctcatagattttgacaagccggtctcttattataaacatcatcgtaagatgttgtctgatgctcaggcatatgagttcccggatgaatccagtatttgggttgctctccaaacgtccctagagatgggagagaaatctattttggtgtccgactgtgggccggatgagttaaacgagaaaggcttgacgttaagaaacaatacaggtgcgattgttaaagagattcactcaaactctacatctgatatagatattcgtcgtattttagattatacaacgaatgagctgattgaacagcagattgattgtctactgtgcagcccgtcagtaacgagtggtgttgactttaactatttcgacaacgtatttgttatcactcgtacagctaaccaggcgccgaacatgcgcttccaggcaatcaggcgcgaccgaggagctaagaacatcttctatttcatcgataagtccaccagcggattctctgcgggttcggagcagtataacatcgatgagggttggctagaattagcccagcagctgtatgtaaaacgtcgtgagctagagtcccgtaactttatcagcacattgcgatattatctgctggatcagggagcaactatcgatatcttcagcgaaagctggggtaagattgatagctcagccgcagagtatactgccgagcgagtttctgctattttgagcagtaccccagattggtgtgcaccccgtcatgcggacgcatacgaagccaagctaatgctggtcaagtatttccacctggactctatcaagagtatcacacaggaacatgcggagatgtggattagtaagaaacctcacaaacgggcggagttcttccataaacttcaagatatattctggaaggatattaagaagtgttctaacgtgacgattagtccctttattgaagccctgaaaaaacacaagaaggacttctttattaggacgggacagtctgctaaccctaaatatgcccgtatgtacttaacccaaatgggtattaataaggaaatggagacggagcagatcgtagactggtatcgaacgtactgttctatcgagggtatctctgtaccgtatgagtttatgacggacgaggagaaggcgctggccgatgaagcgcaaaacgaacttggagtacgtaatgagcaagcgtgatgcccgctgggaaacaaggaagtttcccaaacgcgatacgaaagcacggaaagctaaagagatagagttgtgtagagtaatacctattcgcttagcacagatgccaaatatttatgactggctagaagctcagcgaaagacacgcctttctatacgcatcaacatggaacttaacatggggtacaagagtctatctgaattcatgcacgttactttcgaccctacgttctatgaaaatcgcgattgcttagaagctaaatctgtattataatagtttcataaattcgagagaggataaagaacatggcaatccgcaaaaaacttcatgcgaatagcatcccggacgaaaagtttaaggaagcgattcagtggctagaagatggcaagaccaagaaaggcgcttgcgaaatcctcggagtagcttctaactccacgatggagcgtttgatcgaggaatggaaagataaccagcgtgtttctgccgaaatgcgtaagaagaagcgtggtactaaaatcgaaggagctgagctggctaacgttatcgattcgtacctgtccggtgatagttttgaggcaatcgccgagcgtttctaccgttccgcaaacatgatccgaatggttctgtctgcccatggtgctctgcttcgtgttaatggtgaggttgacccactctttccacctgcgatcccagaagaatcaatgaaagaggtattcgaagtaggcgaacacgtctgggttcctggctatcagtgtataggcgaagttaaaaaagctctggataatccggtaggcgcatatcgtgtttacctgctatccgaagcccgtcagcagtacgttaactacatgtattgggatctggcgtctgttgagcatctggtagcacttggtgttgatatcaagtctctgggattcaagtggggcaaagaagacgtagctgaactggttaataatgctgtaaaagcagccctgaaattagaaaagagaggcaaaggtgaataaatatcaactcctgaacttattccagatctattccgaaggtgctacagctatccgggatctgcactacgcagttcccatggacgaagcagaagataacggctggctcaccaagtacgatcgtggtttgctgaagatgtatcgtttgtctcctaatggtttggtagctgttaaccaaatcctagaaaattctgtttgctttgcagctcagtaacttgttataatattctcatagtttgaaacaaaacttaaaaactctttttaacaataaataaggaagtaataaatatgtctactccaactcaatggtctcctgaactcgaagctgaactgacttctgcctacgtcgccaaaatcgaactcttcccggaagatgaacgtcctggcgtttccatggagatcgtagctgagattgctaaagagcacggtgtttccccgaacggccttcgtatgaagctgtccaaagctggcgtatacgtcaagaaagaagccggtaagtctaccgctaaaactggtggtgatgctcctaaagctggtggtcgtacttctaagtctgatgctcaggctgaactgcgcgccgcatttaacgacgctggactggaagatggcttcttggacgaatcgatcgttgacaaactgaccggtaaagctgcctctcacctggccgaagctatccgtaaaatcactaaataagagggtattgcaatgaataaagcacaagtcgtagctatctgtgagaaacacggtgagttttgcatgcaatacaccaaactgcgtaccaagggggtaacttacctctacggtacgactgagttcgatcctaagcaagataaatatctggctgagcgaatcgtccgtgaaggcctggaacccgctgacaaagatcatatcctggtctttagccgctctagcgataaattccgctatattccgattgcgaatattaagcgcatcaccagcctcaaccaagaacttgatcgagctactccagtaggtcgttaagacgcaatcagccccttcgggggctttttgtttatctgagaacaataaaaatgaatcaaaacatttgtcaggattacgaaggacatatcgatgatcagtcccacgttatctttgaagatgaagggcgacagattcgtatgactgtctcggagtttagaggcaatttatactttggtttccgattatggttactggatattgaagataactggttccctactaaatcaggcttctcgttcccttacacgttagaaatgactagcacgctgttcagggcgtttactaaaatactaagcaattcagaggttcttcatgaagtttaccgtgaatctcaaaagacccaagccagtgacgactaagttgctggctttttctttaaaatctcaattgcttagtgttttaaaccttgatataatattctcatagtttgaaggagatctttatgaaagatcatgaaattgctcagctagttaataagctgaccgaagctgctaagacgtatgctcatactcagcaattaagagcacacatgtctagaattgttaaagaggcactaaagaatgcgaaagataacacttgatgcgtacttcagtcccccactccagggtcaggaactagtcctcacgtggcatgaaaaagaaaacggtaagccggtggttcatgtattatctggtttccagatgttaggcatgtggtacgagaaaaacgtattggtatgtgaactatatagtccaaaatctaatcgtagggtaatgtccaccttccaggcagtatgcgaaaacttttactgggaaggaaagactcagatgctgttcgattactacgaggccaaataatgcaacacgttaaagaatttatcaagctgtgccaagacgcatactacaaaggcatgtcgattatctccgatgaagagtatgatgccttaatccgtcgtttcccgttagaggaagaaatcggccctaaaggtgatgtacctcacctgttccgtatgttctccctacagaaagtgtaccccggccgcggcgaagaagtgcccttccagggcattgaaacgccgaagctcgatggctgtgctatttcacttctgtatatcgatggaaaattcgtttctgcgttaactcgtggtaacggtatcctagggaacgatgtaactcataacgtgaagttactgaacatacctaaacagatctctcaaaagaccccggtgcagattactggtgaagtacacatcaccaaagaagttgagaacatgcgtaactttgcttctggtgctattaacctgaaagattctggagagtttctctcccgtattgcagaaggtggcctgatgttcacggcatatagtattcagtgtgagaccggcaaagttggcttgaccgctactttctgtggtgatatgcatatccttcagggtgatggttttgttacctgtctggatatctccagtcgagtagattggttcccaacggacggcgttgtggttcgtatggacggaaacaatcagtttaacgcagcaggttggactaacaagttccctcgtggtgcgtacgccatcaaagaagacgatgaaggcgaggttactacgctagaacgggtagaatggcaagttggggcttccggtaaggttactcctgttggatacttcactccggtagtcatcgacgacgctgtcatctcaaaagctaccctgaataacgttggctatatcactgcccttgacctagaaatcggttgccagattcgtgtaattcgtagtggtggggttatccctcgcatcgtagaacgcgtttacgagtaacacttgattcaatagatacaccgtgatgattttttaaagtagttattgacattttcatcgccagggtgtatactattatcattcagttgagggaaagaaatatttggtgagagactgagctaaattctgaaaaatttcgattgcttagtcctgattttcttgctataatatttatataaattgatgaggaagaaaatcaatgaaaattgaaattccactgaattgcccctcttgtggttcgaaactggacttagttaacgatcagttgttctgccgtaacaagtctatgtgtccagctcaaagcagtaaattaatcgagaacttctgctcaaagatgaagttaaagggttttggcccacagacgattgctaaactggagatcacgaaagtttcagaactctttttcctgactaaagaagatttagtcagagctgtaggtgataaagtcgccacgaaacttgagctagagttggaaactaagctgagacaagatgttgactttggttcggttcttggatctcttagtatccctcttatcggtgaagttgctgctaagaaattatcccagctttacaacgatttccaatctgtgaaagcggaaggtaaagctggagaaaacttagcttcgtggaagaatacaccggcaggacaggacgtaattaatctaccatggaaattcagtggggcgcgggaaactcaagttaccccggcgactgaatccaacggagttgttctttgtattactggtaagctcaacgacttcaaaaatcgtgcagatgctaccaaatatctggaaagtcttggatatacggtgaaaacctccgttactaaggctgtaaactacttaatctgcgaagatgaaaccaagatcggttcttcttcatacaaaaaagcacaatcgctgggcatcgaagtcttgacgattaaaattctactggagaataaataaaaatggctaaattaacctggaacgaagaaatcactgcatccctgaccgctaaagctaacgctctgaacgcgaccgttatctctcaggaagctgttgctaacatcgctgctgaactggctgctgaaactggtaaagaagttaccgcccgttcggttggttctaaactgcgtaaagaaggcttcgaagtgcagaaagcatccgacgtaaccaaatctccgtggactccgggtcaggaagatgaactggttgcattcctgaacgatcatccgggtcagtatacctacgctgaaatcgctgctgctgtagttggtggtgcttataccgctaaacaagtacagggtaaaatcctgagcctggaactgaccgccgctgttaagccgactgaaaaggccgctgctgtacgtagctttagcccggatcaggaagctgctttcattaacgccgttgccagtggcgcgtccgttgaagcaatcgctgctcagttcgaacgtaccgttaagcagatccgtggtaaagctctgagcctgctgcgtgaaggccgtatcgaagctatgccggttcaggaagtctctaatgctaaggcacgtgaagacgttctggaaggtctgaatatcgccgatatgaccgttgctgagatcgcagaagcaactggtaagtccgagcgtggtgttaagtctatgctgagccgccgtggtatctctgctaaggatcacgatggtgttgctaagcgcgctaaacttgacgctaaatccgccaagtaattgatttgacctgaggggagaggaattttgttcctctcccctttttcgtttaagtagacgctaacgcggcgtagagagtatcttatgtataacgtccaagcagtagttttgaaaatgctcctagcctccgatcaaaagcaggtggctctagagacattctctagactgcgcaaagatcacttcaatgacgcatttaccgcgatctaccaagctgtccagaattattacaaaaagcataacggaatgccttcgttagatgctctgatgctagagtctaacagaaacgcaaggttgtctcaagcactaactgttttagcaaacactcagattccagacgttgacatatcgcatgcgattcatgtcctagagtcggaatacacacaggatctattcctgaatctgctagaaactgatgtgttgcaggatattaccatactggatcagggagaattacttgatcgagtagcggctctgcacatgaagctagaggaacgagtaacaacgactggtaaggtcttcaacgccgatactatgcgtgttttcaagagaaaagaagactccatgttaaatcttatctctctcggcatctcaaacgaatttgatgctcaacttggcggaattgccagaaaagaaacactgctactcggtggatggcgtggtacaggtaaatcaatcatctgttctaacattcaagtagcccagtattacaacggggatatcgccccatatttctccatcgaaatgccagagaatgaggtctttagacgtaacctagccattatggctggtgtttcagctaaggctatgcgcaatgactccttacaaggtattgaactcaacaaacttgcgaagactcgtgcaaaaatgttcgaaggcggcctggaagtatataacgattttgtatcacgttatacgctcaacgagatgagtgacttccacgacatggagactatgctaatgcaggaaagacccctgcacactccgatgatcatcgtgtatgatccggaacttagtacagcaaccatcgatgttgaactaactaagctaacctccaagtatggagataaggtaacaatcgccctgctagactatatcaaccaggtacgtttgccggatacgaagacattagatatgtatgattggaagcagcagatggttgtgtcctctacgttcaagtctacgtgccaaaagcataacgttgctggtgtagctccttaccagattgaccaacagggtaatgcccgtatggcaagaggtattctcgattcctgtgatatggctgcaaatctaaatgccgctaaacagaatgaggggcatgacggtgcaatcaagtttgacttcgtaaaaactcgtaactctgagggtatgacatttatgccgaagatcaactggaactcattgcgtatggatcagacttctgatcttaaactagaggacattcgtcagatggaagcagagtttgttatcccacttgaaagcgataaaccgaaagacaaaccaaaaaggaaaaaggcttcggatgaggatactaatcccaccggagaatcctcaagagacttatgagtagaataaccgagcttttagatctcaaagggattgaatacagagatacgggtggggacatcctcatccgctgtctcaatcctgatcatgaggatgctcatccgagtttgcgtgttgaccccgactccggggtttttcactgcctaagctgcggatttggtcgtggtataccaagcatctttcattacttcaatgaagaacagtacaggacgtcccctagactcctgaaagttcgtagaatgattagtgacctccgaactgagggtcgcagtctagaaattccagaatcagccatgatattcgaccaggattttcgtggtatcaaagcagagactttcaaaaagtactttgcattccaacaaacagaggactgggaaggtcgtgtagtgtttcctattacggatgccgtagggagaaacttattcttcttaggccgtaatatggatagctctgcccctccgaaatatatgattagaccaaagaaggtctccccaccaatcttccctgttcgatataacaccccagccctaatcctagtcgaaggtatattcgacatgttgaatctagaagacaaaggttgccataacgtttcctgctgttttggtactcaccagttctctctagataacatagcagataaattcatgccgttccaaattgcaggtacgactcacgtagtcatcatattggacaatgataagtccggtaacgaggcatctaagaaattggccaaattaatccgtgataagaccagaattataccaattataggtaacttcttgcttccagagggcaaagaccctggagacctagatgctgaagaagtcgaccagctcatcagaaacgtagaaatcttgattgccgaacatgtcaagatttgatataataattgggtaagtttgagaagaaacactgacgttttacttgcttacctaataggagaaatcaatgaaaattgcagttgtagacaaatcaccgaataacgtccgctatcagaaacacttcgaactctttgaccatgaagttgaaaccttcttcatggctagtgagaaagtaaccgggcgactgctcaagaaacatatcactatcggaacgccggagaacccgttcaatccggaagattttgattacgttattctggtaggtgcagacccgttcctgaagtttgcagctaagaaaggcatttccgattactcaggtaaacgtgttgagcatgacggatacgctaactggattgcaagtatcagtccggcccagctccactttaaaccggaaatgaagcccgtatttgaggctaccgtagagagcatccatgccattctcaatggtcgtgaaaaacgctctaaagcaggtgattatcgcccgattcagtgcccggatgaagccgaagcatatgtgaagatggtatataccatgtgtcccggtatgatcgcatacgactccgaaaccagtgcgctgtattgccgagatggttacatgctagggatctcaatctcccaccaagagtaccaaggcgtatatattgacgcagacgtcatcacagaaaataccgtctattacttacagaagctgttcgatagcccggaacatggcgttgtgttccataacttgaagtttgatatgcacttctactgctatcacttaggtttatcctttgacaaggcagcagaagagaaacgactccacgataccatgctgatgcactacgccctagatgaacgacgtggtacacacggtttgaaatctttggcgatgaagtataccgatatgggggactacgattttgaactcgaccagttcaaggagacgtattgcaagacgcataagatcaagaaagaggatttctcgtatgatctcattccgtttgatatcatgtggccttacgcagcgaaggataccgatgcaacactgcgtctatccaacttctttctgccaaaagtcgaagctaaccctcgactgaagtctctgtactatgatgtactgatgccgggatgcgtattcctacagcgcatggaagatcgtggtgtaccgatctccaaagatcgtctgaaagaggctcaggttcagttaatgactgcgctacagcttgcaaaggctaaactgtatgagtatccagaagttcgtaagctagaagaagatcaaggctcggtatttaacgctgcttctgttgttcagctccgtaagctcctgttcgattatgttgggttaaccccgacgggtatcatgacagatacgggtgcagattccactggcgcagatgccctgaaagaactttcagaccaacatccgatagcgaagactctgctagagattcgtaagatctccaagctgctctcgacgtatatcgagaagatgctgatcagtatcgatgctgacggttgcattcgtaccggattccatatccatatgactacatccggtcgtctgagttcgtctggtaagctgaaccttcaacagttacctcgtgatgagtctgttattaaaggttgtattgttgcccctatcggttatcgcattatcgcatgggacttaacaactgctgagatctactatgccgctgtactgtctggtgacattaacatgcagcaagtgtttatcaacatgcagaacgacccggaaaactactcggacttccacggttcgattgcacacatggtgtttgctctgccgtgtaaaccgactgaggttaaaaagctgtatcctgcactgcgtcaggctgcaaaagcgatttcgtttggtattctttacggttctggcccagctaaagtagcagcatcagtaaacgaagctctcctagaagagcacatgaagactggtaaaccgtacaccgaatgtaccaccggtgatgcgaaagagtatatcgaaacctactttggccgattccctcagcttaagaaatggatcgataaatctcatgcccagatccagactaacggcttcatctacagccactttggccgtaagcgtcgtctgcacaacattaactccgaagaccgtggtgtacagggtgaagaactgcgttctggtttcaacgccatcattcagtctgcatcttctgatagtctcctgctaggtgctatcgataccgataatgagattcgctctctgggtctgcaggacgaaatgaaaattatcatgctggttcacgactccgtggttgccattgttcgtgaggatttggttgatcagtacaacgagatgctaatccgtaacattcaggtagaccgtggtattagtattccgggctgtcctattggtatcgactctgactcagaggctggtggttctcgtgattactcctgtggtaaaatcaagaaacagcgtccttctgttgcttgcattgaggacaaggagtttgaggagaaagtacgtagtattatcggtatggaggacttcgattacgctgctattgcggctaatgatgaaaaccaccctgatcacgataagtacgccaatattaagttcttgccggaaatcagcaaagatattgtcaacgttcgcagggttcttggtgcttaactttagcttaccagtatatgctttaagggcttatgatgtactcttccaagagggggagtacattgttatccagacgagatttacaaggtatgtgctggacaatccaagccttcctgggacattctctcagcgaaggctttttctttatggtgagcgagaaaatttaccttacaagctctatccattaaagaaacagttcaagtacttatctcaaataataaattctggactaaagcatttcatcgactccacaggtaagatagtaacatggaaacctacgacttattacaacattatcacggaacgcgttagaggatcaactagaatcttcaacggaaagtaccagtgttatgtcaagaacgttccatatcctttcttacttagtgaacctgccaactatatctcgtacgcgttggttcgcggttcaccagttatttttgacacgcacgaagaggagccagaaactcctagacttagagttaagatatgaagatagttatatctaataaaatctattgtaaacccagcaacgaactgtgggaatacttattaaaacacacttcataccagatctttaaacctggggcaaagtatcctctaatgttccagaactcaggatcggtaggtaaagaaatcaagtggtttcccgtaaccagattagatcttctagaatctttcgggcaaaaagtgacagagatcgtggataaacgtactctggttcctgtggatattccaaagccatcgttcaccctgcgaccaggggatcagctccctatatatgaagactgtaacgatacgtgcattattaatggtaagcctgggttcggtaaaacaatccttgctcttgctatcgcccataaacttgggcaaaaaacgttagttatatgtaccaacactaccattcgagctatgtgggagaaggaggtacgcaagttcttcgggattgagccaggagttattgggtctggcaaatttaatatcgattctcctatcgttattagtaatatacagacagttaacaaacacggcgctgctctggcaaaagaattcggcaccgttattgttgacgaagtgcatcactgtgttgccaccacgttcaccaagtttctagagcagtcctcggcacgatataaaatcggactatccggtacgttaaaacgtaaggatgggttacaggttatgtttaaggactattttggaacgaaagtgtatagtcctccggtaaataacactctgccgcctactatccataggtttgcgttaaaaacgcaggtttctggaaatatgaatgtgccgtgggcgataagagctaacgatgtgtattcgcagccagagtactttcaacaggttgttgatttgtgcgagttatattcgatggcaggtcataaagtcctatttgtgtccgatcgtatagatctgatagagagagttacgaatgctttggaactcaggggtgtgaagacctacacgattaccggtgtaacatcgctcgatgatagggagcaggtacagattgacgtgaccaatgacggtccttgtgtattagcggcttcccaaagcatcttctcggagggtgtatcattaaatgctttatcgtgtttagtgctaggctctttaataaataatgaatctctaattgaacagttggcaggtcgtgtccaacgtatggcagatgataagttggacccaatcctcgtggatctgaagctagggggtgtaggattcaagcaggcggcaggtagagaagcggtatatcgtctcaatgggtgggaagttcttgactttaacgagaagaatatggtaaacttagataaaattctgtttgctaagaaccccaaagtttgatataatatttatattgaattgagagacagatttacaaagaagagttaagcaaatagttaaaaatttcagttgctgagtcctcaaaaatacgatataatatctgtataaattaatgggaacagcaactgaatcttcggaaagtccgaagcagaaaaataaaaaacttagttgctaaattctctcaaaatggtgtataataatcatgttgttttatgattacgaaaaaatttacatattagcgcgaggtaactcatcgctgattgtacagattatcagacgaatggttgaagatcccgaagctcatgtgatgttaacgggtagatcatttatcttgaacgaagatacaatcgtttataacaaacgaaagctgtcagaccgacagttggctgagtatctaggacttttgagttttagaaactatgccgaatatagcttctcgaaggattcttcactggatatgcaatatattccaccgtgggttcctagagcagttatcgagcaccacccactaatcgcaatcaacaagtcaaaattgacatttatcgaggaaaaataaatatggctactaaatcttggggttctactactggcggttctaacggcgacaaactggactacatgaagttcaacaacggtaagaacgttgtacgtatcgtttccggcgttctcccgcgttatgtgtactggattcagaacaaagaaggtaaaccggctccgttcgagtgcctgcgtttcgaccgtgagaaagagcgtttcatccgtggagcatccgatccggttcacgacatgggcttcaaagatccggagaagaaagatggtaaggctcagccgctgcgtcctaagaaaaactacctggccgttgttattgaccgtactgataacaaactgaagctgatggaagttaaggcaactatcctgactggtatccactccatcatggcccagctgaatctggaagatccgggtgaaatcgatatcactatctccaaatccggtactggcttcgatactaagtacgatgtacagcagatcgctgcaatgcagttccagatggctaaaaatcagccgggttctaaagaggccgccctgcatgaagccgacgttgctctgattggtgaggctctgtacaacgaagcagacgaattcgaaggcttcgaaaaagtgcctaaactggatgttacctacccggttccgtcctatgacgagcagaagaaagcaatccaggcatggctggaaggtaagaaagatgaggagggcgatgaatctaaaggtaacgaaggttccgcgaactccggtaacatcgatcacgaagcagcttctgacctcgattaatccaaacaaggggagcttcggctcccttttattttgactatgaaaatacttttctcagcagatcatcacattaagctaggggcgaagaacgttcctcaggaatggcagaaaaatcggtttattcttctcggtgaaaagctggacgaagtgtttggagctactggatgtgaccttcacattattggtggtgacatcatggatgtttcagacccgtcttcagaagaagttgaactactgtttgcattcctagctaccctccaacatcccggtattatttacaccgggaaccacgaaatgaaatctaaaacgatttcttgcctggatcactatgcagcagcaattagcgacgcaacagacggactttggaaagtcgtcaaagactaccgatctccagagttcgatatcatcccttacagcagccttcacaaagctagttggaagcccagagtttcagacatttgcttcacgcatgtcagaggtgcaatcccgcctcatgtcgtaccagaaatcgaccttgaaagattcgtcgaacatgggtactccaaagtatttgcaggcgatctccacagctacaagaacagccaaaagatcggggacgttgacctgctctatcccggatctccgcttacaacttcgtttcacagagaaaggacgaaaggaactaacggagcttttatcatcgatacggtcttgccaagagaccatgagcactacctttcgtgggttgaactgggagatcttccacagctcatacgaaaaactattgaagtcggcgagccaatggaagccgatgcgtatgacagagttatatacgaagtcaccggcgacgtatcacaactcaaaacgttaaagaacagcgaactgttagataagaagatcaataaccgtgtcaccaaagatgctaagttagatctagacgatatgtcactgctacaggagctggatacttatttcacaaacgtgcagaaactagacgaagcgtctagaactcgcatattaaagagagccgctgagtatgtcgatagtaattaataaattgacaatcagccattttatgtcgtatgctgagaacgtggtgatcgagtttgataatcaccgcgtaactcagttaatcgggcgtaacgggctgggtaaatcaacaattggtacagctctagaggagcttctttataataagaactcacgcggtatcaagaaggacgacctgtttaactggcatactggctccaagtcctatacgctagaaggtcagttcacaaaagacggtgatgtgtacaacgtcaagaaagttgtgaagtcaaccgccaaagtaactctcactaaaaacggtgaagatatcagtggtcatactgcaacccaaacgtataagctgatagaagaggtactcgcctgtgattttacgacatttactaagctcgtatatcagtcagttggatccagtctcgacttcctcaagactacggatgctcagcgcaaggctttcctcgttaacctgtttgatcaggaacaatataaggaagtttctgaacgtgttaaagcgggacgtaaagccgtctcggcaaaactgtccggattggaaggtagcctgcgaactgcccaatctatactttcctcaaaagcctcgcttggcgcacctcaatcagagatcccaatccctgttttcgatgaagagccactagtcgaagaattaaccgaagcaaaagtcaaggtagcactggctcagaagcaaaaagccagtattgcaaaacgtagctctttggacatggccgtacaagctgccgaaaaaacttttgcaccattcgaaaatttacctgcgcccacctcgaaatctgaggaactcctgagtgttacgcgtaacctaacggtcgtggcaactagagcggatgatttgaagaaacgttactacgatttcaaaaatgcggcgggtaaaactcagtgttctgcgtgcggaactcacttagacacctccgccgcccaagaggccatgagacgaactaaggaggagtatgatccgctatataaagaacgtcaaaagctggaagcagaagttgaagaacttaggaaggaagatagggcgtttaaggattatatctctaagtttaacgctctggaacaggctcgcaaaaacctcaaggaatttgatgaggtcaatggaacgcaggatgaaatcgtagatgcaagcggattagctgaacgcatcaaagctattgaatccagcattcgtcagggcagatcctcggtagaacttgcaagaacccataacgaatcagttgtacgtgaaaatgcgaagtatgaagctaagcgtgagcagattcaaaaggccgagcaggagtttgacaagatccaggctgaactgtccttagttgcagaagaagtagcggatctagatatcttaattaccgggctgaaagatctggtagggtataagctggagcatagtgtcaaggtatttgaagagatgatcaatcattatctctctatcatgaccagcggtaaatttgctctagggttcgagttagacgagacgaagttacaggttgtcatctacaatgatggtaacaggacttctatggtcaactgctccaccggtcagcagagccgcatcaatatctccacgctattagcaattcgaatgttgctatcaacaattagtaaggttaatatcaatctgcttttccttgatgaagttgtaagttatattgacccggatggaattaataccctcgtagaacttctacaggaagaagaccagctgaactcaatcatcgtatctcacgggcacacacatccgtatgcgcataagattgaggttaaacaagacgaagctggcttatcaattttggaggcctaatggccgtagacagtcgcgagaaaggaaaacgagcggagtaccaaatccgtgatatgttgcgtaagtatacctccttggactgggaacgtgttcctggttcaggagcttttggtcaatcccactccctgaagggtgatgtgtatctacctcctagtgtaggtaagatgagccaatactgttttgagatcaaacactacgcagacgaaaaatttaatagcaatatcctaaacgttggagaatcccaactagaaaaatggtgggcccaagccgcacgtgaaggtgagcaaatgaacatgaaacccgccctgatctttaagaaagatcgtggtcaatggcttatcgctctggatagtagcgaccctatgattgataacctcatgagtagagcacatttcatagtaaataaacgtggaatggaaattgttatcggtctttttgagccgtggttaaacgcatgtgatattggagatttagttaaatgagtaaatcctggggaacaatgaaacgagaggcagaacaacgcctcgcctcacgccgtaatcttatgattgttgacggtacgaacttgggcttccgctttaagaaagatagtggtaagcctattgcagcatcctttgcaaacaccatcaactctttggcaaactcctacgatgcgaagcacactatcgttctaggggataaggggaagagtatcttccgtaccaatattttccctgagtataagggcaaccgagatgcaaagtacgcagatcgttccgaagcagaagtagaagcagatcgtcagttcttcgaatacttagacgatgcgtttgatcttatcgcaagccaattccctactttccgaattcgtggagtagaggcagatgatatggcggctttcattattcagctgataggtcatcactacgatcatatctggctcatctccacagatggcgactgggataccctgctggctcctaatatttcacgcttctcgttcactactcgtaaagagtaccacgagaaggatatgttcgataaccataacgtagatacggtagatcagtttatctctttgaaggctattatgggtgatatgggagataacattcgtggtgttgaaggtatcggtgaaaaacggggctacaatctaatccgggaacacggtagcgtgttagacattattgatgcactaccgcttccaggaactcaaaaattcgttcaggcactgaataaatcaggcgaactcatggagcgtaatctaactctagtagatctcccaagtttctgtggagaagcagttgctgcagcaggacaagatatctacgatcaatttgttaaagacattatggctattgccacaggagaagtataatgcgtattaaattatctcaccccgattgtaaacctcacgttggaagctcggaagcagccggtatggatctacgggcctacttcggagatcgtgcttccgacctattgcgtgccattcctcctggggaatcattgatgattgataccggagttgcggttgagattcccgaaggctgggtaggaatcgtggttccgagaagttctctaggaaaacgtcggttaatgattgccaatacaacaggggtgattgactcagattatcgaggaaccatcaagatgaacctgttgaatatgagcaacgagacacaaccgattgataactttgagcgtctgtgtcagttagtgatcgtacctcattataatcctaatgacattgaaattgtcgatagtctgaccgacactgatcgtggcgaaggtggcttcggaagttctggtaagatgtaaatagaaaaaccccagcggattgctccgactggggttttgttttattatacttctggatcttctggtagttctacttctggaatctccacttttggcatttccagacgtagatcaatccaacgaccttgtggtatctccataggttcaccagcgatgatattacctgtgttaatatcaaacttacgggtgaacacctgtatgtttagctccttctcttcttcattccaatccgattccacgaagcacaacatattaccattatcgtcccttggtagctcgaatttccatccttccgtattccagcctaaactccctttaatagtatacttgcctagtccagtttttacagcaaatacaccttgcgcctctgcgttacatcctacataccctcccacagtctccacacctgtccagaagaatgagtcctctttactaggaatttcggcgatgagtttagcgataggagaggctttcttaacgaaaccattgccgtctatagtaatacctgctatgtcagactgaatgttaggtttagagtattctgtataaactttaaaccatgccggtggggtattaccctgatcagcccttaatgatctaatatgcagaataggtgcagtagcattactctgcatgaagaactgcattatacggtactgggtgtgcctaacgttgaggatagttccaagccgaccagtagttccgtccggagtattttttgttgatacccctgattggaatacacgtacaccgtctgctccccaaggatctgtaccttcaggcgtaggtattacgttcaagtcgcttagggggttagcagtaataccggcagccggagccttatccatgatatgttgaatagccgcatcctggcgtataagtgcattgcctgccgatgactgtggagctgtctgcttaatgttaccatcatccctaatctgaagctcagtggaagttacttgatcaccttgtggcctgaaagttataaacccactagtttgattactgggattattagtagaaagaacaaaagacccgttggagttgactcgtatgcggggcccacctaaccaactaatagtttggttcccagtatccccattaggcagaattatattcccgttaggtagaaactccgtagctgcaatactagagtcactcgtacctcctggccggagggaaatagacttcttattggtagatagtatacctgtttcatttaaataggataaaagaagtatagagctatcggttttaccgttagttatagctagttgtttgatgcgggctaaactaatgccatcatcaattacttgcgccctatttacatagataacatcagtatcaaaacctgtagttttccacgcaggggatgttccgtccaccaaaggtccggtaggtggagtaacagatatggagccggataagaatgccatcttagggtctctgaaactactacgagatttgaggtatacatcataggtcacgttgctaccctcaatagtagatttaagtcctaccataaatccattagtgttggccggacctattactcgatgactaaggaagctgccgatgttgtccgcggttacagaggttacaggaccaggtaatgccagggatactatctccatattgtatatatcatccctgttggctccattacctgtagcgtagagcgcaaataatacgtgaacgctagaagactgatttgcggctattgttatagatgcaatcttagcttctgccgagccggtcatcactcctagtggtgttactagggacgctttacctgccaaattctgagctacttgggcggatgctgccgcgttagtttctgaagtcttagctgctgtctgggaatttttactagcggtttcagaagccttagcattggtttccgaagttttagcggcggcggcggatgctgccgatctagtggcagcatctagtaattctgtagcagccagagaactaactgagtatcctagctgtacggtaaattttgggtacttacttacccttgagttagccccgtcaagagcggtaacctgttgtgcaataattcttgttgtaatagccattacgcggttactccatcactgacgtacacgctcccctccatgactctataagaggtagcggtagctcctgttcctttggtcatgattacatcatagtaacctgcgaaccgaagtctaggattatatttatctcgttctttacttgctttactaacgattgttgccacggtagccgcagttaatcctagcgacgcctgaccttgtgtagcgtttactactgttacgacgaaatctgctaattttaccccagtggattccagagagtctttaattgaagacttaagggttacccctgtcagattgacaggggtttccgttgctgggtacgcagagtcatcgatatccatgaactgtagcatcaatccgtatgacacgttttgatcaaggataatatcaactactctgttttccgtgctcatttgttaccttatatgaatgtacccgttagccaggtctattttcattgtgtaagtgccctctgggttagagcttagtgcggcggccctattgtaaaggatgtcaacaccaatctgcgccaggaacgcgttgtttgcaataatcttatcagcagtgatagaaccggagacgatcatatcaccatgaacagttaatgcaggggctgtccatgccgagccattccattgacgagtccaggagttctgcggagagcccgacttatactgagttagtacgtcatacttaaccggaggtccaccaaatgttgactggaagaacgatgctgcttgagtgtcattccatgcagttaggtttgatatcggctgggtgtagaaccccggcccacgatcccctacagcgtcatactggttacggacatatgacgttacgaaggctcccttttcaatcttacaccttcctacaacgttatttccctcagattggttaactgagaatctaacggatatcctatctgaattagccggcgtggtgaaggtaaagctgctcaaacctgcagtagtagacgcaatagtcttcagcactcctccagtggtattgcttcccttagcgtaccaaaatacgtgacaacgaacttctacagcgttatcagtctcgaaagacatcgtatatgtggtgcttggaggaaggtaggtgaacatggaggcggacccatctgatgggagggtatacgcatcggtaactcctgtacctgcgattatcctagcccttagtaactcgtagttcttacctatagatgaaccgttgcctgcaactccggtaatcgagtctaaccaggctttaaagtagaacaggttctcgttaatactatccccatctaggcgaatagggtctgaccaattacctataatagcattagtctccccattaaactccgctttaatcatccataacgggttacctggaggagggctatctgaccagccagctggattactaccagaaggcctactaggagtgctagccattacggcgaacttcatactcacatagttacccttagaacctggcgtaccattagccccgttctcacctactgctctgatcgcaggaccccaggatccattcacctgctgacgcatgtacagatcacctgaagtgaacgtactgtgccagttagtagacccatccttagaccattgaacgtttacagagttacctgcaggcccctgtggaccctgaggaccagtatcccctttatcaccttgcggaccagtggcaccagtattaccttgtggaccctgcggccctgttgccccatctgcaccatccatagataggtcttcgatcgctatagcagctacgtaagcgttgccgaaggggctagcactaccattcatctggataaatggtcttgccctaccagtctccgcggtagacccatctcccaccgtgacaataccagttactagtttccatccctcggaatccttagctgatgcggctagcatagttgggtaaccagtgttaacgctgccagaagagttctgggtatggaggcctaaccttagctgatactcaccctcagagttgttcacccatgcagttacacggtagcgcatccccttacgagtagggaaccagttactactttccatggtgtccctagaggtgcactgtatagccttggtgtgtcctccgggactgcccgtagcgatgtcaactaccgtacgtccccacgatccattgttaccagagtcaaaggaccccgtgaacactctgtcgtaaccaatcccgggcaggctctttttgagtgtaaacctcttaataagtgttccgtacttaggatgcgtagccttataatctacccacccagaggtaatttccagcccgtttggcatagcgctaggggcataataaccgcttgaccctatgttgccgttaagattgctcttatcctccactccgaaggtacactgactggtaacatctaccgtcccgtagaacaccttaaagttacccgtagtgccatcccaattctgcacaaaaccgtaggagttacacgacaggttagccgcttcgttagttaagtacccgactagagagttcaccccgtcttgcagcctaactattgtaatggaatcggttattccatcacacgtcgcggttactgttacgtactctgagcttccgaactgagcagaggttatagtcttgttagtagcagtgccacctaaagttatattactccctgcttggttcttggcaatccaggttattgcagcagtggtattctgtctccagctatcgatcttgatagtaccattagatttcaggttaccactagtatcgaagctaaacgacaagctatcggatgttagagcaaaggctttagcattactaccgttagccccttgtggcccttgtggtccagtagctcctgtgtcccccttgtcacctttactaccctgcggtccttgactaccctgtggaccttgggagccggtgtcccccttttccccaatactatctgaggcctcaacactatacggcgtagctactatgctctcttctagtttcaacttagaatacgttacaacgcttccagcagctaatactcctggtcggaaacctataaacttagtagcggacttggtggtgaaacgaatctcctgctcacctttagtgttaacaagcttctccactagggaagcatacccagagatcagactattaaactccagtatcagatctcttgtggatatagcagcatctgctgtagacactgtatacgtgaatacgtaggctgtgtttcccttaaccggcagttctaatattgggccttggtttccttggaaaggcgttgggtgcgcccctggtcccgcagaagtggtagactcagtattagtaatagtgaaggataggctatccgggctcttagatatagtaccgttgttcatacccgtccatgcagataactgctttttaacagggtataagttagggttaaccgtctcaccgtccagacgaactggatctgaccaagttccctgaagctggttgttcgagttaaactcacccttaaccatccatagaggagaaccatccggaggcgcatcagaccagttagccggagagttacctgtaggtctagctggtttggttgcagccacttggaacctcagggaagtatacttaccatcagcaccaacctgtccatcctcaccaaccgcacgaatcgcagaagaccacacaccgttaacttgctgacgcatataaatgtcgccagttacatatgtcgtatgccagtcgttagcattaccagtcttagaccactgaacaccaactgaagctcctgcaggaccctgaggaccctgtggaccagtatcccccttgttaccttgaggacctgtagcaccagtgttaccctgtggaccttgaggaccagtagctccgtctgcaccatccatggatagatcttcgaagtgtatgtcagcaacaagcatataccctaatgaagaaccagaagttttgttatctaactggaaccacggccaggcaataccctcatcgttagcacttagagtcaactcttgatcgaagtacgcccaggagctattaggagcggggcccgtaaccacagttctggaggggtaacctttgcccccatctttgcggtgaacaataaagcctactctaaaaatggcttcctctaatcctagtgggttgtaccagaatctgatacggactttttgcccccctgctactgggatggtgttcctaccctctaggttatctctagctgtgatacgcagcgccttagagatgctctggtttgttgggccggaaacactctgcagagctcctgcccatgaacctttgttaccattctcgaaggtattggtgataaccatctcgtagctcttggccaagaataccttagttaccgcaaaacgcttggtaattgctccatattttggatgagtagccttaacgtccacccaaccttcggtaatatcggtcccatccaacataccagtaacggagtagttcccatttgcggagttgatgctaggagttacgttacttcttccgccctcagagaaagtgcactgaccagtaacatcggtgcttccgtaccaaactctcatctgacctttggcgttttcgtaactctggcaatatccggagtagttagcaagtaccgtagctgcttcattcgtcataacagcagtcagtacgttctcaccatcctgcaaacgaaccacagtaatctggtcagacaaaccatcacagcttgctgttaccgtaacccacttagaggcgccgaagttcgcagcggttagctgacggttatctccggagttcatcagtgttactgcagctcccttatcgtttacagcactccacgtgatccctgcagtggtattctgttttaatcccttgaacagaacagtagcggcagacttaatatcccccacagtgtcgtatacgaatgactggtagtctgacgttagggcaaagcctttagcattctctcccgcgttacctttcggaccctgaggaccctgaggaccagtagcaccagtatcccctttgttaccttgcggaccctgagagcctgtagcaccagtgttaccctgcggaccttgaggaccagtagccccggtagcaccgtctttaccaagtagatcactaggatgcgccacgtatgccgtagggaacgccccgagttccagcttaggtttcatcagtacgttagtctctcccatgttagagattgacatacgcatagacagatgggtggtgttagcgcccgtagtaatagtcagactgttcctaccagtactggttgatataacctggttgttacgtgcgtgcgtgcccccattaccattatcaaactgcaacagcatcattctagtggacacagcagtttccatttcaaatgataaagtatacacagtattaggcgacacttctataaaatgtgtgccggttccttggtaaggggtagtgtacgcgtcatttctggatggcccagctgttacccggaatctcatctggtccggattcttgctaaccgaagagccagtcccctcagccctctgaatagacatcatccactctttgaatgctaagaagttttcacctaccccggaagcatcgattcgtacagggtcagaccaagcaccaattatagcgttagtatccccattaaacgttgctgttgccatccaaagaggagaaccatcaggtggagcgtcaaaccagtccgtaggtttattacctgtgggtttagcgggcttagtttctgcgatacggaagatgatattggtgtagttacctttcttaccgtcaggcccgatttcacctttctcaccgatagcacggatggcagggccccaaacaccgtcaacgttctggcgcatgaacaagtcacctgtttggaaggtatcatgccagttactggaagagctatccttagaccactgaactagaaccgacttacctactataccaatgctatcagagtattccacctgatactctgtcttctcaccgccctcttccagtttgatcatgctccacgtagtcgctacgttaagggtaagggcagaagggcgtaggattaagtagttcatacctgcaggaactacaaaagtacgcttaacttttatggacttcccggtattcagttcctctatgtaggtagattgtcctgagtctggattagcctgccagaatataatatctcgggtctggacctcgctagccgcgtcgatattgtaggttagagtgtagcgtttacctggagtcactggatgggaaaacgccccactaccgagatacggagttgcatagcaccctggagccgtattatcagttccggaagtacgagtcaaggtatgcgttagcttctcgatatcgttcttagatgtgccggcttccgtaccagtcatccctgccatccacttacgaactgcgaacaggttagggttgatagtcccgtctaggcggaccggattagaccacgtaccctgcagttgaccgctagcattcatagtgcccttagtcatccataaagggctaccaactggaggagcatcactccagctacctgggttgttaccagtaggtgtgccaggtttggtatcctgaacgataaacttcattgaaatgtagtcaccgtcagtaccgtcagcaccgtcttcaccaactgcacgaatagcaccgccccaaaccccattaacctgctgacgcatgaaaatgtcgccagtttggaaaccagcatgccagttagtagacccatccttagaccactggacgtttacagagttaccagcagggccttgagcaccagttgcaccagtatcacctttatcccctttgttaccctgtggaccttgtggtccttgagaacctgtagcaccagttgcaccggtagcaccatccatttcccgagcaaaaatgtgaatatcggtaacgtatattttacctagatcactaccagaagatccggccatctggatccacggcattgctataccggtattagaactgccaacagtaaactctttttcaatataagaccagccaccaggtactacagtaccttgtgcaataatgagggttccctgccagtcaacagttccatcggccgcccttacaattcgcatccccatgttgatattgactttggactcactagccattatccacatgcccagtctatatttctgaccagctactacagggaatgcgttagcatcttctatacagtctctggcagaaatcactagggccttactgaaacctgcggctacaattgtggcaccagaaactccttggacactacccgtagaccaggtacccttatttccgttctcgaatgaagtggtaataacgcgatcatacccttttgcaaggatagatttagtagttgccactctgcgaaccacggcaccgtaagtaggatgtacagcacgtagatcgacccaaccattgataacatcagtacccgctggcataccttttaaagtatatttacctgctgaggtaacatctgcatcgaggttgtacttctccatggtactgaaggtacattccgaggtaatctcacgtgccccgtagaatactttgaagtcaccagaaccagtactgtagttttgcacgtacccagcatagttcgccagaactgtggaaccttcgttggtcagaagacctacaagagcgttggaaccatcgtctaggcgcacaatagtgatctgatcggtaataccatcacacacagctgtaactactacagacttcgatgttttgaagttagcggcagtcagtgtagcaccagtattactagtacttgtcagtgtaatgttaccacctttctcgtccttagcagaccacgttacgtttgcagtagtattctgacggaaagcctggaacaggatggttgcatcggacttcagtttaccttctgcgtcgtacgtaaacgtctgaccgagagaagagaggctgaatccttttgcattatcacccttagcaccttgcgggccttggttaccctgtggaccctgattaccctgaggcccttgtggaccctgagtaccttggtctcctttctcaccgatactgtcggaagcctctacgctgtaagcggtagctttaatgccttcttcaagttttagattagaataagtaaccgtagctccggcagtgcggacacctggacggaagctcaggaacttagtatcagcacgagtgacaatcttagcttcctgcttacctttggctccagtcagtaactcttggaagttggtaaaacttccggtaatgctagagaactctagtaacaggtctctcagaacaaagctggtgctatcagtactaacctcataagtgaagatgtacgctgtattcggctttactggaatctcaactataggaccttgtgaaccctggaacggaacaggatgtgcacccggtccggtagaggaggtagtgctctctgtgttggttatggtaaagctgagggtatctgggttcttaaccatagtaccgttgctcattccggtccactgatccagtgttttcttaaccggatacaggtttactccaataccttcgccatcaatacgaactggttctgaccacgtacctactagggcgttggtttgaccgttgaactcagctttaaccatccatagagggtttccctgaggaggtgcatctgaccaacctgaaggggtctggccagtcggagtggcaggtttctcagccgccactcggaagcgcatcccaatgtagttacccttagacccaggagtaccattagtaccatcttccccaactgcacggatagctgaactccacccacctgtaccaacacgctgacgcatgtagatatcaccagtagtaaagtttgcatgccagttagtagtaccatctttagaccactgtacttctactgaaccacctgccggaccttgaggaccttgaggaccagtagcaccagtagcaccagtagcccctttctcgccgtctactcggatcgggtctgaccaaccctcaacagttagagcgttagtatcgccattgaatctaccagaacacatccaaagaggggttccagtcggtggggtacgactccaaccactagggtcattgatattgcctggtttcgtgggcttactagcactgatctggtaaatctgaacagtgtaatcaccgttagaaccatcagtaccaccagtacctgggacaccagaccactgggatgcagctgagtagttggtaccgtctactagagcaggaggactcttcttaggatccagagtaccctgcacaacgtacacgttctgattctgagcagtgcggttaggcgggaatgcggaccatccagctggtggataaacttggtcaagcgggcgacttggcagagatgtaccaagtttataagcaaatacagtctgcttaccctgcataccggtttcaaggtctacatcgcctccaggagtaccgattacaacgttaccagaaatgcgaagagtatcaccgtcccagcgcacatactgagtgttattaccgaggtcaaatttggccttaccgtcaacgttgtcaacacccatccagacaccacctgcgttattaccgtacttcttaccctgagtgaagattgccgggttatctttaccggtcaggttagtaagaattacgttagcagcattaatgtctttagtgataactttaccatcgacgtttacaatcttattaacagggtcgaatgaaatcggcgctttaccattttcatcgagtgtaccaagaactactgcacctgtagcagcatcgactaagaaagtctgctcccactgtttggtgttagagttccagagtttacccttgatacctgcgtaggtcatttctacaccggtctcgttaatgaatgcattgtcgaaagtggtgctctcgtctataatataagtaacctcgttagagttagttatagactgagtatctgggccccaagcaaccgatagtacacggaagcggtggcggattttgtaagggaagctagtgatagtaccagctttagctgcacccacgtttagcttgttggccttagtccatccagtttttgcaaactcatcgttactaatatactggatgataaattcacgaacgttagcacccgtaccacgagtccaatcccattccaggcgaacgtcaaaacgctccataccatcttggatgtgggcagttttgaaacgcaggttagttggggcagacggtggagtgaagttgtaggtcaggttaaacagtgacggccaggtatcatacccagaaacatccacagtaacaccatctggcatagtgacaacaccagatacccggatattgtatctgccaactggaacaccaccaaagatgatctgctcagtgattggaccacggtagtacttagtccaggtgctagagccctcaggtttcatttcgatggtaacgtattcggcctcaccagaaagctctacgacaaccataggagcacccacacccacgtcaacagattctgcaaaagaagacaccttagtgatcttcggagcagttttcatcttgaagttaacggtgctagagaggttcatacctactttagcagccatcagctctgcatcaaccatcgagtcatagaaagcaccctgggcagagtaggtagcgccagcgattagattgttaattgtggcaatgaatgtatcaacgccggtaaagtccctacgggtagttactccacccgtagttagccagaaagttctaccaattacgtcgtaatcggaaaagattgagtgctgaatactcgcaatcgtatagccggtcacgatattctgcagtaccattttagctggtgctatgtttgaaatcatttagatatatgcccatgcaaccgacttctcgccctttggtccctccgcctgaattcttggctgaagtgctctgtaaatccccaaagtattcgagttgttggccttgtagtcgagcttattatagcccaacaggtagctgtagttatataaactggtgatcttcgcggatctaagcagtttattagtgttgtcccttatttcaagcgtatagaaaatccctgaaatcagcccctcttcttgcagcttgtcccaccctaactctaagtcaggtccgacccattcagcagggtcaggggcaaggttaagcactcggaagttttccaccatactaaggtttttagctgagttcaaatctacagaaattgttactggagagctacgacgaccattaatatcaacggcgcggatctcgaaaatagtcaggccagcaggctcacccacgatatcttggaacattctaacgttaggtgtgaaagcagtctgctgcacaatataaggatccacgcggtcggatttacgtatcgagtaatagactacgttaggtgtcaagctaggaagccatgaaagctctccgtttttgccaacatcacctaccattccacctggtgtaggggtgtacttaaagtctcttgggggcaggacgttattggatatttcaggaatggcctcgctactgttatccacctgcgttgagttaataaatacatcctcaccatactcctgaagagttacgtttatcttaccatcccttgtgttctccacctcatctactaggaagaacttcttattccagccataacgatcgtaggtgaatactaccggatcgttaggttctataccaaggaatttgtaaggtaaagagaaactcagagagcgagagtaacgagacttcttaagctctctatctgccaagcttctggcagtgtagtagttggttatgttagcaaaagaaagttgaagtttcttatcaactccacgatcctcattcttaaacttagaattatagaacgttatagagttggttttccagttcagggtaggatcaatcagagatgcctgaactgagttgtacttattacggcctgtagtatctgagagatccaggtccccataagtatctaggaaattaagttctagcggagtttttgaatctttctctacggtgatgcggaagatacctgataggttattcaacgccccctggaaggattctaatagctcctgcacgtttttgaacacagagttggagttatccaggattgtgttcatttgcattatttgtctgttttcggctgtccagctctcccatccaacgtatctccagaaaggttgccaactagtttgataagaggtgtctataatgtttaatagatcggcctcttttctccagtcaccaatcaccattctgtctatcgggatacttgcaccaaaggtagtggaggttaggtagtcaaatgtttgccacacaccattctgactcgttttatccattttaacagaaccgtctgcctggtatactttcactttgcgtccgcttaattctgcggatacttcaggaatatcagttctgttctccgtgatagtgaaacgtatgacagcgtatgcggtgtctaataacttgtacctagaatcccagtactccggaccattaccgttctctccttgaaggaagaaattgttagcagcagcaatgtctcttagtaccgtagctaccgtttggtctggcttgccatggaatgtccagattcgtatatctccgttaccgtcattatacttgtattcttgaccatgcgtggagagagatgttgatgggagtcctgtggaaattcttgccatagtatctcccgacacccttttttgtccaaagcatgtacgagaggtactgtcagtttgatcggtacagatcataggggcgtctccaaactggaagtcgaggaacccttcaatctcaccctcacagaacgcgtaaaccacgtacacaacgtttggattgtttctttctgtatccgcgaaaaccgggataccaggaactttttgagtaccgtatactacaggaataaatttggctgcaaggttgaaatccaggtctacttctttagtaacagtctcataatactttttaagactgtagctcttggagagaccgaataatttctttttagattccagcttgtatcgttcttcttttacttgatatttagctaggaagttaacgctcttgttggcgtgaaagaatccgtagtcctcttgatattccggtcgtttggcaccgtgagaaggcagtaattctccatttacaatctcaagtcctcggtgggaggcatcatctgtgaagcgtccagcaacccgctcaaaatcatagaattcgttagaacagttccaagttataacagaagtgccaactccagatactgtattagtttctttgataccaccacctacaatcttacctctaaagaagagtaacgggccgttagtatctgggtccaccggaaggatttccccattgtcgtcgatgatcgcctgatatatagaaatagagcgatctaaaaatgatacaccactttgcacgagctttatgacttcattggcatccgtaccagtaacactgaagttcaaactgccgacggttaacgtacggttttgtttgtgactgctaattgttttaattttccctgattggaagagtataccaccatagttgatatctctcatgtagtccgtcatataagcataaacagcgttattacccgtggaccccgggagttcgatagagacaagatacgctaatcgtatcttgtcattgttggcaaggtaggctttcgcagaaggaaggatctgtctcatagactttctctcagaactaggttaaccccgtcatatacgccatcaactgtgatctcctcactgaatgaatctccgttcattaatttagtttggaagagaatcccattgaaacgtggtctctcggagccgttggtagtgagcaacagatcagggtatagattaagtgtccatactcctgctacgttcttaaaagatgtaatcttgtacacctttggatgtgtggttaactggaataaatcaccgggcttaggctctccagacagggagctcgtgttggtgataaccagtgtggagcctttttgtccggcggcaatgcgacagttattcgcatctcctcttattcggtaagactcataatgcgggagcataacgtcgagatagccccgggtacgtttatactctaaaattgcggacgaaagtacagcatactcgtcgggaaacatcacaggataactaatgttaagaccccagtactgagtggctgttttaacttcgttaaccttgccgtttggtagctcgtctctgatcactggatcattatcgatcagtgtagctttatcaaacccaaggccgttatactgaggatgtgtaaagggatctggtaatctcatgttttgttttctcctctcaatgttaatattatagtcatatcaagaaaaattttcaagataattttataaattccaaaaagaagggaggacaattacgtcctccctttagtttagttaattcaggttctttaagctcagcccttgttcattcaaggctagctctacagctgcctggaatgccgcgggattctccaatgcgtactccataaagctcttagcatccattgcctggatattcagattaaccggtcttctagcgccaccagaagaagtttcagaagctactttatccgatggagttaccttggtaggcaccataggagttgcaacttccgtaccgtgttctcccatcttataagagacgcctgggtaggtgttaccaccttccgcacgaggaatgaatccattagcactacctatacctttgtcaccgcgaacgtaagataactcacctgcgtttgcacccatgctaacgtctacgttcttctggcgctcacctaaagtcaggtaagatgcggtttcaccaccagacccggctatatcggtcattccagtagcactagatgcctgtgctagagataaagcaccagcaagtccagccgcgatcatcagaggaatagagaacggatacggaacagctgttgctgcctgcattaccgctactgctgtctggataatgatttgcttcttagcagattcctgctgaagtttaatcttctccgcttccatctttttgatcttgttcttagactgctcagatttaccgtcacgtttctgctctgccgcgatggctgcatcaattgccgaaatctgctggttagtaccgtagctgatcatctgactaactgtctgcatacctgctgcaatcatggacgtagtgtccagagacccttgagagaactggatcatagcgttagctaagttccccatactttgagctgtagcagtggcctccgagtttagctgagagagcttactgatagctgtatcgtacgacgccatctggttttccatatcggcgaatttcttgtcttccccctccagacccgtagtaggcgtatagtctgcgcccaacgactgtcctacgcgatccatcatctgtgcagtacgctgagctttgagagcagccatttgagcagtagtattagcaatctccttgctccaacgtgcctgttcatctgcgttacctttcgtgaattccttcatttcctggtagaacgctaactgctcctgcattttctgtgattcacccattagaggcttcatgctttgattgcgctcgaattcctctttacgcatctcagcagttttagcattacggtcaagctgctctttccagatttccctttctatcgaagcaatgttacgtctagactgttcggcttctttctctttatcagcctgagtcttcagtagggctaacctatctttctctacttccagatttagtttaaggttcgccacattatactgagaatccgtcatagtgcgattatttaagagtgcgatttctcgatctatacctactatcttatccttatagaatttctcctttttagtcgcttccataccctggttcttcactttgagctcttccgtctctaacagagtcagctctttttgaatcgccttgttgtccttgttggtcgccagtacagctttcaatgcctcttttttcgcgctaagttgctgcatttctagggctctacccgcttcttccgccttatccttattacgggtggcagcgtagacctccgctatacgcttctcaacatctagcttagacttagcctcatcatttactatcttctgatagttagacatggccttatacgcagtgttcatctcggttacggtggagtatcccagattaaggtccttggtcatttgattggctttttctgtagatccaccagccaatgactcaaccgccttaagtgcatcacccagtgctgcagtagctctagatgcagtgttagagtcctgtgcaaagttctgaatatcgttgctaagatctccagaggttttctttatgttattgaattccttccgtagagcaactgccccgtctaacgctgcgttgtcaaatgtgtataatccattacttgcttcaacgttctgtgcaatattgagttttcctgccagttctgggttttccttttgagccttagatagagcggagtccctagcgtctttccatttttgaatagctcccgcagaatctgctaactcctgctgtaacatatacgcctgtctacgcatatctgcagtctgttgtgtaaattctttgttagctttagaggctcccagggtaagcagattaccgaacccactgtagttggcggctgtggccagtgcagtggacatatccatcttcgcctctctatccattatctccttattaagagctgcgagcttattttttacttcctcttttactttgactgcatcatccaagcctttctgagaagcctcaaggttcatgaccactgcgttagagtctttaccatccatttgcttaatcgactcttgctgggcagtagctgcctctgcggataccgaagccttggaagtatagaacgctgcgtttatagatgcaataactggacccagatatttagcagccgcttgttgaaccttgcgtaatgcagaatccgcattagctgcaaattgctcccatggggttgctcgtagtacctcatcaaggtagccgaagcgtttggtagactctgctactaccgcattagcgtatgcctgctgcttctggaaggaagttagaccctgaatgttatacgttatccccgtattggccgcattaagtatcttaacgtattcggcatacgcatcatttaaacggatggttacacctaattcgtccagaagttcaatttcctgcttggacacacccttgattacacggttgagtgcatcggtcatatcaacgccaagagtagccgctgccctacgtgcaactagagcaaactcgctaatctgtttagcgtcgaaaccatacgcggccgcagtagatgcctgacgcattgcctcttcaaaggacaccgcgtggccagtagcttcctgcagtgccacagcaagggactgaataggtgtgcctgtcttcgcccctacgatagaaccaaactgctctagacggttaagctggtctccaagttttagctgatcaaacgctgctttaagcacgtatacgttagaggctatagcaccgtagataagaggcatagggccagtcaccatagctagtgctgcgaagttcctagtagctccacgagcagatcctgaagtatttcccaacgctctggacgctctattagcagcgctaccagtacccgttaacgttgaattcaacccacctaaaccagtattaacatcccgaacgcctgagtttaggtctgttaatttgtcagataccttgtccgtactccgtgccatatcagccatggtggtattcattttgttgcccatagcttcaatggaggttacaatcctgttcatttccgctactaaggcgcccatattgaacgctgcagggttaccaccgccaccagcctgtcctaggcgtatacgtttggctattagcttatctattgcagcagcagaacgtattgcagcagcttcaatagcgttgagttctggcactactttctggaagttgttaatcattctcgtagaagacgaggttgattttgatgccatatcctggaaccccttggagaacccgcgctctagtatttgagacgtggaggccaacttagtttccagggcatttaaggaggccgttactgcattaaattgcgtaggtaattgaagtacgcccctgcctgcctgtatttttgacaatgcagagttaacttgcacggcggctttagccagttgggtgagtgatgggaccatacccctgatcgaattacccagtgggtttaggtttcccgtaccgcccatagtagcaaaagccctggacagatcatttaggcttttctcgataccggttacagacccctctaactgagcgcgcaactgtgtcattgaagtacctatctttccaacaactgtaggtacagaagaaagatttgcgcctgctttaatgctttgtagtgcttttcctgctgctatagcgtccgtgttaagctgttttaaagcggttgttactttagagatatccgaagtggaagctgaggcggctgttgatatctctgagattagcttgctcagactacttccagttcctacggttttcattgaagcggcagctgtagcggtagaggatactaaagacgtaagggctgctttaatcttagatatctcagctaccgaggtattggctgcagtggctaaactagtattaatcttctggatttcagttcccagactatccagtttggtccctggtgcaatatttgctatagatttactcgctaaatcagcttttactgacaactcaagaagtagtttgtttagcttggtcacctcttcgcccatagaggatacagctacggaaatcccggacgcagccttactcagatgctctccggcagcccctaaggagtcggctttcagcccctgaagagacctgcctgcctgcacggcttgctccgccattctagctaattggttacctatcttttccaccccagatactaagtggctaagatccgtactagccttagcagcactagagctaatagattctaacccggcccctgccttcaaggtctgtaacactttagctactgaagaggcgtgcgcatctaactcctgaagagccttattgacgcggtttaagtccgcaaccgaagaagtggctgcagtgtcaaaaccagaggccattttgttagcggcggaagtcaccccgttcaggtttgcgttgatctttaatacggatttagccaagtctgcctcgaacgaggtaaacttgccgcttagcatgccgatagacgctgctaatgctgtaatgctagtagtcgaggatagcttctccagcgacttggcagtacgtgatacagatcgttccagtgccgtgaaagatccaggaagtttacctaagcttgcattcagaccctcagaactctgagtggctccgtctaaagcagcttcaacatccctgatttgtttagcggctttggatccaccacgctgcttgatatctacaagtaactctcgtattagtctatctgtcatgattttttccaataaaaaaggcctagggcattaaccctaggccaagcctcacgtggaacgcccgttggaggaaattgaaactcactacctgttagaagacttcatcttagacttcttaatagctgcctcaacgcgtttgcgtgatgccgccacagcatgtgagtcgaatatgttaatgatttggagtatcagactcttctcatcagcgtcttcaactccgtagatatcaaagaagacgagtagagagctcttatccttacctaagtatgtaggataatcccccgggatatagttatcagataagttgttatatattgttagggcagtctgcgcgatctcaggaaagtcagtaatttctgtgaaacgcttaagtacctctgggttaggctcttccccaagagactcacacatcgttagatactgctcacgtgtaatcttggagtctccacccttgacacatcgttctgcaaaagcgtctatttctttaagcagtcggttccgattttgaaccacgaaaagtgtctaagtggaacacagtactgttcatccaggtctcaaaagcactggagttacgtactaacatcatcgcattatcaatgctgaactctactttgtcctcaaggcgatcttccgggacctcgatcaacatcagtttttcaacatctgcaacagttaggccttcccagccagcgatagctactttgacgaactcttctgcaaatttgtcgtcattctgcactttaacagcgataccgttcacaaactggttttcctgagctgcctctagaatctttttagagagctttcgggaaacatagtttaccttcagtttgaagtgtggcagccctgggtacgcaacagtaatctgtttggtgtctagtgcaatatcttttaagttaatactcatttgttattctccaattagctttattcggacagggtctgattgttcagtaggaattacatcatagtcgaccttgtacacgtcggttaagtctaggcgttttgtgattcgagtggaaggaaagtccaccacaatatatttatttctgatttgtaccggtaggccaacatcaggcttaatgttatgcgtagaatctatctggagactctttgcataatacatcgatatcaaagcggatgagttcaattcgttaacgattgcccttctattattataaatcttattgatatcgaataaacttctgtcaccccgccattcacattgttgctggaatgacataccggctgacataagccctgggagcactctcccattcgaagatacctgaggtaatgaaaatggtagcacctcaccttgatcaagcgtatagctgttgagtgggtggcctacttcctcaaagtatcccgactcgataccaacgtttagcaccgggacactcttatctagagaaaagtcgcaggtggtagcaaaacagttatcgaaacgtaagctcgtgttcttgttaataatatatacggagaacattttaggctcaatattattactgaacaagggcatctgatacattccgtctatctctataaaccccatcaactcgaaaaatagaccttcgagagcattgctagagaagttaagagttagagaaattgaagaaggagactgagcagttatcttcgaataggcgtagttactgcgtctgtgaatcgtcctacgatttgctttaaactcttcgtaggacgttccagcagtgtaatcagacagggcgtcaaatccgtacgccctgccatcgtactcgatgactactctagactcccgcattagggagtatagcattagttatccttatggagtgaccgggttaccatcaccagaggtaatcagtttcgcgatagacgtcttggtgtatttagaagagaaacctaagtaaccttcatcaccagcatccatctgagacgggatagccttgaactcaatagatacccccagcacatcatcagtttcgattgacgggatgttcaggttagcgtgcttagccaccagaacagctgctggacgagcagtatcatattcaccacctaggatgattgctacttcgaaatcgttcacagctttcaggtcagaaaccagatctttgtatagctggatagagccgttggcagcatcattcatatacgctgtcaaggaaccagtcagctcgaaggaaccagtaaatgaaccgatcggaacgtcaacacgagacatgatgttaggagtcaggtacgtcacgttgttgttcatggtgaaagaacctcccgtgatcgggatgttataggtttttccgccggtagcgttgttcttcagcttaagaatagtcagtttgttcttgatataagaactctgaatcttagcataaagagcatcgtctataccgatggttttaggatcgaacggctgtgtggccagagtctctaaacgggtaccgttgcctgaccaggttacacgaccgatatcatcaatatctacgttaacctcagcctgcccaacctggcaattacggatcacagaccaagagctatcggtcaggatgtagatgttcaacatggccagctcgtggtatccattgtctttaaagttgacaaccaggttagtagcgttctggaatacgccagtagtacctgctagattcacagcagcgccagttgacagcccgtgccacagtaggtagtccggtagaatctgtttacctgcgtcatcatacggcaggatataagtggagaagctccactcagcagcgtttaatgaatcgttaaagcgctgcgaaccacgggtcggcttagggccagcctcatttagggtaatatcagtggagttactgtcctggctccaggagacatcatcctggactaggatctcctgagtgttggccttagagaaccccgtagtaacggttgacacgaagattcgtgtattacgtaatagttgtacagacatttaaatttctcctgagctgtaacttatctatccagtgctcttctcagaggcatataccggactgttacgttaacttgagcaaaaccaaacggggacagtataccctcgtctgtggacaccgacgtgatctgcatgtcagtggcttcagaatcgatagttgaaccatcaggtttcattatagtatattgtaaatttcctccagtgtcaatagaggtttttacatccgctatgagtttctcaagttgcatgttaatatcatccttttctttatcatagataagaataggaatttcaaggtaaacccactgctgtgcagacggcaggtagtttccagtttcggtacccacgtggactgctatgtaagggaactcattgatctgctcaaacgaataagtctggcgggatacgttcccatacatattagtaaagaactctgtgggattactcccgtccatgtccttcttcagtcgttccactagggcatcagcaatacttgttctgtaattcattatgtaccctgatttactcttatccggtatctagaatggataaggtctcttgcagccttagcgattgcctcgccgatcagcttctgcgggttcctagcaccagggaacggtcgtagggaaagtccgcggtaagtagagacggcaggattgaacacagagtaaggcttaagcatgtagttatacgtgatattgaggtcaggattctttgaccctgcgtcttctcttaacagcacgtctttaatcttcaaggaattggcgaaacgccccgttctaaatttaaggggtgccccagcttttttcatatccttaactaaatattctttcgctacgagttcaagtaacgctctaaggtttgtgtttgagacgaaacgcccagaagcgccagaaatagcaccagcgtaaccgttgtcagcatctgaaggatctccaaagttaacctctaccctaccggtagatcgttttctccctatcgtggattttttaccagtgatactatttagaaggttatcgataacaccaacgtcgccttctaagttaagtgacgacgagacagcttttaaaatagaggacgtccgaacattcagtaagtcctccgataccggcttggtaaatcggaaggataccttgcctatggtgccatctttgtggttatccatagtttccgcactatatatcacggtgttcttagtagagtggctaccaccactcataatgtccagctgttctttaactatctgtcgagctagatcgcccaacgccactacagcctccggtatacttcgattatggtacgaatatgttccggtacgccagatttagtggtattgaaagtaacggtttctccgccaaatgtacgagactcgcggtagtccttcttgacccaatgatcgactaggaagcaagctgctaataccaggtcgtcagggatcgaggtgaagccggtctgagtaaactctacttccatatacccctctggaggggagaatttcagcaagagcgtaccatccgggtagttcttatattgcgacttatcgatctcctgatcgttaatcgtaattttagtgatcgtgctaggcacgggagaagataggaagtactttttgcgtgctggtttagtaggcagaacgtctacaacgttagcagtgtcgtcaatacctagaagctgagtaatcagagcattagccgctttgattaacattgggatatttgactctaagtcaggacgtttaaggcctccatatgttctccaatcagaatctgtcatgaattgcatattttacccaataaaaaaggagagccgaagctctcctttagtcggcagtatagccaaattaagcagcgtaagcaccagcaactacgccgttctcgaagaaacgcatcaggttcagacgctgagtaacgtagtacgcatcgcgctgacgttcagcctgacgctctttctcaacggtgattgcacgctgacgaggaacgatgaagttgtcacggtaaacaaccacacagaactcagcacttgcagccttagctgggaagaactcagaaaccagtaccggcagaccgtagatgcgaccaacctgaccctgcagtttgatagcggtggtagcggtaacctgtgcaacgtcctggaactcttcatcttcgatcagatcgtaataagcatccatcgaaacaaccagagccagtttgttcaggtctagaccgtggcggcccagtgaacgacgcagcttgtgaatttctttagcggtaactttaacagaaccgtcagctttagcagtggtagcaaccactttaccatcgtctttagcgaactggatcagacctttcggagtaccagcagcaccagtaccagtcaggaacgctttttcgattgcgatagcgtgagcttcaatcaggcgacgacgcatgatcggcagcagagtgaagatagcatcttcttctgtttcgtcggtcatatacgctttagcagccagtttgtaagtcttgaaggtgatttcagacagcttggttttgtcttccgcaccaacagtggcaggagtaccgtaggtagaggcgtcaacccagctagcttcaccagcttccggctcaaccatcatggtcagcaatttgctagacatcggcagttcttcgaacatggtaccgataatcagtttagcctgaatgtcacgcaggatacgcagggagaagatggtttcgtacgcttcggtagaaacttcgatagaagaagagccgttaacagctttcaggtgggcttcgccacgcttagtaccgaatacatctttctgcattacataggacagaagaaccagtttctcaacttcgtcttcgaaatcttcctgcttaccaaacattgctttagcaacgccgtcagctacgaaagagcgactattttcacgagcggccagcagagatttgatttcttctttcagaccagtgatttcttcctgctgggagttcattgctttaacgaacgcttcagcggactgtttggatttctcatccaggttttttacgagctccagagcttctgccaggtttttacggtcttcaccagttgctttagcaaccaggtcttccatacgtttgagttctttagcttcctgctccgcagcaaatttgcgagcttcttcagctttctgagaggcggttagacctttaagctgctcagcaatgtcacccaggcccagatctttagacagttgtgcgatatcgtaagacattattatttctccattatcctttagcgtaaccagcggctactaggaatttctctaaattagaaagttcaggttgttcaacaggctggacctgcgaagattttacaaaagacttgcgaagctccatgtaatcattatggtttacagacttcgaaaggctaaaagttgagtcttggttgcagggaaccgagactacagagatctcgagtaactccagatctttaataatgaacgtttcagtcatatcgtcccactcggcatctttaatatagaagcctacggagaacgttttaagaacctcatcacgtattaatgagtaaatctgtagatcagcagcactaacctcaccctcaaccataagtccggactcggtaggtaccaggtctaggatcttaccaattggtcggctgtggttatggccgaaaagcatgatcgggttcttcataaaattcttgagggcgttacttgtagtccacgcttcggagagaataacgtcgccggcgcggtctttggtaattgtgttagcataccctttgatttttaaaggaggattatcaccctcaccgacagctttaacagatttaatctcagcattaagattaatattctgcatcgtttgctccaaacactttcgtgttgttcctcagttttcagatactattattacataccaaatcgcgaatgtcaaaaggtatttgaaaatcccatacggtgtgtgggattagtaggtagtcgaaattacttacactgagaataaatttttccacttgcacagaaaaatggggagccgaagctcccccagttatcaagtattacacaggtgcagtaggcgccttaactgttactgttgcagtgtcggtcttattgccgtcagctgttttaacagtaataactacggtaccatccgcgactaagttagagggaacagttacagtaccatccgtagctacggtagctttggtagtatcagcagaagtataagttacagacttattggttgcgttagctggggctacggtaccagtaagtttgccagtcttacctgcttcgattgtaatagtcttaggtgacatagtgacaccggtaactgctacaacaggagctttgacctggatagacacttcactagatttaccgcctgcagtggccgtgattttaacggtgcctgctttagacagtgccgttactaatcccgttgcgctcacagtagctagggtagcatcgctggtcttccacgttacagtcttattatctgcgtttgccggtagaaccgttgcggagagctgtgcagtcttagtataatctaaggatgcaggagctcccgtgatgctaacagaggctaccggtatcggcttagttgcttctgcgtaggcctccgtaaactgcttccaggttttacggttggttgcagcgtacccgtactccttacgcaggatctggtaagtaagatgtgccttaacggttgcgaacacgttatgtgcttctggaagaccgttcgggaacagtgcttttaatgctctatagtcaatcattgtttttcctcgtctttattgggggcgccaccttcttgtccacttactccggtagctgatccagctacgttggcagggatgcgaattttcttcatctgctcgtcggccagttcctcataaccaagttctatacgaccttcgttaccggtaaggataccgttgttgaccagtgcagttacgaatttagcctctttctccttgtctggagttagtgctactacgtctttagtattgggcgttactttaaaaccgaagaagaacgtaagcgagctacatactttattgagcataggcacaatagtcatgtagtagaacagctcaatgttcggtcgaatattggcgttgttacccccatcgatcaatagctgtgggaccccaagagcgatacatacgtctttattaaaacgagcgatatcgttttcgaaatcgagatctttaaaggaggagatttgggagtacggcttagccttcatcccgccgtctagaatgagcacagttgattggccggtactagggttatagtccagctgaagctcttcttgtttacgctcacggagctttttatttaggatttcatctgtttctaggataagaccgataacagtaccgttgtccaggaacttctccttgaactcaagcattttctcacgtttagtaagtgagttgatcacggtagctacgcgagactggcctgtgatctgggagttaataccaccattctggccattatctttgatgaagataatttcatcaacgcgatagtcgatcatattattaaagacgaatttgttaacgaattttttgtcatctgcttttacttccattagggcagcaggcagatggtacagagacgaaccgtcccaatggatatacgcacacccttcgaatagaaggtcagacactattaggcgtctaaaagtactggagtccatatacgggttagggcgaacattaagcagcgtctcaagagttttgctcctgatcgtgccataggttgttattgttttatactgttcacctacggtgtaggagcactcagcggcgctgtcaattaccatgttcgcggatctattaaggatctcaatagacgaataggctttgccagtcgtgaatggcttgacgttagtacggtgactaacatcctccaagtccctgattatgcgttgtccgcggtttagtttagtaactaaccagtcacgaatagccattataggaaccttgcgaatcctgatttctcagtcttgacgtcagtcggaagccacttcgcaaagcctgatctttcgccagtattgcttgtacgaggtgcctctggattcatacatctttcacgttgtttctcaacccaaatcttctgtttgttagctgaaaacaacggcggttctttcgtatagaccttgtgcagggtctgatgatgaaagacacataaggtgaccgtgtcctctactagctcatgccaataatgtttatagaacttatcccgattacttaggacgacttctgagtcagtgaaatccagttggaattctttagcaaagtttttaactagtaaggccacagtcgagtagtggtgtagctccaggctctcctgtgagtcacaaatggcgcaacggttgcctcttttgtactgggctttgattccatcacgcattatggagattgcatctctcttatattttacattggaagccaaagtgtttctcctcttagttgggaaaatactacttcgggtacagcaattaaatattcctctcattcaccctgatgtctatgagatctctcaaggtatgaatatattataactgccacacacgaaattgtaaagtgaattttataaagttggaacggaatttgtactcactactatccgttccaactcagctcttatttgccacgggaaatcgagtagatgccgtaacgcagtgcgtcacataagtgagagttggcatcatgacgaggtttctctctggagagcttctcctccccttcctggaagtcccacttgtagttctggagtgcgtgaattagcgcagtacacgaggcgtcgacaatgatcttaccctgctggaatagagcagctaggcacgccaggccatctagaacagattttttggcaggagcagaggatatttcatgctcgtatgctaagtcctgtcggaactgtgcagctgcggagtcgacgaagatacggtctacgttgtaccggtctatacagtgctgtatgtacatggcgtgctgtgctgtagtcttctctgcctgctggtattcctcaaggatatagtacacatcttggtcatagtggtacttaatagtaaggactgctgtcgggtctctgtaaccaacgtcgatacctagaatggtttcgaactcgtggtctgctgcaaagaagtgacccatgcctgcgagatcttgtacgtgctcggaaacgctaaaggtatcgtagatctgaccttcgaatacggagaagtcagcctcatattcctgtttgaaatagttcttagatacagtcttacgtgcttcctcgatatctgcaagagatacgcgggggttatctcggtatgtaccgtggattgatacccactgcggaagatcttctcggaacccctgctcgtagaagcgtttgaaccagttaccaccacgaggagtggagataaacagggctttagagttgggcttgtctagtgtaggacggagctggatatcaaaagcatccccaccaacgtcggagattgctgcttcgtcaaagataataaagtcgtatgaacgaccaaccgcggagtcagcctgcgcagcggaagccagcttaaagagtgaaccgttagcaagttcaatttctttatcttttgcgttctcacgctcagtttgaaggccatatttcttaatcagacctttgatctgcgcccacccgatgtttgccagggagtagttcggagctactacaagcaccttaacgttcggctctaggagtttgaggaagcctagagtatacgcaatgaacgacttaccaacacgacgggatacgcatgctgtaatgaaacggtgacgtgggtcttccagtgcgtttatgattgcgcactgcggaccatttggggtgatgccctcggtggccagcaagccggacaccgggaatttaaagaatcgtttatcaacaccaaaatccaccacgtcagtcgtattaatataactacgtgagatctccattatttaccagcccccacaatgcgtgacaggagatccgtgtagttagagtcgtgaccacctgccaagttgatctgagtattagtctggtgtacaggagctttagcctgcttcaccttctcatactcgatctgcatcttcatctcatccatcttcattttgtgcatgagtttgaggatatccataatatccatctctgaacccattccagtttcatccagttcctccattttcatagttagaacagtgtctagaatgccaaagaatttgtcacggttacggaaaccagactccatgaagatatccgtgaggtacgctttgacctcaggtttacgcataatctcccggaatttaggttcctccatgccaacagctaacgctgctttcgcaacgtcgctgccagactccaagtaggcctctataactagcatgccttccggagacattgcatctggtacaattaaatcattgctcatattgcctcctttaggcaagcctttgcacagcaatcctaacctcaggaagaattactcgcatattcatgatattgctcatctcaacgttaacccaaacttcaacactaccgtcagccctagctatcagccaatagataatggcataatcgccctgagtggcagagttggtagtagtaggtgcccacatagccttcatttgcatggcgttgttcccaggaataaccccacactgggttacggtcccgcgtataaagtggaacggcacacacatgttaactggaagacacatgatttgatgcacacgtttctggaagtgatttccgaaaattctcagcctactatctacctcgctccactgggtaagatcttctagagggttataacatccaatccctgcagcagcaatccactcatcgtttttccagtctagagtgacgacgcaagccccatttctggagttattaacccctaaccacaaggtagccaggtggtgactagcattaccgctagtacgtaggttccctccaatatcagcagagccggtaccgcccactaggcgaagaggtcgagttgcttcggaccatactggaccccactggtttccaatttccggagggttggattttacataccactgcgcatcagatctaaaattgtaaactcctacagtggttacatgcatctcacttatgttaccttgcccaaattccgcaccattatctggtcgagttagaggctgattgaagtgaacatatccattattaccaacagtagggttgccactaaatctagcaacattggtcgcaataactcggatatcaggcctattacctgggctgtagtttatattgttctggtttatgaacttccacccagtgttcattaggtttataccgtttacaatgaactctctagggctgattttaatctcctggttgcgggagccaaatacgttctctgcgtagaacccctgcccattgtatttcatgttagtaatataccagcgaacacgtttaggaacccggaagttattgtcacggtaaatggcattgttaccccaaccactaccagcattgttgttatccgtgttctcccaccccataaaattgttagggggaccacggaaaaaacctgctttgtactgaacctcctgataagactcagtctggatgttatgagcataaggaccacctaccggattggaactctgcccatatctaggccccatatgtccgtacatattacggttgagagtctcaccacgcaaacatatactattaactcctgtggtacgcatccatgggtggcgcatagcatcaacaccaatagtaagtggtctattgggcggagacacagaaccggctatattgccactaaaagcccccctatagagcacccatccagctttaataatagtctcaaagttaggacgtataggagctccaaccggcggcccaggccctctgtctccccattctgagttaacgccccaggtgtacatacacccagtaccatctcgtagcttctcgttaatagtacctggcgtctcttcgaaatagaaactaatatccatgtgtaagtctgcagaagcacaaacgttagtcttcatactagccatagtacctgcagaagcctgggaaccgacagtattactaaagtaagcgttatacgctttagcgccaacgcctaaagaagtaccataaatgaaacgtctggtaccgtcctcaaactcaacttcagttaagacaaccctgtcgtagtctgcggacagtacctgaataatcctatcgggcatacgcgaacagcgataccaatcaccaccgtcccagagcgtaacctcatgagtctctaagatgacgacgtgtggcatgtcgctatggaatatggtatcccaaccattatttaagtggttgttaatatccttgttattgcccgaggttagggagagaaccttcttccctcctatccttcctgcaaaaaagcccataaaaacctcaaaatctcacttgctaacaagtgacttttataatataatattattataaattaaatcaaccgccaagtaaaccagattttttaaaaccatctaggaggaccactatggaagtagttataggagcacttgttttactctcaatcgtactatttgtcattaccgtaaagcaaggtaagataatcaaacagctagaacgcactaacggggtgttgcaaaagtcttacgacaatcaaacccgtttgctgcataaggcacagttaaacctgtctgaatgtaaggcagaactagaatcagcaaacaagatctacattactaagggtatggtgtaaaacatgactattgtattaattttcacaacattctttttcctcgcagcagtttggtttggtgtgcgggcacatgacctgcggaacgcggtagtagcggcagatcttcgtaacaaaagcctgcatcaagagatcctccaaactcgggcggaacgtcaagtagcgatctcgaaacaccaacgagtcatgaacgatcttcggaatgacccgagcaacccgtactacatccctccagtgacaccgcaggtagcgagacgcaaacagaatcgggggaactcgggaagttctcggaaagtttcgggaagtccttcatcgaactcgggaagttctcggagcgatgatgggtcgactgcggcaatcatagctacaaccgcggcagttgcaacgtatagcgggtatgactcgggaagttcttactgcgacagcggcagtagtagctttgattcgggttgttccttttaatactccctttagcctttttgtgtaatttcataaagttacacatggaggtgggcttagagggttggggggtggtatggtagtccgattacccccctagctaactattagtaccctaactatttcgctagggtactattaactttcttatgatgcgatggctaacgattgaatgaattgttgcggcttaattccgtagtcgcttctttcttcttcggtcataccttcccagcaatgggccaaacgttcgcaaagatattgataatcattatcatcatccagcgcttcatctatgaatgactcacccgcaaggcgcacaccgatagatagaatatcgttaattgcggtagcgtccatcgtttgaaggccagcagcagcagcagcagccaacacgcctttattatcgtctatcatggtgatagtagcgttcgggtattcagctttaagcatttcgaaataatgcgttttatagataccatctttcgaatagtacacctctttataatcagcatcgccaatatatcggtgcaatacatcgcgggatagtatctggatatttccaccgcgccccgccctgatacgttgtttccgtaggaaatagtaatcactttttcccatataacgggcggtaacaataatgtttaatacagcgggatcgttaagcgatgcccgcatatattcaaccagcggtaaaagagtgtcggtcataattgcatcatgtacgcaagccttttcccggtacatgtttaaatctaagttccctttatcatccatacacgggaacacgcgggcaaaggaattaataacagttccgtctaaatcccataacttaattgccttaattgccagtttattaaaagccattttcattttctccggtttcggggttgttggtaattaatcaagcgagctatattataactcgctttgttaattatcagaagaataaagttaaggcatcagccaattcagccggtttaatccgggtagccattaccgggacaattgccagcggcggcgtatattcgctagaagaataatccattacatcgcctaacagataagtatcatcataatcattttcacttacgacgataaacataaggccagcggcggcggcgtcaatctctacgatctcgcagatatcagcctcataaagaatagaatcggcggcgactaattgcgacacaatgccggattctttaaattcagcggggcgcgggaggatagcggctagagcttttaaaacagtgtcgccgtccaccgttctaactttctgatagctaacatgcgggcggccttcgctatcgcgggaaacaacaaggctgttttctacgacgttggacgcggtgaaagatttacggttgttatagatgaaagtaagtttcatttgtttctccagcttatttatttatttatgggttatttattgccggggtatttgccccggcttttttgttatgcaaagaaaacgccgtctttaaagtcaatcaaggtacgttgaccgttttcataggtgattagatgagtctgtgaccagctagacgcgccaatgttatagcccatatccagcgagccagccacgccagcggtataaacgccgccgtaaatgctgggcgtgtgcgtgtggccagtgttcatcttacccagcttacggaatcctttcgggttgccacgagcgccgttaatgccgttgtgaccgtgggaaccgcattcgatgcccgcgattttcatcgattcgtctgtagttaagaagatcgcagcaaaatcgcagccagcaacattgcgcagggcgtaatctagtacgttaaaagtatcgtccttattttcgattgcctcataaatcgcagcattcaggcgataataaagatgggcgttcgccgggtcttgttgaatgttagctttgctatcatccagccagcgagaaagcgctagatcgtggttagattcaacaatgaccgtttgactgaattcacgttccatttgctccagcacgcgccccgtatcgatcaggtcgtcaattaccttgtcgcgtccggcggcatattgtttcgcaaggaaaacaccactagcgcggttgtgatggttgcgcgacgtgaaatcatgcacatcatgcacaatctggtaacgagggcgcaggatatctactagcgcggttccgctagggttatattcccagcttgccgccgcgacagcgtgatccagcttttcggcgtgaatgtcaccatattgcagcgcggcaacatgcccggttacttcttcgccaccgttaacagtaaatttatgattaagatcgtaaaacatcccgctttcgtccatcgtttcaagctggcgagcaaagaagttgccgttgtcgtcgatctctaccagcaaagcgccgtaattatgcagcgcttcggctttttggcccgctttttgctgaatataatttttcagcgtcgccgtgcccgttgaatacatacggcgcaccgtgtcgcccttcattgccgggacactttcggcggtgattttagcgtgaccaatagccagccctttcaggccgtaggcggtcgcagtctcgccaaagccggacagcgggaaatcagcagttggcagaatgttaatttccgccatgaatgcaaagcctgtttcacggttgcccaaaaacacgttttcatcacaaatgaaatctgagaaagcatcatcatatttca

SEQ ID NO: 3 - DNA, 176689 bp, Unknown
  bacteriophage strain capable of infecting bacteria of the genus Klebsiella
acattcccctgaaaaccatccgtaatacagggcgcggttcttgcccgtggacagttcaagcaaatgaactgaaaacgttcgtggttggtaaaacttacaaactggttgaccgtgaagggtttactaccaattcacatggcggatctaacatagcaaacactatccaggcgaagcagatcgaaaaattcctgaataacgaggtaaaaattatctcgaaaacccattcagatactttcaaaattgatcatcctcctgaaatgacttatatctctctgcgttcgtgggaagctcgttatttcgtcgaagttggcgcggctccagctaagaaaaagaaagccaaaccgaaaaaagccaacgttacggctccggttgcgcctgttgcaccagcaaccgcagatcttgatcaaatgcttgatggcggttcggcaatgtcggttgaactggatccgactaaatttgttgaaggccgttcgtatgttctggttaaaccgcagcaatttaaaaatcgttgtggcgctaaccctgggatcaaatcatataccgatgaacatagtaatggtatatacaccgtttaccatacgaattcgctcggtcatcatcaattgagcaaaacggtagaaaccattgattccccgaccggaattgttggttactatctgcttgattctgaacgttcgttcttccgtgaactggcaaccggaactgttgatgaacctgttagcgtttccggtaatagcgctatcgctatcaatgtagacgaagcggctaagaaagaagaaatcgcaaaagcaatggtacagcttgaagaagcggttaaagcccatgaggacgcgcttcaaaatctgcgtactgcttccgacctggttcgcaaagctgctcgaaaagtagcagaagtaagcaagtaaattaaactgggtgctccggcacccttttttatgaggtgacacatggaattattagaaggtaaatcttataccctgaacatcgacgctaaagaatttgcagaaaaaacctggagaaatgctttagctgaattgatcaaaaacaacggctatattacaatcgatcgtattgcgattggggatactgaggacattgcttatgttctgcaagatgatttcgaatatgagatccctagccatatctggaaatacttcaaaccatatgatttaccggaagaagaaccgaagattgctactaaagaagaaatcgccgcgcctgatttaaatttcgtatcttccgatcctaaaatgtggatgactgtaaaacctgttcaacaagatatcaatgatctgcgatttgattatccttttgtcaagcggatcacttcgatttctgtactatcagcgccgacggattcacaggcacttgaatttgcattacagcatgttttcggtgataataagctgtacgcgattgacaaggaagctgctattgatgaacagaaaaaggaaatcatcaaccttctttctctgcatcaacaacttgaagcggtggaattgattgagcgtatgctttctgatacaaagaaagatatcattagcaaaatcactccggcacgaaggaaagcaattgatgaaaatcgagatttacggtattcccgaatcgcttcataaatgttatggttgtattgaagctcggaaattacttgatgagcatggattagaatacgaattttattctgttctaaagccagcaaataacagtgtggggtttgattacgatagaccccgcattgaagagttagcgaaacgtgttcgtagtcgaagcatggcatttacttaccctcggatctttgtagatggtaattttattggcggttatatgcaattgaaagagtatttgggtgaagcatgaataaagaatacattcgcaaagtagcaaacgctattcacgcaacaacgattgattttctggaagggtttgatcatattatccatcctgaaacgctggatagttgggaagccaaactgtttaaaagtatcaatgaacagtttccggaaaaggttaagcgctggtttatcagacaggaaatcgtagcaacgatccttaatgaacgtggtgttgaggcgttcggtgtaacccctctatataagcgaaaccagattacagacgaaacaatcaagaaatataaaaagatggttcggaagtaataaataatcagttaaatggccttcgggccattttttgtatataaatattggtattgaatacaatataggaaaaaagataatggtagctaaatcattccgcgcacgaagtggccttgatgctgctggtgaaaaagttatcaacgttgggaaggctgatcgtaatacgctgagtgacggcgttaacgttgactttttcaatgaatttaacggaatccagcagtatgacccgacccgtggctattctcaagacatggcgatcatttatgcgcgtcgtatctggtacgcaaaacagaatattgcttcccctgctggggctttcgacgaatccaaatggatcgcaactcgtaatgacccgaaatgggtttatagtaacgtaaccactccagacggtagcattattgaatctggtagttacattatggctgatggacgctttactgaacttctgtacctgctgccggacaacccgacagagggcgacgtaatcacgtttaaagattgcggtggtttagtaggtgtgaacagtatccttgttaagtctaacacccgtcagatccgtttacgtactgtacaatcagcacagtatcgactgacccacccgtacatgatcgcaacgtttatctataacggtaacgtatggcgtgttgctgaaactctggataaccgcgattctgagatcgtgaacgcaaccggaacaggttcattccagttacaatctggcatgacagttttccgtaacagtgctacaggtaaaatcactctccagttgccgaaatatgcaaatgatggtgatgtgatcacaacctatgacgctgataaaatgaactctatcaacgtagccgttttgcagatttatccaggtagtggacacactatttctgacggcgcaattactggtgttacttctgtaactagccagaaatccggctttggtatgttcatctttgatgcacagaatagccaatggaaagtatatgatgctgataaccgtgttcgtctgcgtcgtatctatagtgatttaaacgcagttcctaacgattacgtttttgttactgcaaacccttctgggactataccaaacgttacagttacccttccaactgatgttgctgatggtgatcgcgtttacgtatccctttatatgatgggtaaaaaccagaactgcacaatcaaagttaaagatggtacaacggacaagatccgcaccaacaaaaatatgatgcagttcccgcagcgcaaagactatccgcctgatgattggtttagtgtaacttcattagcatttaatgctgctagtgattacctcccgtatatcgagttttcttacatgaaagctacgaaagaatgggttgttgctaattatcgtccgatcgttgaacgtgttgacgcaactaacagatcgcgtactggtgttattgctctggctgcacaggcagaagtaaacaaaaacttggaagacaacccgaacgacgaaactgctattactccaatgacgttagcaaataaaactgctacagaaacccgtcgtggtattgcacggttagcaacaactgctgaggttaacaaactttcaaccgatacctatctggatgatgtgattgttacccctaagaagctgaacgaaagaacagcgactgaaacccgtcgtggattggcagaaatcgcaactcaggcagaaacaaacggaagcaccgatgatattacgattgtaaccccgaaaaagttgcataaccgtattgcatcgccgaccttaactggtatacttgcccttgttgctacaggtggtgctcctaacaccaacacggatcgtgctcaggctggtactggggtttatgatcattcagattatcagaaagcggtaacgcctaaaactcttcgtgagtataaagcgactcagttacaatctggcgctgtatggctggcttctgaaaccgaagttattaatggtactgttgcaagtgcaaacatcccgaccgtagttactccggaaatgctgcacaagaaaacctctactgatggtcgtattggtttgatcgagattgcaactcagacagaaacaaacgctggtactgattacacgcgagcggtaacgcctaaaacgcttaacgatcgtgctgcaacggaaacgctgacaggtatcattgcaattgcaaccactgccgaagtatcagcgggtactgtaactaataaagcgatcgtaccgtctaaactgaaaggttatctggacgatacaagccatattactgttgctactgctgacgggttaactcaatctgggactatttggactacggttaacatcggtattcaatcagcaactgaaactcaacgtggtactttacgcgttgctacgcagtctgagacgaacgcagggacattagatacagtatttgttacccctaagaagttacacgctaagaaagcgactgagagcgcagaaggtatcattcaggtggctacggctgctgaaactactgctggcaccgtcacaaacaaggctgtttctcctaagaacttgaaaaatacaattcaggttgatacttcatggcaagctaccgatctggtacgcggtactgtgaaactgtctaaggggcttggtacttggtctggtaatgatgtggctggttctactcttccggatgatggttatgccgctgtaggtgttgctgtttctccttatgaattgaacctgacgctgaaacattatctgccgatcggggctaaagcggttgatgctgataagctggataacctggattcttcccagttcattcgtcgtgatgttgatcagacggtcaacggggcgttgactctaacgagaacaaccactgtacaggccaacattgattcaagcgctgatgcaacattccgcgtaatgaatgttaatggagatctgaacgttggtgatggttcgtcaatgggtaaacttcgtttgaatggtggttcatctaacgactggtcaattcaagcaagttcagcctctgggcgtattgcaatgatctcaacgggtaacactagcacagttcatctttctgtgtataatgatactcgcggcgttgtagctaacgttaaattccaggctcctgaaattcaggcgattagcaaagtgactctgggtaatgataccgtgatcactgctgctggttctgttctatctatgggtacgaacaacaagacaactaagatcctgacctctgatgctggcaacatcgtagcggaagaatctgcgaactcttataaagtctttactgagaagaacgcgcaaaccttgcttaaccctacgtatgtacgcaaagcaggtgatacgatgtctggacggttgacagtaaacaacagttcaattatcatcgcaggtcaagcggcttggtcaacgctggatgcagtaacagaagcatctaggggcaactggacggctgagatcacagcatcggcacaatacaacttgcttcctggttatgcggttccggttcttgaaccagatccgattaatccagaaatcatgattgtgacccgttatacctatgttaaagcaccgggtactttaacgcagtttggtaacggaactgcattcacttatcagatttgggcacctcgtccgacctctggtactggtgttgatgcgctggcgcaatccttctggatccgtcaaatgaacccaatcacgggtaaatttgatggttggggccgcatgtatactagcaacaacccgcctactgctggtgagattggtgcaacgtctgctgttggtactacggttaaaaacatgactgttaccgattggatcaaagttggtaacgttaagatttacccagatccagttactcagacagttaaatttgagtgggtggcataatgtcaaacttaatggcggggttcggccccgattttgtagaaacgcaaattctatcggaaacaaacagcgtaacttacagaataaccgcaaaggcaacacatcccaatgcggttcctaatcagtatgagtttacactaaatcaaaaggcggtagggacaccgcctagtgttgggatcaacgtatggagaattaacaatgctgtagttgatccaattaaaaccttcacattatcgaatgataattcagcaactgcaaacaaagcgtttgttgaatatatggatgctcaaccttctgggctgtatttgataatgactaacggtgaatacaaaacaagccaaatcgttgatgattggtttgctaaaaacagatccgttatgtggcaaggcgctgatttcgctcagagattcccaaattctgcatatgttgcattgtatggggcttcaaaatctcgtatactgattgaatcgttttacgcgaacgatggagttttaaaagaagattcacgcgcatcaatcgatcttgtctatgataacgttggtgatgttgggcgaactggtgtacctttcagatctgttgaagatacggaagaatacaattcaaccaatggatctgaatataaagtatatcctgttgcaaacccagtgatctctaaactagctgattacggtatggctcctggattggctatgatgattactggtgatttttacgccagtaaagcattattggatgctggatcaacaacaagggttactgttcgatggtttacgggtactgctcaaacttcatcatcggtgattgaagttcctgcaaataaacctgatgagtggttacgatttgaacagttctatacgatccctagtggttgtgatggatttaacgttgctgtatctcgttatcctaaacccgctacggatagtttatctgcgatccgtaacttcgtgatggttcaggtatctgctgccgaagctgatcaaaactttgctgcacagtttggggttaacggtatcagaatgaacaacatgattgatggtggaacaccgtatatatttgaattgccgaatactaaggtttatcctggtggcgattattctgcttccgaattccgtgaagttgatgcataaacaaaggctcggatcatcgggccttataaatatgtaaaaaggggttattatggcagatttaaaagctggttctacagtcgggggtttacctatttggcactccggcacatttccgctggttccggttggtaatactctaacctatcgcggatataaggtttatactgaaaacgataaaccgcaagcatcaaataacgacttcgtttctaaagaaagcggtggtcaatatttgggtgtagttgcctttaaacaggggctacaaattaacgctactttcacaggcggaagtgaccagaacggtttatattctggtaatggtgatggcgcgggattatcaaaagccaacattgatcttgtatcatggtatggtattggtattcgttcatcttatggtactaatggtcgcgtattagtcatcaacgctcgaaatggtgatttaaacactcagggtaatattacggttgaaaagcaaatcagtattacaaccgctaaccctactgacgcaagtcatgcaacacgaaaaagttatgttgatggacagataaataatgtcacaacaaatgctaatagcagggtattacgcgctggcgatacaatgacagggctattaactgccccgcaattcgcgagcacaggcgcggcttcccgtcccgaacacgtaccacggctcgaccaggtaattactaaagggactatcatagattttggatcttattaaggtgaaacatggctgatttagaaaaaattcaattcctacgtagcacagttgcggggaaaacacctactacaagtcagcttgcagatggtgaactggcgatcaacatggctgattatgccatttacacgaaaaatggttcttcgatcgttcagttagcgggtaaaggtatcccagaaacaaataccaaaaaattaacagttgatgggcctagtgctcttaatgataccgttaccgtagcggaaggtaaaactattactttcaccaacgagaatttaagtggtgaaataactcgtcatatcgtcggtaaatgtgccagcaatgatggatggtacatcggttccggtggtacaagcaataacggcattcttgaaatcggtactattgacgatggtactgaaacaatccagtttgtacaacgcggtgctggtaacgtagaagccagaaaattagtcttacttgatagctctggtaatactactcttcctggggatttaagattatccactaataaaaccgttaaaattagtaatggaagcactcttacgttagaaatgggtgtaggagctaacgatgtctatattaaaaacttgagaggctcgggtgttcttcaattaactaatgatggtaatctgtcgttcagaaattaccaggtttattatgccatgagtggaaaaggccctggtaaagatggtactcttctgactaatgtagaaaacgcgcgtcagcttgagcaagataatttccctatatcttcaggcaccgaagctcggtggactaaagttgctcttttaaaagacccaggggcaaaccagagtcgcctgcaactgatggtgactaacggcggtaactatggttctacgcgtggatctatcgactttatcgattgtagcgctagaaactttccatccactttaacaagcgctaatattcgtaatcatctacaggttcgtcgaatcggtgatcctggaattgataacactaaccaaatgcgttatagtctggttcgtacctctgagggtttagaactgtggtttatgcaacgcgcattcattagtagtgttaaagttgctctgctgtctatcgctggttatactgagtattatctgcctactggttacacaacttctgcaactgctccggaaggtttagttgagagtgtggctattcgtatctatgacgaaatgaataaacctaaccttgacaatggtactgatggtattctgtctattgctaaaggtggtacaggtgcaagtacagcggatgctgctcgtacaaacttagggttgggtactgctgcaacccgtgatgtcggcgaaggtgctggtaatgttttagaaaatggcgcttatggcttaggcggtaatggtggtaaatccatcaatgacattatctctaatgcggatatgttgacccgcttaaaatcatacggcggtactttctggcgtggtgttactaaatctggtgttagcgttcaaaatggcctttataaccatggctctggtatttttatgaatgctggcgacaccatgtcagccattaatatcgactatgctagtgctaaagttcgtgtatacgcggctaacaacgcggctcttgccgcaggagatgtcaaatacaacgaactttacggtacagcaaataaaccaactccggatgacgtaggggctgttgctcgtgctggcgacaccatgaccggtaacttgactattaaagctaacttaaaggtcgaaaatcctaatggaacgatggttgatttaggttcagagaactcagacaagtacagcagattaacccttgcacgtaaaattggtagcggtgctaccgtagcaatgcttaaagttactcctgaaggacacgtgcaatttggttatcaagatgcagttgctactccagctcctagtaaatatattctagttaaatccagcggtcttgaggtagaaggggatttagtttttaatcagacctatcgcggcaccgaagaggcagttgatattactgataagactgttgaccttaatggtcttgtcattaaaggaaccgacccaggtactcgtcagatgtataaatgcttctcatatggtggtggttctaatatatcgaacaaacctacctctgacggcaactttgttcttgaagttctatctttgcgtaaaatttctgatactgattggacttgtaagcagacctttactacaaaaggtaatgttgaaggtacatatgttcgatactgccaaaacggcacatggtctgcatggaaagaggttgttgcaggggttcagccaattaatttaggtggtactggtgcaacttctgtagctgccgctcgtaataaccttggcgttggcgaaggtcaaactgtaacgtttggtggattgaatgtcaatggtaaaatgacagtcggtggtgagttcgaggctcagaactcgaaaatcacaggcaacttgaacgtttccgaagataacagaatgatcgttcttggcaaaaacaccgatatcggtttagtcaagaaaagtggtatgtcaggaaaaatggctattagtaaatctaactcgtttactattatggtatcaacaaataccaacaaccaaattaatcctgctgatacgtttaatgatatattcaaagtagatgctgatggaaaccagactgtttacggaaatgcccaagtcaacagacagttaactgtttctagtgcagcgactgttaatggtgttattaatgctaatggcggtattattgttcctactaccaagtatgtgcaaattgccgatgctcctacgcagaataaccaagcaacaaataaacagtatgttgatgataaggttgcttctgccattagtaatgcgggtgatacttatcttccattagcaggtggtactgtaactgggcggttaacaattacaggcgatcagttaaaaactacatcactttgggttacgggagacgctgctgttaatggtgttttaactgttgatggaagggctagatttaatcaagagttcattgtatcaacttcggttaacgtccagaacactggtaacagtcatttggtcttccgtaaagctgatggtacagaaaaaggacttatttgggctgatgatcctggtaatgttagtataagagcaggtggtgtctctgggccaacgtggaacttctggaacagcggttcttgccaattcccaggtgctattagtaactttaatggtgttaatagtactactaattaccctggcggcggaagtggcgcgtatttaaataccgctggcttaacaagtagatttagtaatggtgcttatgtttccttatacttccaagaatatgtaggaaattatcaccaggctattcttaatgttaacggctatggtcgagatgacaatttctatttcagggctggcggcgacttcttctgtactcgtaatggttcttttgataacgttgagattcgctctgaccgtagagctaaatctgatattaaagttatcgagaacgccttggaaaaagtagaaaccttatccggtaatacttacgagcttcataacacttctggcggtactactcgttctgcgggtttaatcgcgcaggaagttcaagaagttcttcccgaagcagttactcaggatattgaagcagacggaggtttattgcgtctgaattacaactcagtaatcgcacttctcgttgaatctgttaaagagctttctgctgaggttaaagatcttaaatctaaactgaaataatgttaaggggcttcggccccttttaggagaaataactatggcagtaacagggccgtgggtaggaagttcggcaaaggctgaaactggcgaagcatggatggcgcaagctggggccaaattaagaatagggacaccgttttggatgtctaatatgataggacaaagcgtattccatttaattttcagaattaactatgcacagggttcttctggtgatccatctagatatagaggattctttaaaagagggttagcagtaaacataggagactctgcaaaccaaccgacgctgaatgcgttccctggtggagatgtgggttcactagtagctattacaaatatcaaaggcgacccttattgcctttctatttggaatggtcaagataggcgagttaaagtgtctatatttaatgcatccggtggagaccagtatgatgtttatttcagcggaactactatgagtgatggttggagaagatatagatgtgaaaacgctggcggtctcaatgggtattttgaggctagaatggataaccagtttggtgctttattagaatatgtttgataggtaaaccaacaaattcacctcataatattaaatagattaaaaggctacctgtatggtagccttttgttgtatcctaaatatacgtatagtaacctaagaagagtcttataaaaatggctgagagaaatcccgtagataaactagccttatttgaccgggtaatctcgtttgtgatgggtgtgaaaacatggaaacaattgctgataaaaataattctaataatggttatgtttcttatggtagtaacttggtacaaatggactgatatattcccgatgataaaaggtgcccttgtagtcgatacaagggctatcgaaatggaaagaactgaaaagtttaatcaatccgcgttggaacagttgagcatagttcatcttacttccaacgcggatttttcagcggtattggcattcagaccaaagaatataaactattttgttgacattgtagaatatcagggaaaattaccatcccagatcgatcctaaaaacctcggcggttatccgatcgataaaacatccgaagagtacacgaatcatataaatggcttgtattattcatccactaaagcaagttcctacctaccgacacgtgattttgtgccagtagcttatacttttagttgcccttattttaatcttgataactactattctggatcggttttgatggaatggtacgcaaagcggcctaatataccagatatgaagctaaacatcatatgtggacaggccgcgcgtattttaggtcgagtgaggtgattaacgtaatgctggtgttaaattgtgtgttcttccaatagcccgtttgattgctttaaagaagttcatcaccgggctatttttctcgtaaatatcccaaactttcaatttgtcccacggatccggaacataatcttcattccttgccgaaacccccaacgtaacccgcctgtatccagcgctgtcgtgataatacacgaagaatggtctacctattggcgcaactttacaacctctcttagcggctctcatagcctcatcgaacgtcattgatacccccaaaaatttctatgcatgaatggtcgaattccgatagtttcactcaaaatgaatatcggatgatctagctcatcgtggttttcttcgccaatgacgatatcccaatcagtagccttttgttcttctaccgtggcaatgaatacctggtttacttcacacttgcggtgtgtacgtctgatgattgtatccccttcacgaaacacaatcatatcagggttggtagtgcggtacgcggttttacccgcgcacacttcattaagcatatcttcgtatgtcattataaaacctttacacgttgaacgatggtttgtttaacgtctttgtattctccgtgctctttaacggttgctttgaaagtgatttcatcaccttcgtttgcaatgttattaccgaagtaaacaacaacattaccatcaacattaattttggtcatgaatctttctacagaagtgtagtaagaaacttgagtatatcccagtgaaatcactttctcaacggttccggtcatttccagacgctgtttgatttcaccgatgtggttagctttagaaatgcgttcctggcgctcttgttcccactgttcgcggatttcttcgcgtttggcgatataatccttctccagtgcaacacccatgcagtaagcacacacggcgtcaaatacagggctgtttttgttgtcttctttagactggtcagcccaccaaagaacagtaaacattggcatttctgcaattacttcgcctttacgcttgccaatcggcatgatccctttttccagcagttccagtttttcagtatcgaacactgacagtttaccgcgacgttcgaacagatcgaaatctgcaaagccctggaataccattttgaaagtatcagtttcagttaaacgggctgaaacacggtcgaaatactcacgcgctttcgcttccgctttctccggatcggtagataagttgcagatatagttatcagaagtataaccgccacctctacgctcaacacgcaaggtgtacattgcatttttacgaccagaagaaatgaagtaagtggtagtaactacggttgcgttagtcatggtatttctccttaaagggtatctcgtttcgatatggctaatatagcaaaagcccctgaccgaagtcaagggctttttcatcattcattcgaatctttcattgttttatgaagatgaatatcaaaaattttccagtacgcctttccgcgaggataaatttttgctttgtcaatatcgttgttgcttccccatgtgttgtttgggccacgacatcgattttttatataatctgtatgccagaataagcgctgaaccgatgattccgtacctaatggatcttctttactgaacagaatttgtatactcataagaagaaccctgttctaactactaaatcgatctgtttttccggtatcagtggcacatctgcatcaacgttgcactgataatacatcccgacatactcatgaggaatgttggattcactcgcccatgccaggttgtcgtctgtacgcggccctaacatgaggttaacgatatcgacagcgcgatcctgttctggggtgttgttgcatccgttcacataatgcccgtgagcggttttgaggatttcaatgatatcttcgtcggcttcaacgagatacagccccgtgttttctgggatttcctcaagaataatcaaagcggttttcatcacacttacctttatgtttctgcttacgttttgcttctttaagtgctcgcttgcgatcgcggtgagtagaagcgcggttaatccatgcatgtttcgctaccagattgttcatcgaggatataatggcacatgatgttgaatactgacttcaccatacagttttacgatagttaagctatcagatcctttaacaattctgtatttttctggaacaacgcggtcgatttcttttttgacgaagttaagcaatccgaagtcatctatatcttttggtgctttggaaatagaagacagtgatactcgttgacgcgaatcatagtacgaagaaattacaaacatatattattttccttattggggcttttcagccccattttagagaattaatccagcaatttgcggatcttgtctgcgatacgtccggcacgggttgcgctttcggtatgattgctttctttggtagccagttcatccagcttacgctgatgttcttcttctgctgcttggcgatctgctgcaacctgtgcaacctgctcattatcgtgagcaatacgcgcttccagttcagacagggttttgtcgaaagttgctacgatttcatctacagaacgaattttattaaacagtttcataatttatctcaattggttagttttaatcagtatacatcaatacggctggaattcaaaatcataaatgtcattcagtgcgcggttccactcggtgtagttttcaccagcaccataacgcatttgaatagcactttcgaatgttgatccgttgaggttcgggaaaccgaacaggtttttgattttgtcatgtgctacatagtacaaagaagcactttccagcatcgcaaccatcgcagacggttcgtgttcgcggcgcttgatacgtaacagagtacgactagcaccagttttacggcgttgatttggtgctacgtagaaacggaatactacgcgccctgttttatcatcaactaccaggtaaaacccgttttctttcagatccacgccttcgaatttcttgaaggttccgcgtttcatgtcaccaattttaattgcatatttgtgaatgtcaagtcttgtcagaattcttttcatattttttagataccagtttgcctaattttgtaatttcgcctgtttttacgttaacaaacaaggcgatgctcagaaatgggatgctaatcactacgctgatcaatgtaaacagaaaacgtatcacaaaaagaacagcacgttcaagatatcgttgcatccacgcgattcctaaacaactataccctactataaaggtggttgcaacataaaatgcaccaaatcctttacgaaatacgtaacctttcccggattctacccggtcgtcggcccacatttcacgggcagttttcagaatagattcaccactagcgcgagtttcgttagccgaaggcatgtttttaaatttcatgatagtctcctatgcgcccagaactctccaggcgcggttgtttagttagtaatggctaaaaccatatgtaacatcaatcatgactttataacggcatacacgcatttttgcgttattgtaatccactgggatcgctaccacgtcagcaggatccacctttacctgaatgactctaccaacaccgcccccgtagtgtggaaggtatgatttagccgcaacgtgtaggccagtagaacaggtgcgcgttttatcttcgtctaccatgtttcgaggcatggagacagtcacaccaggactattatcaaatttgccagtagcgagatctttatagttatcgcgtacacgtttccaggcaagaaaacaaccatcatcggtcagttcaatgtcattatgtacaaggaacccataaagctggtatacagcatcacgtgaagggtttcgcatcaaccgttcaaagaagttcaccagatgttcatacggacgatcgttatacatttcgcgaatgattcgttgagtgatatcagaatcaaacactacatctttatatagaagctgatgaccaatgattttaatgttgcctttgctataggttcggatcgcttcttgagtatccaaacaagttacagcacctttgacatcaccagctttcagcatttcatgtgctttcttaaagttcggatgtgtttcacccgccatgaaaacgcgcccttcgtatacaaccgtaatgaacgattcagatccgatcatacgcggtacagtgtctgatactttaggcttttgttttacatcccttttcttagggaattccgctaacttgcggttgataacgcgcccaatggttcgggcgcttacgttgaactgttgggccagtgctgttttacttgcccccgtcaaccatccattatagatagctttctgttgtacttcgtcaagaattttgaccattatttccaccgtattaatttcttaaactcactgagattcttttcgttgttgtaaatcggacgaattgaataagaatcgctatgttcaacaagtgaagccagtaacgggtttagtgatttaaagatttcccatgcctgatcaacacgttttttcatattgctgcgtttaacgcgcattgatgctacagattcacgcagaatcggacaacgcgccctggaaagatttttaccatctttctcatacccttccagacacactataagttcgagggtatcaacaatcttatacagtttttcattatatcggtttttcacaatccgatcaagcgatacaccaaaacggctatgcaatgcgtttgtttctgttgagtgttccttgccaatccatccaggcaagcaattatctttcaatgccttttcggatttaacatactgcttgcacagcatatcatcaaagcataccagatttgaatccgggatccacttccagaggctgttacggatagcaaacacaacagggatcccagtatggcgcatgatacgcgataaagtagattctttcattgctgaatccatagacaacctggaattttcaccatctaagcggctatattcatcaataccatacaaccgaacacctggggctttatccagtgataaaaactctgattttgtcataaacagagaagtttttgccagattgccgttactatccaactcataacgatatacggtcggggtttttgggcgcggttctgaatttttcggtgcatatagcgctttcgatttttcgcgatctgcatcatagatctctttttcttttgtcatttcactggtacggagatacacaatttccgattcatcaaaatgacctttccgaacgatatcattaacaatctcacgctttgaatcactatcgtaatatgcaacaaagctaacacggcttaggttatgcattttagcatacccgacgatatacggtttaaccgtgttggtatccacttttaacagaatgagtttcttctgtttccacggataataaatgcgtgtgatgtcctggcgtttggttgtttctggcttatacttgctccagcggcctccgctacccgttacctgataccatgcatctttaccgtcgtattcgttcgcccaatacccagcaatataatcatcattatatttgttgggtttgactagttcgctatggatccagccaatagaatcaccgttgatgcgaaaattagcatctttaccaacaaagttttgtaccattgaaggcagagaatggaaccacgtcagtttatcacgaacggtttgtaacttatcgaattctgatttaactcgattgaaatacacccggctgatttgtttcagacgttctttaataatccctactgtcattttatccatactcaactcttcgcgagaaggcatgaaatcaagttcaccgattgggaagtcaataatatacgtatactggctttctgtatagcaatagaacatcgaggtatcatacaaatctttatccagaggataaatgatgttacccatgcgagcatatacaccgctagtgtatgctgatttatgacggatcaccccgctatcgttggttgcttctttcggctgatagttgattttgagaatagaagcaccaacaaagttaggacgaatatcagtaaatgattcgtatacccttgctgcttcgttttcccattctttgatatcttcaactttaaccggaacagtgatagtaaccccgttaggttcatcactttcaatctcatacagaggatcgcagaacggttccccatcatccatatagattgtgtaaccgcattttataccgtcttttacagattcaactgtgaacgcatcggcatagcaaagcggagatttgcaacccagacccatagaaccgatcaggtcgtttgaatcatttttggttgattcgaagtaaacggtaaacgcatcactaacgaaatcaggagacataccgatcccgtagtcacgaataacaaaacgaggatcaacagcagttggcaactggacatcaaacgggttctgatttcccgcttctttgtgtccatcgatcgcattacaagacagttcgcgaatgattgcgcggatcttgtatttgtatactgtcgaagaaaggatcttatacgctttcttgtttgcgcgtagagatagtttgtttcgtcccttgctggtatctgtaccaactcggtagattgtttgcggtgtatcttcgcgtaatttcattgtttatttctcacttaacattaaaaataacttggtcacaagagtacttcgttggctttttgttcaggccatattctactacttcgcaataagtgtcaaggaattttaccaatttttcttcctcgacctgctgtttcttcatatcaatgataccccacacgatagccccgataatgatagaaaagaacgcacaaaatccgaatatggtcagatattttcccaacttaggcgcattacaacgtgtcataccttacccctctttgcgaatgtatgcaagttcttcatgggttactggacggatatacagacggccttttgtgtatgccttgcgcccactgatccaaatgtttttcatatccttaacaccgttcatcacatcgttgtaaaacttcttatcagctttagcctgatagacttcacggccttgataatctttcatgaacaaacagtaaaggatctcattcttatcaaccagattagcatcctttgtagttgttttactcggtgaaggtttagcacccaggcgaaaggccatagcttgccacactttaccatgtccataaccgcgcccgacaagagcatgagcgatttcgtgtaaaagagtgtctaaaatatcctcgtagatatcttccgcaacatgacgaccagatagttcgatcagttttttggtataactgcaacggcccagagtttttgtaatgcgtccattgatccggaatgtccaaccattactgatcaaaccgtgtttttccatcatggtacgcgcccagtgggttacttccattgcactacgagttttcaacattttagaatctcctttgcttggtacaaaaccaatatagcaaaaagccccctgcattgcaagaggctttgttattatttcaacttcttagaaagttcttttaaatcattgagatactcaattttaggggttgtttcttcccagtatttcaactgtttacgcaattcttcggcttcgtcttccagctttttgctttcgtccgtggttagatggtagatgttcatagccactaacatttcggcatgattctcgcaacctatccacgtagacacgaatttaaccgcttcgctgcgactaaggccacgcagagaatcaggagattctaccatttgagcaataaacgcaacctttgccagtgctttatctaacgcttccttagtttcctggatacgcttattgatacgctgttgatatacattcatacgaatatcaacgaaatcctttagaagcgtttcagggcgttcatatgagtataatttaccctcaaagataacgttaatgtttgggtttgaattttcaatcaacccgaaatctttcaggatcttttcgcgggttaacccgttggcatactctcgcttgagcgttacttcataacgaaaatcttctttcgatagatccttgtagctaacaataacgcctttttcttccagcttgtcaaggattgcaatgtatttcacacggtcatacttcactgggatctcggtgatcaccaatttggttttaccttgcaattcatacgtgccgtaaattgtcccgtctgtgatttcacctttaaagtaagggtatttcagttccagtgtgaaatctttatcattcagatatgcaatgcacccgttaacaacagatttaggatcatgaggcggaatgtttgttgcatatgcttttgcaatcccgctaaacccgttaaccagtaccatcgggatgatcgggagatagtaagctggcggcacatgttccggatcttcatgaactggcgttaaatcaccatccatataaattgctttgaatattggcgatagtttgcacttgatgtaacgaggtgcgccaggtttcttaaccaaacgggaaccaaagaacccatcacggtcgaataacggaatgttattgcaccagtgcgccgccataagggataacgcttcttctacagaggtttccccgtggtgatacccatacatagcaacaccgccagcgatagaagctactttctgaaatcccgttccgccctgcatagcagagtgaataaagaaacggtgaacgggtttaaacccgtctaccaggtgcgggatcgcacgtgaataaatcgtgtaaagggcaaacgttagcccttccacctgtacaacatctttaatacttctttccattagtcaaccttagaaaatttgtgttttccattaacccaatctttacgcggatcagattcgtcgccgaagcatagttctaacacttctttgtattcgtcgtcaagtacgatgacatcatacttcaactgatcacccagaacacgatcgtaatcttctttgcgtaaagaacccagccccttgatatatcgtacatcttttgctttatcgcggaacggtgcaaactcatcaagagaatagaaccatttttcctcgcgcccaactttagcgataacgatcggggttcgaatatatcggatccgtttctctgtgaacaaagaaggccaacgactaaagaatgcaagcaacagggttaaaatgtcgccgccgtcaacgtcagcatcgaccatgataccgatattatcataagtcattccggaagtatcaccaggatgaatattgaggatagccattagctcaaacagttctttgtttttgataatgtctgtaaaactcataccccatgtattcagaggcttaccacgtagcgggaaagcgccttgtgtttcttcattacggcattcgatgaactgaccaacagcggaatcgccttctgtcagaaacaatgttgtttctaccccaggggtatcaataccggaagccggaacgtgtttagcaatttttgcctttttcgctttctttttcgctttggtgatcgcggcggcttctgctgcttgtttacgaatcaatgcggattcaatgatcggagtaatgatttctggggtatccataatcatttttgcgatctttttgtagttcaaattcgcatgattgttaaactcacctgctgtatttgctaatcgctcttttgtttggctatcgaatgcaggtgcattaaagttatgcaggaataccacaagagttaagcattcttttacacgtgctttcgggatctcgatactatgctttttcttgatcatcggttcaagttcagaatagataccatcaatcatacactcaacatgaacaccgccgtttttcgtatccagaccgttaacaaaggatttctgtttaaacccgtcctcagtgctcgccagaatgaagctgaggcgattatttgtctggacaatggttttatccccatacatggaagcgtacagcgggaagcgattagagagcgtttcgccgttatatgtgaatttcacagacgggaaagcaacggcaagggccattaagcgatccttaatcacttctttggtttcttcatcgataccagttacaccaaacatagagaagtctggagtaaacttaacagtagtaccctgttctttactggggctggttcggtaatcgatgttctgtgcgccgtccgtacagttaatggttactttgcgtttcccgtttgcagtctcgccaataaaaatcgagctataacagtttgtcaggaaagaaccaacaccattcatacccatcgttacgcggtttttatcatcgaagttagaacccgattttgccatagtccatgccgcaactggtttaggaactattttcccatctggggtttttacatcatcctggggaataccgcgcccgttatcagagattttaaccagattatgatcaatggttacatcaatcttattagcatgtttgaattcagttcggatcgcttcatcaatcgagttatcaaggatttcgttgatgattttaaccaacccttccacgtactcaaccttgcgatattggcccattatgaaacgttcatgcgcttctttgttaaccgacccgacgtacatatttggacgcaaccgaatatgatcgcgatcgctcatacaaaatgattcgtcaacctttgcgccttttttggctggttgtggtttctgttctggttcatcatctgccagaagaaaatctaaactcatattcacctctttgtttaatcactgacattatatagggttctatgaaaaagaaaacccctttcggggtttacttgttataagggaaaccatcacgaaccatttgaggtttatcaaccgttcgttttgcttcgcctccgcaatcgcaatctttcggtgcatcacgggtagcaatgcttgccatttttggaaattctttattacacttggtgcatttataggtataggtaggcattaataaatctcttttaaacttaacatcttaactaaacgggctttgtctatgtcaaaaacacattgacgtgcgcccggatacaacttttcaacttcgtataccatgcagacgaaaccaacattgtgcatgtactcgcgttcatatgcattgaaccaacgagaaaggcgctgtattgactgaaaaccaaagtataacccatccgcttgaaagtctatgttatctttttcaaggttgcgcatcaatcgattatcgtcatccggcgctggatgtcggttatcatccatatcaatatagatatcaggattcatacagaattgatccagccattcagcggtatccattgacacataacgattgacatatgggccgctttttgtttgccatttttctgtacaatcattccagaaagaacaagaaaattccacacgatatacgaacatgatataatcctcacaagtaaactcaaggtttacaagtacgataccacttatctaatttttctgcaagcatttcgttgataatttttgcaatttcgtgccgtccgtgagtagtacccagttccaggtaaatcacatcaagtgcgcacacaatcgcatcaatactttcttcaacgatattaccgccgcgttgaggctgaatgagacattcgctgatctcgccaacttccgctgataggtgatgaaccacatcactcttcgtgcgtttcttcactttatgagcgatttcaaaaaacttatcaagtacgatcgccgtttcttctcgcgttgcagtattctcggatgtcgtctccgtttgttgaacaacgtattttgtaaaatagttttcaaacacgttgaaagggatcacatgaggaacaccattcaaaaacaccccttctttacaaacataatggatttggcgcggaatagacaacccgccgctgcgttccaaatgtcgtttaacgcttgctacaaaatcgaactctttcccgtatccagccgacatactgtgatacgtgagtaggccaaatgcagaaacatagagatcattttctttatacagattcatttacaatacctttatggtagccaaaaatataacaatcaattgaaggacgttcaccagggaagtgaatgcattgcatgatgcgttcagccattagatcttctcccatgtataccgaagtagtttcttcgttgtaatgggtatcatacgacgttttaagcgtcatgcccggaagccctgcaatgtgcatgaatttagaattggtgcaaggttttcctacttcaccgttaatcatcaacactgcattagttttacgtgcttttctcatttgaatttcaccccgatttgcgatacgttccattcttttacttcatcaacaatatcataatggttgatgtatggtaaagcaatttttaaattactcgcgtcttgaatgttgcgtaagaaacgagtaggagaaagaagacacaaccgctcggatccgttgtttcctttagcggcaaatgatagggtttctcccccgtcaatcttcatatcaacagaaatcgttttgaattctggtgcgtatgacgtgattttgccgttgtctctcggcgtactatagaaacatacactttgtgggacattataacgatctgtttcaatgtacatgtaatcgccgtcagtcattccccacgcggtataaagggatccggtatagtcaccaaaggaatttttaaaatcttccttcgtggtatatcccagcgagcgcaattgcataagctggttatgctgttcgattgcgtcggctttttgttgttcctgtacttgcgcatcaatcgtttcttgccaggaattatacgcatagtaacccacaacagcgattacagccataacccctacagctttccagattttagcgtcttcgtttttgttactcatgctatattccttttaagaaaaagggccgaagcccctttgttaacgaagataaaccacataaccgctttggtcaatcgcgcggtctgcgtcattgaagatattaccacgaatgccttttgctggtgctttccagcttgcaggtttcaggatattaccatcattatcgatgaaggcggcaacagaacgctgattgaacatttcaccagtttctttgttgcgagtatcctgaacaacgcgatgatatttgcggcctttctccagaaagaaaacagtttcgaaaggagaatcttggaaacgagcgttacgcgctttgtacattgcttccatgaaaggggctgctttttctgcgaggatttcgaaagtgttcatggtatatctcctaaagtgtgtttcgtttcgatgtaagtactatatcaaagatggttattctatgcaaggcttttttcgttatccatcaaatattttaagtgttcttttaatgcagggagttcgttcaaatggcgttgcttaactttctcgtactctttgcgttcccagttttcaagattgcttgccaacgcttcatcacaataagcgatcccgcgttctgcatcctgaactttctgtttccattgtgcaactgcttgttgataaagagaaccgttaaccatcataataatttcctcccttgtttcgatggggtaactataccaaagctaccccagaatgttttaacaaaaagtgctattagtaggtatccagtttatacattttgcaccagttcatgaattcttcgaaagtctgagtattaacacgtttttccttcttcactttcttagtgattacaggacggttagtaaaacgtttttgcattttcacagtgattgctactttatcgcccaggtcttcaaccttttcaaccagcgcccactgagaaccaatttcagcgccgaaagtcaaaccaacaatctcacctgctttaacgtgtgctgcatattttactttaaccattttcgtattcctttctctgtttcgtttcgatgaatacaagataccaaaaagcctcccgcaatgcaagaggcttctttaacaaaaaatgctattttatttctttgagtaatttacggatcccgccgccctgtgtcttatcaaagattttctttgcatcaataacagaagtgattatgtggtagttgttcccttttccgtcaaactcaaactcgaccttgtagtcactacgaaatttcacaaaaacaaattcacctgcaaagtgcttacggaactgtttttcgttaatgtccaaccattcctgtgtatcatctaactgatacatgcgacaaaacaggatcgaacccattacagcaatcacgacaaggatagctaacgcgaattctgacatcatttacccctgtttactgattgacggtgcaatgatttaggcacaaccggatttcggtatggtttgactttatggatcgtgggttcttccccaaccaaattaggaaattggttgttccattccatcgaaaatggatagggtgatgactttaactcttcgatcatacagtttactaaacggtcgccgattacacccaaagccgccccaataatcgctatacgcataaatcaccccttaattgtgtcaagtacagtaaaccagtcatgaagccatatcgttgttcttacagcgatatacgttaacaaactaatcaatgataccgctccgcaaatagccagcgtaatcaacagccggatttcaaatttagtaaaattcatatcaatctcctttcttagaacccaatataacaaaagccctcaaccgaagtcaagggctttgttttaaatttttaccagttttggcaatcgaagaactataccaggatggatcagacgtgcatccggaatagaatcacggttgattttagcgatatcaggccaaagttcaccaacaccatacagtttctttgctatagaatataggctatcgcctggttgcacgacatagcgatcagattcaatcttaaccagatcctggttaatgatatcatcaaaggcttttgctttcgcttcgttaatcgtattcccgtagtaatggcgatccataatagttaatgtgatcatcgtttctttcctatgctgttttcgtctgtctcttctaaggatggaggttcttccagccccagagcataacgtttagcatagattagcatcaatgcatctttagcgcaatcatgaatcgaatcatgctgaatgaatccatctaacatgcctttacgtagtggacacgtggtcactccgcgagtcagtaaacggttttcaatagctgtacgcacatcacggctattccagaacacggtcggcatatcttcaaacgtatcaagtttccctgtcatagttcgtacaacatcggttagcatagaacgatcgaattcagggccgcgcgtataatcgtatgactgccaacgactcacaccgtcagccgctaaatcagcaaagaattgtcgatgaccttcgtacaaatccatgtcaatatcggaagggaacaaaaccctttgcgcttctttagattgctgtttccaccattcgatcgttttttcatctttgatgcgttctggttgtttccggatgtcaaatttgtactttcttcctttagcaatcagttcctgaaaggtaggcggatcataaggatcatcaacaaacggaacatagctaagttcagctagttttccttttggaaacgggccaatactttcataatcaaatacgaaatctacgggtaaatgactcattcgcgaccccgcttatacgattccatgaaataggccaatgatagcgcgacttccggagtaacatcaacggattcgatcatgcctggagttaccgccatcataccgaactgacgaagcccacaacgagcaatcgatttttccagtcggatcatgttttctacagcctctgcgaaattgtccagatgttcccaatcgtggtaatcttccattgtagaacgatcacttttcaaaatcagatcggcaaccaattcagcataaaggcgcggaaggtgaatattcatttaaaacccctcaagcatgtttttgttttcacgaatgttacgacccattttcaaagtatcaatgatcactgcatactcttcaaaagtgaattcgatatcttgtgaaatgtttccccacgtgtaggtcggccctttaggacagtataacccaacttctttgtttgcgttgacaacgcagcgcaattttgcaaacaacaaattgatatcgatagaattgaacccttcgagataatcaagcccctctctaccaatacggtcaacttctcgcaaaatcttttctacatctttgactttaacaataattttcataataacctcaaagggccgaagcccttagacataatcaacagtgaatcgtgcgcgggtagttcctacataaagcaactgcttacacaattcataatcggcgtatgcgtatgcatcgcgcgtatacatgtatgaatgatcatacgtgcttccctgacctttgtgatacgtacaaaccggaagcgccttaaccgtctggaacttgtttttgatttgccagaacgaataccagggggctttgtatccggtttcctgtttcatctttttatactgaaacgcgacgtagttcaaataatcgcctaaacgttcctgcataaccggatccgcgataacctgaatatccgctttcgtatcctcgaacatcgattctgttttcatcaagaaataatcgatttgcaccggatcgcatcggtcagctttgatagtatcagaacgcggtatgatttcaaggattttaatttgctcgttgttgttatagataacttcaacaaacgaaaccccattcacacggccttctgtcactaacggttcttgcatcacaacaacttcaccaacaatgaacggctgatcagttttgtacaagtgtttacggatcactgcgtttaacttgtctacgtttgcgttagtgtaagcaaacatacggttattgttcaggtcatccggagtcttaacacggctaaaataacgtctcaggaagtcaccagcgttttcgtgcttcattacccctagttcaccattcatgaggggcattaacggcttaccgtcgcgtatagcgcgtgatacctggatgattgggtttccttctgcctgacgcataatcttatccatgcgaatgacatcaaaaatttcctcatcaaagaacggtgaaagctcggtgatcccttcggtattaaccggacggatctgatccttatcacccaatcccaggatcaccgcacaactcggaatagtacgcttgatgatacggaatagttctttgtcaaccatcgatacttcttcaaccacaaacacacgacattcagacagatcagcggcctttttgcctttttgctgttcaaatactcgtaactcttcgttggttacggggctgattttcagtgctgagtgaatggtcgttgcatccatacccaccgcctcagagagaacgtttttagcctggtgtgtcggtgctgtcaaccagatcccactaatacccagttttttcaatgtttcaaacacaaattttaccagagtagttttaccaacacccggcccacctgtgatagtagtatggattttgtttctgatatttttaatcactcgatcatgtgcgtttttctggtcttcgctcagatcgtcaaaagttaattcgctcatactttaatcaataccccttgaatacttgcgtgttcaataaaccaacgcatatctttctttttcttttcggttacggtttcaacttcttcctttcgaaagaatcggctaagaccactttgtttaactggattcatcttatcatgatattctttgataatcgaatttttatactcgttagcatcgtccggagatagaaacaacaaaggtgttaactctccttccttaatgaagggaattttaaacccgtctttatccttactaacgacgatataatattttgtaatcattctcgcccctcataacaaacgtagaatattccaacaaaccaaaacactgatagtataatcagtaaaagttttctttcaacgccatttacgtgaaacacacaccaaccgaaaagatatgtgatcatcgcgcaaacaccataagaaagaaccccaacagctactagcgcgatgatcggatccattagtagttgttagcccaacggcggaggttttcggcttgtttcagtgcatacagtttgtagatggtttccgcatccatacccagcgccaggaatttgcacataaagaaatgccactgatcgataagttcaaacagaacttctaaacgatcctcttcactcagatccgcaaatttagtattgcgcaattcctggtgatttgctttccacggtttccaaacaccggaagcaggtttaacaccgcgagacattccacccagagcggtatacaattcgcgggtttcgtcggcgatcgcgtcgtcttgcagtttcagccaatcaaggatttctccgcaagtttccagattatccggacgtggaacccaatgcagggtatcagacaggctttgctgtgcatggttttgtaaatccagcatggattgtaaaggatcaccattacgggccagaaccttttgatattcggaatctacaaattccagatcttccgggttaaccaggtgcgcacatgaattaaatacaggagttttatcagtagtcatatcaatctcattttttcggtgatttgtcccacgacttaaatcgaagttttgccgtgagtccagaaacagtattatctttcaaatactgcataatttcaagtttagttgcgccgtccgtttttatcatttcgttgatatctttggaaggccacgggcatttatcccacattacaaccttttctccagcctcaatcaatttaaagaggcggtgagtagtatccggatgacgtgcttcattgtcaagaacccagacacgcatatttttatacggaacctcagaaagtgcaagctgtccaccagtgatagcgccagcattatcaacaaacaggctatctaatggcccctcaagaagataaaccgtttttagcggatctatcgtatcctgtccgtaaatcttggttgattcttcacaggctttgattgtgatatatttcgactttgccccgtcgcgtaaagcacgaccctggaaagattcaattttccctttcttatcgaagatagggatcactaatctcggttctggttttgcgatcggataggtatccggattcaccgtattaaccagttgttgccattcgcgagtaaaccacaaccgatcccacttgtcacgggggatacaacgattctgcacatattttatgatcggatgttcatccggcaaggtatctaacctttcgcagaattgaagagtaggaataaatttcttctcttccttcggttgttctgtatgcgttggctttaacgaattgcgatccttaaacgattccatgagataatcacggtaatcgtctggataatattctttcaggaatacgctaaacggtacaccataaccacagttaaaacaaccacaattcatatgatcaccctttttagaagggtagatccaaaatcgttttttgtacttgtctttcattgagtcgccgcaaataggacaacgcgcattgatgcttaatgcccccgatttacgaacgatttcgctttgaggcagtgatcccatgattcgggttgcaaattctatatcaagatacatttcttacctcagttgactatctttagatcctcgtcgattataccccgcgctgatcatttcgtcatgttctttttggcattcaatacaataacggcaacccttcacgatagccctacgtttttcgggtatcggatccccacaatcaaaacaatgcgttaatgattctccgtttctgatttgagaacgtgcaaaatctatcgcattgtctattgttgcctgaatggtatcttgaacaccgtcagcagggccaaatccaaccgccattgtaaatcctcctaatcaaatgatttcaatatcatagactaagaggatttttctgtcaagaacttacttgcttttctgttccgtcaagcattaacttccaaccacgaaatgcctgtttaaacgaataatttattgcaatatcaattttatcagaaccttttcgacgattctgataaacggtcgcgttgtcactcatatacatgatacaaattggaaaccatgtataatcgttagcagtagcccagatagtgatattcagcggaggaattatcatttctttttccttttccctgcacgggtaacgcctaatactttcggcccgatgttggttactgctccagtagtcacaccagaagcaatcttttctgtatcgccgccagaatcacccgcgaccatatcctctaacatgcgccccttatcataatattctttgaggcgtggaacgttcaacatgatttcttcatgctcttgttctgtcatattgtagcgattgcgtagggtatcatatgaactggttaagttcataaacccactcatatacggaacagcattcattctacgcttgatatggcgtactgaacgatgaaaaggagaatacgcttctaactcttcttttgttttggggttacgaattacttcgccttgtccatcaaggatccccagtttgtaagcagtccattcagtccagggctttttgagtagccggatcatccggacgctatatgttaaatccatatttttaactaattgatcactcatgattattactctattgtgaaagtgaataaatcagatttggtttcgggttcaaactccatacaaacaacctcgcatagtggtttaacccctttccaatcctccaggtaatacccagtatctataccgcatccaggattcataacaaggccagtttcatcaagaaactttttacatttacttgatgtggtgctgtcatcttgtcggaaacaatgggttttcgaataccggaaatttgcagacatttgagggattatgaaagttccctgacgcgcaatctgtgatgcacgttcgattactttatactcaaattctgcccctgtatacttacccttaaaatcagaggttttgattttaccaaaaggcgggttactgatcgccatatcaaacacctgattaaattcagttgttaaggcgtctccatgcacccaggaggcttctggtacgatacgcttacctaactcatagtatgtgtgatttaactcaacacagacgatttcacgcggcgtattgtacatcatgtaatgaaccatagcgaaagataacccaccgataccagcacacaggtcaataacacttccacctgtgcaagcatcgattgtgaaatcgcgagcaagtccaataggggtaaagaacgcccctaattcggaattatttgtaaacgcgccttcatgaaagttttcaatgatgaacaacttctcttcgtaagttagcgctttgtcagagtgaaccagatccattatctgattgtgtttcttggtttccgctttcgttaactttgccattgtcccagctatacagtaatgttgattcatttgggtagaattcccacccgtccacatatccggtttcccagtcagtagtttgttcaaaaccacagatccattcatatacaccaggaggcatttcgacagaatcaggaagcccgatatcttccgcgctgcgtccacattcaaagaatgcatcatgaatgaatggtcgagataataccgtaacataaccttcatcgtcaacagctacgatccagcgggaactatgaggactatcgaacttcggttcttcttcgtctgcgtcagcttttatttcagccttacaaaaatctaaattcatcatttcaaaccctctttaacaccctctttcatagctttccaggtagaacctgcttcaccattcagggcggcaaatacaaataataagatagcaaggacaagattcacgccagcaatcaccatgattttgctatacacgaaaatgtaaggcattgccaccacccaccaactaaaagaattaccagttacgatgttgagtgctgcaagtaagaaagtgataacgaatgcgattttcataatgtcctcctttgttatgattaaggtatcatcttttttgaaagaatgcaatacctatagatacaaaaaagccccgaaaggggcttaattttttatgcgttattgatgagataccgaagaacgtttttcgcttgttcctcattacaaccaactttgaaaccaggttcgatagggaggaagttccagaggaaatcaacacttccttcaacgtcatctttgcctttttccagcatcgctaacagcaaacctttgtttttgatgctgtttacgattgcgtcaaaataaccatcgctgaaatcaacattcgggttcagcatttcgttgtaagggttgttgaatacgttcattttgaatctcctttgtttaactcagtatcttgtctacgtgagttatattaccacaatggagattcaggtcaatacctttttacgattttttgaaaagtttttcgtatttggcttttacccagcgatacatatcttcggccttgtcactggcaatcagtgagaacagcagatagatcgcaacacccaccaacacaacgcctactacaatgtagacgggtaatagaactgggaagagaacccagaaccatgacatatgcgagaagccaaatactttagccgctgcaaaaatcagtgtcagtccagtcagaagtttgatagccggaatcggaatcgttatagtcttagtcatttcattaccttacattctttatggggctattcgccccagtcaattaaaattgaatgtcagattttgcaatctgtgccattttttcacgtcgggtagattcagcctgtttaatcatcgggccttgtgtctgttctactgttttaggcatagtgttgccgtggtagtcagatttaaacccgtattcgctgttgtcggtatccatccagcgctgattaccttttcgaacttccaacttgaacttgttgaaagtgttcttatcgccataacgggatttgatttgcttgaacagttgcataccctgatcagctaactcttccgtctcgattacagctaacataaaatcagccgtagcaggtaaaccagcggattccgcaacatcacccatactcacatccgaactatcccatgcagaacgcccaacctgtgcgcctgtccacatcacggtattagtttcaacagcaagaccgcgtagttcttcggcaattgctttaaccagaatataggtattttcagcacctttaacacgggttgaagtacagatccccaggtaatcgacaatgatcacatccggaacaaactgtttcttcaatttaagctctttcacaagcgctctaaagtggtttgcacctgcacccgatgtagggtactgcttaaccaccaaacgcccaaccttacccgctttaaggcgctccattttgttcttatagtctgcgtatgtaatgttcccttcgtcgatgtcatccatagtcacatcaagaaggttagcatcgatacgcttagagcaaacatgctctgccatttccatagaaatgtaaagaacgtttttaccctgttgcagataatcagccgcaagagaacataagcccagtgatttaccaacgttaacaccagccatgatgatattcagtgtaccacgttccgcgccgcctttggtgattgcgttcaggatcgggataccaaacggaattttcatcgccttcgattggtaaagcatccaccgtttttcataatcttcgaaatagtcatgacctactgaactatcgaatgaaattgctaatgcttcctccatgatttcagggatagccccaacaccaggaagtttcttgttctgttctgccagtggtttttctgcgttagcctggatctcgattgcgcgagaaagagcacgatacattgctttgtctttgcaatatgtttccgtttccttcattagccaatctaaatcttctggcgcatttttcagcgactgaatcgcctttttcgtgtcttcgtagactacatcacttagatttcgtttgtcaagcgcaacctctaaagcagtttttgacggaatgccgttgaattcctgtacatgtttatcaatgaggtcaaacaaaacttgtgcattgccttcgaaatattcctttttcagatgaggccatgcttggacaaaatacgtcccgttataaatcaggttagaaaatattgtatcaacgatcattgtattgccttataccaggttgctgaacatcatgaaaaagttgtaaaccttttgtttgaatacatcccataatgtcagcttaggctttgggacaactgaacccttttcaagctctttaatctgtgcataaattgcatcatgcaccagcgggatcaacgcttctttgtcttcgtctggggtactgaattctactttcagaccatgatcccaaaacaccttatgaatataaaccagatgcgcaacacctttttcatcgttaatcagaagttcctgaataacatctttcatcgcttcatcaatataattctttgctttgctctcgatatccatacattgcctcggttatggggccgaagccccatagttttttataaaatttcgttgtcttcttcgatatcatcaaatgattctgggatatcgtcatcatccagatcaggatctgggatgctatcagtgctgtataaatcttccagcgcggaaccatcactgatttcacgatcagggatcttatacttttcttcgatagctttcaagaatggttgatgagtaaacagaggacgccagaattcaacgctatttgtttctgactcacgccatttcttttcttcaacttcgagttcgccagtctcggtattcaggaaagcacggttgcgccagcctttggttacggtctgtacaaagttcatttccattgccagatccagaaggccagaatacatactaataccgccttcataggtaacatgcagcgggaattttgatttctctttcacgaatcgagatttttcgatgttcatgatgaaatcataacccactacctcagtaccttctttcacctgttgtttacccaggatgatcgcagtatcagcggaatacattaaaccagtaccaccggaaataactttcttgctgtacatttcttgtgtgtcataggtatgacagatacaaaccatcgggatatccaggtcagccagataaggcgtaaccatacggaacataccttttaatgcttttgctcgcgtcatatcctgtttatcgttatcagacagcgcgtcagcaagttcttttttacttgccgtgttgcctactgagtcaacgaatacaatcaccttatcaccgcgttcaagcgcgttaagctggcttacaacgtcattacgcaactgctcgaccgtcgtgatacgagtatacacaacacgatccggatcaacacccattgatttcagataggatttagtaacacctttttctgaatcgtagaacaggcacacagcatcttcatacgttttgagataagccgctacagtcagcaaacctaagttggatttgaagtgtttggacgggccagcgaaaagggtaagaccagaagttaggccaccgttaaacgcaccggacaacgccagattcagaatcggcacacgggttcgcgtgatggtaatattgttgaatacgtcgctttcagaaagtacagatgcagtttggctattcgagtttttgatcagtttttttagtagtgctttgtttgacatttaatttttccgatttattcattctcattctatatatctcactagttaatgaaaggggccgaagcccctagagtttaccagtcaccgaacaggtcgtttaaactggcacgtttttcataatcaattttacatacttccgtgatattagtcaatggactaataacatgtttttcaaacatacccggataatctacccatgccagaatatcactttcgatctctgacggtagtttatttccggattgccacgcgatgcaatcggcttgccacgggtttttatcccttagtggtagaaccattaccttttcaccttccatgattggcgtaacaccatcaataccagcagtgaaacggttaaagaacagcacccctttaatatggtttggtgttcccttgattggatagccagccccatcacgatatttcgaaatgttgttggcagatgatacaccagcaatttccctgtagtcaagttccttatattcttcttcgaactttttataatgttcgtgcaaagataattcaccttcttgcaggatacggcggatcgcttctttcaggaatactttcacagaggtcggagtactcgatcgctgtgtttccatacccatgattttcagtttcggtttttcatagcgggttccttcggagtcccacacgttagccgcatatcgttttttagcagtccagaaacttcccaacccttcggaacccaacggaggcccagaaatgatttcacgatccataaacatcaggtgttccacgttgttcatgtattcgcaaagttcacgataccctttatcgatcatcggttccattctttctttagcaaagcgatccaggaagtcaacccaatggttattatccttaaatttagcctcaccaccaacttttgcaatcacgttatccatgcaaacataaatggagtcagtgtcacagtaccgaacatatgcatgatccgtagtaccgcacaggtcgttaaggtattcgtttaccttacgttcaatccactggatagccaactgcccgaacatggtgatcgcgctggcgtttcgtagatcgaagtatcggaagtgttcattacccaacgcaccataaagggagttgatagaaatcttacggttaagctgtgctgtgttcgcttgtgcgatcttcttctcacacacgcgcttaactgctttaagcatttgttttgtaagagttttcagaactgctttcgattcatcactgaaatctgtatagaaatcaaagtcaggatcaaccatttggttatgcgcgtctgttaagtgttcgagttcgtgcttgatgagttcaagatttcgctcacccgccatcattcgttttttccacatcttacgctgatcaaatactttcttgatctctactgggatcacgcctttgatatcacggcggaacatccacccgttaggagaacagctaaattcatcgctagggcgcggcgcggtcttattaatatactcttcaagagcacgtaccgcaaaacttcccataatcgtttcagggcttatattcacctgtcggatgatggaagggtacaggcttgttaagtcaaacgataccatgtatttgtaaggcccaggaactggatccttcacaaatgccccagggtaaggggttttagtatggcgtctgttttccggaataacaaccttatcttcacgcagagagttataaatgatcgcgtcccacgttttcagcggagacataacccctgggaagttaatttttgcatagtacgctacagacagaaccagttcaataaagtttcgtttaccgtcgatatcaagtacgcggataacgtcaacaatgttgtacgtgatgtacagttggtgatcgcgctggcgtagttcagacagggaaccttcatactcaactttatttttaccagtttcgtattccgcgatcgcgtccagacggtaagacggttgcggggtaaagctgaatttcttatacagcgccataccatccatttgagcaacgccgaaaatatcatatcctaattgttcgttgccgtaagcgtcagtagtggttctggcggttactttaccaaacgggctaaaatgccttaccacgttttgaccgaaaatgttcaggtatcgcgtgatgatatatgcaatatcgaatttgtcagagttccatccggttacaataacaggggttcgctctttccaatctttgatatacgcagacaataacgacttctcggtctggaaagaccgataaacaattttgtttaaatcttcttcgctaatgtctttgcgatcaacgttttccgcgcaccattccgcaaggccaccctcaaccagatcgtatacatagaatttatcttcaatgctatcgtaatgggtgatcgcatcgattggatattttgcttcacgcggatccggaaattctggggcggtcacctcgatatcaatagaagcaatgcgaatgtgttcgcggttgtattcgatttcattccggtacatgtcagaaatgtaagccagtcggtaatcgtccatacctagcgcttccatcccaacatcgcgcatacgctgcatccagtttttagcttctttgatgctgtcaaactgttttttgaggcaaggcttgccgtaaatgtctttgtatggggtttctacaccattcatagcgtgttgatacattacgggcgcatatttcgtcttacgtacctgttcggtgccgttagagtcaacgaagcgctcgtaaatggtatctcccatttgttcaactgataggtaaaattcattcattggatcttgtattctccattaatataatgttccattgtaacactacctacagcaaattcaagtttactcgatgttctaaaaccaacaacccttctgctaacaagtcacggatctttctcagttgaacaagctggcgttcaagtttaaacccgtcgaataacatgctaaaaatactggaattgatactatgatattttgcttctgcaatgccctgattaaccatcatgatagctttgttaaccagtagtttcctttccgttactgtatgttcatccagttgacaggttgcaagggaaaccagatcatcataagcacgttgatcaataacgttatccatacgggccgcgaaaattttattcatgtaagtgcggatcattgcgcgtcctccattcttttcataaagacttcttttgcttgttggatcaagtccagagattttttaatacgctcatagaaatgagtggtttcaacttgattgcataacaatgtgtactctgaaatgttacgatcgtaaaatccaggaaagtagtgttgtgcatagctgtaagtgcgggtatctgacagattgcaagttaacgataacaagatgtcatcttttacaatcgggatgatcaaagtttcgttggatttgattgaatccatgatttcgttaatagtcataatatatccctctcaatggtgtacacccaatataacaaagcccctgcacgaatgcaagggctttttgattagtgaccgatccggtacttgtacttgaggatccaatctgctttttgcgagtgagtcagtacgcggaagttgttttcttctgcaaacttcaacccaggggttacgatcttaaccatgccccactcttcgagaagtcgcgcaatgttgttccggcgtagttcgtcttcttccgtcatatcgacttgacgaccatcgagtttcaacagttctttaaaatgcacgataaaatacttaccttgctttttcagaatgtggcacgattgccagagcattttctttttgttgtttgcaataccaatacgggttagcgtttcacggatctttaaaaaagaatcgtcgctgattagttgaatttctaacatacatcaccattgtttaatcaatttttccaatttcttttgttcagctttgtttttcacaatacccaacaaagacagagcgacctttgcgtgttttcttttccaatcctcgaacattccgaggtctttaagttcctgcaaatattccatcgctgtacgtgtatttacactgtatttttcgcgaaggatttcgataataattttctcttcaaaatcttccgatagtttagcccatgcaccgaagcgtttagccttcctaacagagttgagataatagttatagtgcatttggtcagagatactaccgcctaccagattcatcacatacgcgttgtatatcgtgtctatgtgctggctcattgcgttgtctacaaagtacttatcatacacttcatcgataaccaacggagttttgccgttgttgatttcgtctatgatgttaaacaaggtgttttctttatccttgccgtactctttgaccagttcttcaaccttatcccaatctttagaaagccaagcggattcatgcggggataactcttcttcatccagaaattccgccaggctcatgattacgcctcccagaccatagagagcatcaggttcatcaacagatattgcagatgaatttctttattcatcgccagcccgtattgcgcgttgttttcgcctacaatctggatcagtgcgattttcgaatcctgattcacgatagggtaaatcgtatcagtcaattttccgataaaggtatcgtattctgacgcatatttaataacctcagagcgcaaccctttatagttcttttctttcaacagggtaatgatatgagacacatcagaaccaactatctcatttaggatccccgcatcaatttcaccacgtttcgagtagaacccgatcgctttgataatagaacgcgcatccggataatgctctttaacaaacgctgcaatgactttaggatcatacttgatattctcgatttcaaggataccgaaacaacgcttgattaactgtttcatcagttcgatacgttcagcatcagacggaacaccgaatttaacaggaggacaacgagaaagcagagcactatgcacaccgttaatgttgttcgccgttacaataacagaaacgtttttactgtatgcttcgataaagctacgtaagtgtttctgtgcttccgccataccagaacgatcgaattcatcaatgatgataatctttccgcctggtttctgcgtcattgatgaagcaaaacgatccagttcattacgaatgaagtttacaccacagttcgaaccgttgacaaagaacacctcagcatcaacctcacgggccaacacaagcgcgagggtcgttttaccagtgccaggggaatcagatacaagggtcatgttctcaacacgcccagatttgattatgccccgcatagcggctttgtcaccagaaggtaaaatacactcttcaatcgttgttgggcgatagcgctgatcccatgcaaattcatcaggagatcgggagattttaccgtatttggtttcgatgatttcaatattttcactaagttccataatataccttcaaaataaatggtgtaaaagaaaggggccgtagccccttaaaactatcttacttgaatgtgctacttgcttcaagtacgacgacgtaagcaacgccgttatcagaagagaattttgcggcccctttggaggaaatctctactttgtaatcgctgttgatgaactgcatgttatcaatcttcatatcgaaattgaaaacattgtcgccttcatactcaccgacttcaacggagaaagttgattgactttctttgcttttcgcggtgatgaccagtttaccatcaatcggttcaacggacaggtcggtcagtttcatcatgcgagacgctttgatcagtttttcgaaatcgttagcggtaatctggaaaatcagatctgctactggcatcaccaaacgttttttcggtttcgggatcgttgttgcgtctgctgaacgttcgatgatcttcatcttgtcgccgcgaatcacgatttcaccagtggaaatatcatgagtgatttccgcgtcagtgccgacgatgttcagcatgttcaggaatgagttgagatcgtagataccaacatcttcatcaatcacatcagcaatttcagcttctgcgtatacaacgctgttgattgatttcgtcatgatgaatgaacctttggtcagcatgatcgaagagttgatttgagaaaagtttttcaggatatcaatagtttgtttagagaatttcatattcagcctttagttttcaataagtgttacttaataagtgattttacaacggtttccgctgctgtgtcaagcatatcagccatttctttaacggttgtacgcttcggatcttcgcggcgttcgctggtaagtttacgatgttccgcaaccactttttcatcaatgtcacgatagtgtttaaaacgttcctcttgaggcatagctttaaacagttcttttgtttcgtccgagagtttagcaacccaggatttacggacgcggttcatgtagtcaacaaaaacattactttcattcatatatttcttctctaacttagaattctttgagtgggggccgaagcccccgcttgtattacatgtctaacagtttatccaggtcgtcatcaccggaggtatcagaatcatccaggtcgaacggtacgccgtcatcttcgcctaccggaaccgatgcaacaccaccagatgatttcacatcagatgtctgattgtcaaacttagccatttcgttatcgaagttgctcagttcgctatcaaggtcagcggaagcgctggaaccagcagaaccgatcgaactacccataactttattgaagcgagtggtcaggtcagccagcggtttaaattcgctttcagcggtaatcgggcggagatcgctcataccttcgaaaattgctttctgaacttcttcatcgtcgatgtttttgatcttagccggaacaccaaacgagctatcgtcatagttaggccaatcgccaacttttttcgctttcagggtgaagttagcaccatcaaacggacaggttacagcaatacccggttcatcaagttctggattaccgttaattgcggcggtgatcttgtccatgattttcttaccgaagcggtatttgaacaccttaccttcgttttctggagcgcctgggtctttaacgatcaggacgttagcccagaaactttgtttacgaccgatctggctcagtagcttatcttctggcccgtttttgttggctttagccttctcatacagatcgttttcggaaatgtacttacatgcaggacagccgtcataatcgccgtgggtagaggaacagttctcaatgtaccactggttgtttttcttgaaagagtggctcacgatacggacgaacgccagttcatcatcggaacgtgctgggaggaatcgaataacggcggaaccgtttttctgtgcgtccagggtcagtttccattctttctcatctttctggaagccggaaccacctttcagatttgctacctgtgcctggagtttagcgggatcttgacgtttaaaaatgctgctcatattctgttttctcgtttagtttagtttgattaacgtttgtttcattaagtttcgatattttatgatatctttttcagtaaggtcaaatatttttctgtatgcctttaacttaatgctaaagtcagaccaaataatatcatcagctacttgatcgtgtttatttatgatacctaaaaatgagtcaaaaatcaaaaacgattcgtaagatatcacatttgacaggacaagtttgcttatgtaggacgttgatgatttttcgctgtacttgaacaccagagacacggggatctctttcattttggcgaattcgtacacgtttttaacgtcatccacaaacacgttatctagtctttgtaactttcctatgtactgcctgtaaaagacaatactatcttcatcaacatcgcctacccagaaatccggattggctacgaagttggagaggaatataaaatagatttctttgaatgtaaagcgttgagctaattttacaaagaaatatctatcctttcgcttgttaaaggcgttttcactaactttgatctgccagttgtattgaaggacatcaaaacgcccctggaaatgagttttcatcgccagatataacttgtatacagacaaaggcacaagccgtgaattcgcctcgctatcagcaaacggagctttgaatctcacatgaagccgtccagagtggttgatgaactatgttcaagcgcaaccgatgggcgaagcatgtttcctttgatcgcttcgtcgctaatcttatcaaggatcgcgcgaggaaccgttttattcagcatcgcataatcaatagaattttcatccatccattgtagcgttgcttccatgtaggttgccccctcagaggcaaccagattttcgatatacaaaccgacttcggtcttatttccgatcatgctttacgccttatcgatcatatcatacagttcgatcagttcgttgttttcttcttcgaaagcggtacgggcctgttcgtgatacagtttgaacagtttcccgaaggtttttccatcgataccgaaatcggttttcgctttggatttgatatccttgaacgtgccgttgaagatctcaacttgagttttcacgttggatgcttctttgatcagttcttttacctgttttgctacatcagggtttgtttgtaaaaattctacactcattttgttacctcaaaaatcactcagtttttcgaacatacgggaaagtttgttatccatgaagtaacgttccattttggctttacttccggattttggagtattatacgcttcaataatcgaattttcaatatcttttggtataaattcgaaatcgcgtagttcctcattttctttgtaacgtgcggcccattcaggggtcatcaatgttgtcggatcgtctgcctccagccatgcctctaactcagaggattttaccgctggggcgcgttcaccttcaaccttcgtcacaatataatcatttctaattttaatgcaagcgatactatcttttttatcgcctttgatatttttgtatcgcagatcgttacgtggcgaaccgtacttaggcgttacccattttttctgggtaggcgaccattgacgaacaccgttatatttctgtagttgtgtaaagtcgctatcagcagaaaccactaatactcgtctaccttcaccaacagcttttttcgtaacaacagcaattatatcatcagcttccgcgaattcaacctttaatccgagataaggcatattctgacggatttcttcaaacaccggattcaggaagttgttcagacgatcccaatcccattctgattcttcgtgttcgatctgacgacgttttttgtagtaccaggctttttgcctacgccagtaatttctgtcatcgaaggcaatcacgatttctggatactcacctttaaattttacaacgttaaaccgtaaagtgtcaagcaccagatgacgaatcatttcgatcgtgatggatgcttgttcctttggtttgaagttgttcatcagtgtagcgatggaaatgttagagatatcgatgaccatagtatcatcgggttccccttcatcttgcatcagcttgttcaagttaaacatgcttgcaaaactgctcatacatacctcaatttttcaaagaacggggttattgtagtaacttacaaaatgaagtcaatacaaaagactataaaaattttgatcaataatacttgatctgatcaaatttatgatctataatttattaattaataattattttactacaatgatcattgtaggtcaagtactaaaatcaataaattttatataatttagatctgatctatagatcattagatctactttaaccttaaataatatagaatgaaatttgattttgtctacagttattatataatattcttaacttcaaagaggaaatatgaatactatgactaaagaaacaaccaatatctacgcagacaatgaaaaattataccctatcctctgtgcatggaaaaagcaaatcgccgaaacaggtgatcgcaaaatgcctaatgagttgggggctgctattatggatattgcaaacgggctatcacgtcgttacaacttcaaccgttattccgaagattggaaaatggatatgatcgatgacggaatttccgctgcaatctcaggactgcataacttcgatgaaactcgttataccaacgtttacggttacattaacaaagcatgttggcaagcattcgtaacacgtattctgtacgagaaaaaagagaacgcgaagaaatataaattcttccttgagcacgtttacgactgcgaagattcagatatggttagtattgcagacgaaggtttcattcaagatctacatgacaaactatctcagtacgaggcttccgccaccaaaaccaaagacaaggaagcggaagtattcccaacattggaagattttctatgaaagcaataattgacttaaacaaaatattaactgatatcgattacgaaattgacttgctaccctacttcgtaaaattagagttgcaaaacgtgggaatcccggttatcatcgatccaactgacgtaagaaaccccgatttcgaagtagaagaaggggttttgtcttatatgataaacgccgaaactatgatcatggagatcacttatgattgatgaagagaaagaagtactaaccagtgtggaagaagtggatccagaagaggaaattcaacaaaagatccaggcacgtgtagaagccgacgcattgaagcgagcacaaaaattcattaagaagaaccggactgagatcaaacgcctccgtagacatgcagaggaagccctattcaggggtaataaagttcagtatgtgtatgcggttaagaaacttcgtgatatgctcaaacagccgtatacagaggatttcattgatacgatgtggaacacttcactagcatcaattcgaaatatcgtagcttcacaacagaagcactaacaaacaagtagccccgaaaggggctatgagggtcttatgagaaagtacttaatgatcggggatactcacgctggcttgcgtcaggacaacccctggaatgaagaaaacctatacaatgtattcgtacaaatcgtagaacactgcaaagcaaacggcattaccgaggctttccatgctggtgatttctttgatgtgcgcaaggccaccacacaaaccacgatgaaattcattcgtgaacgtattgtgccactactggaagaagccggattacatatctatgttctggttgggaaccacgattgccagtttaaagacaagatccgccctaactcaccgcgagagattcttgatcagtatgattgcttcacggttgttgatgaaccgatgacagtaaatcttgatacttctccgctgcaatcaatcgatttgatcccgtggatttgtcaagaaaacacacagcagatttttgatttcatcaaaaagtcaaaatctcaatactgcttaggacactttgaactgtccggatactatttctataagaacagtaaagcggaacatgggcttgaacctgatttcttaaagaaatatgatatcgtgtattcaggccactatcatcacgctaacgaaggcgctaacgttttctatatcggtacacctcttaccatgagcgcaaacgatgaggacgaaaccaggggcttctatgagctatcttatggcgacggtaaacgtgaattaactttcattgctaacccagtatgccaccatcgccggatcacctatccggatcaaaaagatgttgatgttgcagattacaaaaattgctctgttcgcttgattgtacgcgaagttgataacgatttgcctaagtttcaaacaaaactggaagaaacagtttatgagttgaacattgtcgatcgtgtgatcactgattcagaagttgatactgactttgaaatcaaaagcgtatctggattgattagtgagtacatcaacaacatgcagatcactccagaagaaaagaccgaagtatctgcaataatgagtgcattgtatgcagaggttacgagcaatggaaatagttgattacgttaatattttaaacgaagaagggcgatataaagccctttataaaatgtttggatttgatgtgattgttgcagtacagcaggattcctataacgagtatgtgtcattggggttcactctgattaaagacaactatcacgaaacaaaggtttggacatttactgtcctgaatagcatggatgaagattccgtgatatactgctttgatagcacgattacaaacatgattagtgatatatcccaaaggataattgatgaaactcaaatttaaaacattgacttatcaaaatatcttgtcggttggtaacgtaccgatcgtcattgattttgattcagcaaagaaaaccctcattacgggtaaaaacggcggtggtaaatccaccatgatcgaagcgcttacatatgctctctttggtaagtcatttcgcgatctgaaagtcggacaactggtgaacagtatcaacaagaaaaaatgtctggttgaactgttgatcgaatacggcaatgatgaatataaaatcatccgtggacaaaagccgaaagtatttgagatctggaagaatggcgaaaaactgccggaagattcagccgctggtgattatcagtcacagcttgaatcaatgttgaatattaacctggtgggctttaaacaggttatcgttctgggtactgctggttatgtacctttcatggaactgaaaacaccagatcgccgtaaattggttgaagatttgctttctctgtctattatcagtgaaatggacaaactaaacaaatcatacatccgtggtgttaaccgtgaactggatacgctttcaatgcagattggacacgtacaacagcagatcgcaacacatcaaaagttcattgacgaacaacgggcaaaagcaaatcagaatacggcgcgttaccaggatatctacgattcccacgtagaaacagcaaaacagattaaagcgcaattagttgaacttcaaacccagatcgcagaatgtgtgatcaatggtgaagaccaaacagcaaatattcaaaaactgcgtgatggttatacacgcctctcaatgaacgtagaacagttgcagcgtcttgaggtgatgtatcgcaagggtggtgaatgtccggcctgtaaacagccaattagccccactcctgaacgcatggaagagattgccgagaatattaaaaacggtactcagaaacttacgctgattaagaacaaacaagatcagctacagaaaatcatggatgatttactaacacaacaacgtacactaaatgggctgaaatccaaatacgaatcactacgcggtacacttcaaaatgaagttgcagcggctaaacgtgttcgggctgtcatggataaagcacaggaagacgtggtgatcgacgaatccccagttgaaaaactccgtgaagatgaaaaggaacttgattccaaacgttctggatttgtcaaggaaaaatatttcagaggtattgttacggatctgctgaaagattccggcgttaaagcgagcatcgttaaacgttatattccttacttcaataaacagattgcgtactatctggatctgttgggtgctgattatcagttcactctggatgacgaatttaacgaatcgattaaatcgctgggtcgtaatgattttagttacgcatcgttcagtcaaggcgaaagagcacgtattaaccttgctttattgttcacctggcgcgatgtaaccagtaaaatttctggtgttgatttatcccttctgatcctggatgaagtgtacgatggtgcaattgatcgtgatggtagttttgctgtaaaagcactattggatgggataaatggtaacgtaattgttatcagtcatcaggatttggatccggaagatttcgaccgacatattgttatgtcaaaagtcggtcgattctctaaaatggaagttaagaagtcttaaacttgcagttatcaaaatgccagcgattcatattgctggcatcaccagatttattgcaatatggacaaatcaactgcttcctttttgctggcgtctttctatttgggttatttctgcaatatggtatatgtgaacgcagataatgtaatgacgattctgttccgcaatatggacaattgccccgttctttaggtacgtttccgttcttatgggaacacgggataccctcgaacttatgtttcaacccttcattacctggtttcagtttgcagttgtcgaagtgccaacgagtcatatttccaattatacccgattttccgcaatgaggacatacaaccctttcttgttgctttttggctttactcattcgctgtctggtttcttcggtgaactctctgttcctatgtgcttctgacgcctttttctttaaccattcatagcgacggttagctgttctttcctttgacctattggaaccaactgttaacatatgtgctgcaaaaacaagtttgttgtttcctgggtgcatcttgactaataacagatgtgcaatataatgttgacgtgctgtaagattaaccaaattatcatcagaatctgttccacctatgcacttaggtatgatatggtgtgattctgtatatccatcatactgcgtttgtttagcatgttctatgatagagttataaattttgttatagttcataaacatatctcttgtttgatgggccgttagatacccctatttaagaggatgaaattatgttattagaaaaatcttttgaattagaaaccgctccggaaatagagcggttttatctccacaacaattttcttgaagaaaaacatatagttactatgaaagatgttgaagaagcattcaaagataaccctatagagttgacgcgaatcaagaacaacaaaagttctgtttggttcctcgaaaaaatctattgaccgaaatccataaatacagtaaagtagcccatgtaacgaaacgtgggctttgtttttatttgaggaacaataaatgatcactgaatccaaaatgacttatcaggaagcactgaaagttttgggcgcaactggtagcgaaaccagcgccgaaatgtccagactcttcaaacgcgcatccttacgcaatcaccccgaccgtggtggtagcaatgaattaatgcagaaaattaaccaggcttacgacgtcgttacaaaaactgggcctagtggcgcacgttctgagactgctggtgacgttcgcgcacgttatgcacgtcaaaagaaagaatgggaagaaaaagttgatgcttactttgtagtggcgaaaaactatttcagcaccaaatttaacgcacaggaatttgcggaatacttcaccaaatacactggattgcctaccactttcaaacaggaagtaacaaaaggtagtcacggtgtttatgcttcgttccgtttcacttctggtgatgcttactttgatttcggtttcaactgcacccctccgaatggacaagggttagccgctccggattcatctgcactgggtaacgtttctgttagtacctttgtactggttggaactaaaaaacataaaatggcaagccgtgattatcaatggggcaaaaacccagataagatcactccggaaagcctgttcccgtctaaaaaactggaaagtattttcagccctgtacagaaaaatatcaaatacaaacgtgctgattaccttgcatcattccgtaagctgttaggcgctgacattagcggaaacgatatctttgttgaagttggtacactgaaagttcgtttctatcgtcatgtaatgatgcgtaaaggtgcgtatgtgtttagcgcggtgtatgatcctgctgtatctaagtatcgtccggctgcacaacttcgcggaactatgttagaagacgaggacggcgcttgcctggatatgatcgttgatacgttcaaagagttgcagaaactgaaaccgagtgttcaaggcgttgtgaacgcgatcgataagatgaacgcagagtttgcagcgggacatcgttcagcatcttttgttaaacgtgtagctgctcaggaagccgcgccgaagccagaagagaagccaaaacgcactgttaatcgtatcggtaaagaggaatacttcgcagcactaaaagatattggtgctcgtgtaatgcctaccagcggttatgttgaatttgataacggcgctggtgttactatcaacttcaagcgtattgttgtaaaccgtaaagcatactactcattcagtagctttgatttcacgtactctggtcagaaacacattgagtggttgaaaggaatcgatatcgcagaagataccaaaggcgcaagcattagcctactcactgatactctgaaatctttacgtgggatctctgactggaacactgttaagagcgctttagatcaaatgaattctaacttcaaggcgggtaaattctccgcacctcatgtgaagaaggaagcagagcaaaaagcaccgaaacagaaagacgaaatcggcgcacagcctaccaaaccacagacggctaagaaagatacaccggaagtggaaaaatcgcaggctgttcatgcagcacgtgagaaagcgaatatgaacaacactattcgtaaaatgatgactatgttagtcaaagcacagcgcaaagacactccggaagatatcaagaaggaagttgatgcagcaattcaattgtggcgcttgacttactaatcaaatgaactataatgggaactgttaacgcagttccctttttatttgaggaaaatattatgagttgtccaacatggttacgtttggaaaatctgaaagaaggtacacaaaaacggatttatattaatcttggttgggttcctcctaccgattttcaaatggctgagattttaatcaatgctgttaaagaagtaagcgacacttacgaatgggaaaggctctattttcctttgattggtttgtatatgacgcgaaataaatttgaagaaatgaaacttgctgttattcgcgctacgattattaattcccaacaaagatttactttgaaaaatgcatggagttctgaatgattattcaagtatctgtacagggtgacactctgactgtcaccgaatccatcaataccgctcttgctgtatgtcgtgaccatatctcacaaaatcctccagtgactgagatcctggaaattgatgtttgggatcagattgggatgatcgacgcatcatatggatttaccccgcgagatgaagaactatctcgtatcgaatcatggctgaatgaacaggaaacggaatgaaactccctaagaacacaacactactaacccgcgaaaaacttcactctgttgattggtgtcctctggatatcatgatttttgatattgaatctcgcgtgatcaatgcaaaatatcaggggtgtagtattttctctgttgaattcgagaagattcgcggatatgatgagaagtacaaagaaaaactgaaagttatgattgaagcattaggctatattgtaactgttgaagacaacaaaatgtggatcgcaatatgagtatagtaaaagcggtgtttgcgctggggcatgatatctaccacgatgatttcgcttttggatatcagcaaggcttgccgtggggccactgtaaagaagatttacagaacttcaaagaagaaaccgccgatagcgttttgatcatgggtgcaaatacgtttacctctcttccgggtaaactacctggtaggatccattgtgttctgtctggttccggtagctttttgaaaaccaaaaaaggcgaggttgctgattacgtgatccacggtggcgggttgtctgctgctattggtacaatgcaagcaacacacccagataaaaatgtgtgtgtcattggtggtaaggggttgcttttagattcaatcaataataaaatggttgatgaagtagttttgacacacatttacggacatgatgtatataatgcccccgcatttaaacgcgatgtttcgtttactgcttctgaattgggtgatgcattgttaaaatatgaattttctgatttcgaaactcagtacatcaaagaacatgaacgcattgaaaaaatcatagtcgatcgatataaaaaggtataaaatgaaacagtatctggatattattaaacttgtacttgataacggtgttgaatcaaccgatcgcactggtgtaggtactattcgtattttcggcgcacaagcccgatgggatctaaacagaggtttccccgcaactacctgtaaaaaactattcttcaaaccgtgtaagcatgaattgcaatggttcctgtccggttcaaccaacgttgaagaacttcgccggatgacctggggtgaaaatagcgataagcgcacaatctgggatgataactatgaaaaacaagctattgatttaggatatgattctggttatctggggccaatctacggtcatcaatggcgttcgtttggttctctttatggggatgatgatagttattatggcggtagtggtgttgaccagatagcaaaagtcattgaacaactgaaatcaaccccagacgatcgtgggatcatcgtttcggcatggaaccccgttgatcttgatgatatggcattgcgtccgtgtcactgtttctttcagttcgttgtaatcaacggtaaactgtctctacagtggtatcagcgttcagttgatgtcttcttagggttgccgttcaatatcgcctcctatgctctcctgacacatattatcgctgatatttgcgggtacgaagtgggcgatctggtttggactggtggtgatgtccatatctataaaaatgcggttgaacaggcaaaagaacttttacagcctaaccgttcaccaatgccattaccgattctaaaaatgccgaaggtaaatagcttacttgatttagatcaagaattctttgactcgataaccttagaagggtatcataatcacggctctctaaaagctgaaatggcagtatgaaaaatggggcttcggcccctttcttaacaaggtaagagaatgaatgacattaaagtagtagtaaaatcctctggtgtacgccagccgtttgacaaagaaaaaatatacaaagtgctcaagtgggcctgtgatggtcataatatcgatgttcgtgcattccttgaaaatgtattagaactgatccgcgatggtatgactaccaaacaaattcaacgtatcgctatcaagtatgcagcagatcatatttctgttaaagaaccggattggcaatacgtagcatcgaatcttgaaatgtttgcattgcgtaaagacgtttacggtcagttcgatcctatcccgttctacgatcacatcgttaaaatggttgaagcggggaaatacgataaagagatcctggaaaaatacagcaagcaagatattcaagttttcgaacgtgcaattgatcatgataaggattttgaattttcgtatgctggttcccaacagttaatcgggaaatatctggttcaggatcgcgatactggcgaaatctttgaaacccctcagtatgcgtttatgcttattgcgatgtgtctgcatcaggaagaaactggattagcacaggttacgcatatcgttgatttttataacgcaatttccgatcgcaaactgtctctaccaactccaattatggcgggtgtacgtactcctacgcgccagttctccagttgtgtagtaattgaatcgggtgattctcttggttctcttaacgctgtaacctctgcgatcgtgaagtatatttcacaacgtgctggtattggggttaacgcgggacatattcgcgcaatgggttctaaaatccgtggtggtgaagctgttcatactggtgtgattcctttctggaaacatatccaaaccgctgttaaatcctgttcacagggtggcgttcgtggtggtgctgcaacattgtattatcctttctggcatctggaagttgaaaaccttctggtgttgaagaacaacaaaggtgtagaagaaaaccgcgttcgtcatattgattatggtgtacagcttaaccagttgatgtataaacgcttaatgaatcgtgattacattacgctgtttagtccggatgttgctaacgatcgtctgtatgatctgttctatgaagctgatcagactgcatttgaagaactgtatgaaagcctggaaaaagatccaactgttcgtaagaaacgcatcaaagcggttgacctgttccaactgttagcacaggaacgcgcacagacaggacgcaaatacattttcaacactcatcacgtcaaccaacagggtagttttacggttcctgttcgtatgtctaacctgtgttgtgagattgcgatcccaacgtcgccgctggatgacgatgataaaatggctggtgaaatcggattgtgtacgctaatggctatcgttctggataacgctgatatcagcgaattcccgaaactcacgcgtattgcagtacgtgcgcttgataacctgctggattaccagaactaccctgtaaaagccgctctgaaagctaaacagcgccgttctctgggtgttggtatcaccaactatgcatcatggttagcgagcaactattgcgactactcagaagcgtataccgacaaagttcatgagttaatggaagcgtttcagtttaaccttctcgttgcttctatggaactggcgaaagaacgtggtgcgtgtggattgtacaacgataccaaatacgctcgcggattactgcctatcgattggtattgcaaaactgttgatgaactggtagcacctgtttataattgcgattgggaatggttacgtagtcagattaagaaatacggcttgcgcaactctactctttctgctttaatgccttgtgaaagtagttcacaggttagtaactctaccaacgggatcgaacctccgcgcggtttagtgagtatcaaatcttcgaaagaaggacactataaccaggttgtgcctaaccagaataaccagattgatttctatgatctgctctgggatatggctaaacgcggtaacaaagggtatctgtctcatgtagcagttatgcagaagtttgtcgatcagtctatttctgcaaacaccaactatgacccggcaaactatgaagacgggaaagttaaaacagaagacatcattgatgatctgctgtatgctaactactacggtgttaaaactctgtactatcataatacgcgtgatggtgctggtgatgaagaagaagccgcagaagattgcgcgggttgtaagatttgattaatgccccttcgggggctttttaaaggtaaagacatgttaacagtaatgaatacaaacccagatcataaccacttagaacaacctatgttttttggtgaagatactggtgttgcacgttatgaatcgcagaaacacaaagttttcgaaagcctgacgcaaaaacagctttctttcttctggcgtccggaagaagtcgatctgtctactgaccgtatgcagtatgcaaaacttcctgaacatgaaaaaatcattttcgattctaacctacagtatcaaaccctgttagataccattcagggacgtgggcctaacctcgcatttttgccaattgcatccgatgtgagcatggaaacctggatcgaaacgtgggcgtttagtgaaaccatccacagccgtagttacacgcatattcaacgtaacttgcacattgatccttctgtacagttcgaccaaatccttcgcaatgaagcgattatgaaacgttctgcatcaatgacacggtattatgatactctgattgatgaatgtcataagctgaaaaccatcatgatgctacaggaacaggttagcggctataaaccaaatgatccggctgtcgtgtattataacgagcaatacactaaacaggccactaagtgcaaagaagctctgtacctgtgtatgcacgctgtgaacgctctggaagcgatccgtttctatgtgtcgtttagtttcacctttaactttgctgaacaaggcaagatggaaggcaacgcgaaaattatgcgcctgattgcgcgtgatgaagcattgcatcagaaaggtactcagagtaaaatccgtttgtggcaaatgggtaaagatgatccagaaatggttgaaatctcccgtaggctgaaaaaagaagcaacggctatcttcctggaagtatatgaacaggaaaaagaatgggctgaacatttattctctgttggtgatgtagaaggtgtatcgctgaaaagcactatcgcttatattgaacaccttacagatcagcgtatgcgagcggtagggcttgattcaccattcaccccgatccctaacccgtatccgtggatgaataaatggctcaaaagtgataacgtacaggttgccccgcaagaggttgaagtaagttcttacctcgtcggaaacttgaatactgaaatcagtgatgaagcgtatgcaaaatgggccagcaaatacgcgtgattgtcgggtagtaaacaagtacaaaactgattgggatgtcgatattcaaagaggtacgaagttcggcaacccttatcacacaggaacaaggggagaaaacattttagcgtttatcccctggttccagaatcaggttcgtactggggcgatcacgattgaagaattgaaagaacttgatggaaagaggcttggttgtacctgtgcgcctcttccctgtcacggtgattacatcgcgcatgtggttaatgttttgtgtggtaagaaaagatcacttgactttttggatatataatgtatgaaatctgaattcaacttaacccttgataaatgtggtcgcatcgatcgaagttttgttaagtgtggtgaacttaggcattgtgtttattttattgcaattaacgatgaaatagtatatgttggtaagtgtagggatatgtggaagcgtttagacacatatcgcaatgcaaagtattggagagaagccaaccccagtaacatcttaaaaacgtgtcgattggaaatggctatcaaaaaacgaaaaactgtgaaacttatcgtgactactcacgatgaaaatacatatcatgattatgaaatcaacatgatacgaaaatacaaccctgaatggaataaacagcactatgacaaaggcacaaactaaaattatcaataccctttacaaacaactcatgcagttgtgtggtgaatccgaaacatttttcttcgttgatcaagtaaccgtgatgggtacacctgttcgaatctttaactatcgcatggcctcatatacagactggctaaagcctggtgctctggaatgtcgcggtatcatgtttgaaatggatggagatacccccgtatcaatcatcagccgccctatggagaagttttttaactatgccgaggtaaaggcatgggaagcgcttaacgagtctcctattgaattaggcgaagttttagacgtgatgattaaagaagatggttccttgatctcaactttccttgacggtggatttctggcggtcaagtctaaaggttcggttaaatcagaacaagctatggatgcgcacagcgtgttaatggcaaatcgtgaattgctgacccgcttaactgagatcgctaaagaaaactatacggtgaacatggaatacgtttccccgaaaaaccgtattgtcgttggttatgattctcctgatctgcgtatcctgaacgttcgtcacaacatcacgggtgaatacatcccttatgatgaactctttgctgacgcgctgttacgtgcgtatctggttaagcgtgagaatatcgaagtactggatctggatgcattcgcaaaagaagcatatcagaatgaaggattcgaaggctatgttgttctgacaacgaaagggtttgtaaaaatcaaaacaaactggtatgtcaacctgcatcgcacaaaagatagcatcaccaacaataaggatcttttcctaaatattgttgagaatacggtcgatgacctgaaacagctattcagttcggatctggtctctctgaaaaagattgacgatttcgaaaaacttttccttgatagtctcaatcgtttgagtgcaaaagcattcaaagctattgaagataataaagggaaatcgcgtaaagattttgctatcagtctaagcgcggatttgtcaaacgacggtcggatcatcttcgggcctcttatgaagtacttcgaagaaaccgatccacaaaaactggtcgatcgcatcattgaaatgatggttaaaaattacgatcagttcattcctggagagtacaagtgaaatcatttggcgcatatagccgaacgatagaacaagaaaaagcagggattgattccctgctttctttcgttgatgttttccccgaaactggaaaaatttactggaatgataaagcatatcataaaagtaagagaggaaaagaagcgggttctattgtttgtgaagaatacccttatacgaaaataaagtatgctgggaaaaattacatgaggcatagaataatattttactatgttcatggttacttaccaatcatagttgatcataaaaatggtcttgattttggtgattgtattgataatcttcaagaatccgatcccgttcataatatattgaagaaaaacaaaaccagaaaatctaaaactaccacatcaaaaggggttgactatcgttcttctcgtggaaaatatagagcacaaatacggattaatggtaaaacgaaacatataggatattatgatacagaagaacaggcgtctatcgcatatgaggaaactttgaatgaatatcaaaagcatcttgggtatgattaatataaaatcgtggatatggcctattattgttgcttgctccctaatagcccttttttacattgcagttgataccaaaatagaaaacaggcaattgtctaaggatatcaaagcgttacaagctgatatcaagaaagtaaaagagacaaacaacagtaatacagtgatatacgtcgaacagaaaggcaaggatcagcagttagtgaaagatgccggacgtaaagatctgctgtttaaaaaaccaggactgatcgaaatcaagatcaacaagtcctttgaagagtatatgaaggattacgaaaaatgaaaatcgctacactagcgctcgttctgggcgttctgttggtcgggtgtgctgagaagccaccagaaaagattttgcctacgctacccgctaaggtgaatccggtcaatgtgaaatggaaagtggttgcagaagtaagggaaatcgacgggaagaaatatctggtcatgccttatgatggtaatccatacgttgccctttcatacccagattcgttaatcttccgtagctggatgaatgacgttaagcgtcagaaagaccagacggataacattctatgcaccgtgggataccccgaaaaatgcaagtcaaaataattgatacattctttgatgacttgacggtcggaaaggtgtatgatgctgtagaatccaaaaatgaactatggattgatagcgattgggggattgcagtcaatctgcataccgaagccagtcaagaactaattgaatatgagatagtgaaatgaatctgtttatgactattggcgttccgggtagtggaaaaactacctgggcgcatgagaaagcccgtgaattgggtaatactgttacgatctctcgcgatgatctgcgtagctctttgtataatgcgggtaaaggtgctggcggatacaaatacaccaaagcgaaagaagacatgattgcagaaatgcaggatcacgttgttatctccactctgaaagatggtaaaaacgtgatcatacacaacacacatctgaaagaaagtgataaaaatcactggcgtgaaattgcgttggaacacaaagctgattttcatattgaatattttgatgtgtctattgttgaactgcttcgccgtaaccacaaacgcggtcgtgatgcattacccgtttcgcgtctttgggaaatgtttaaccagtatcgtaagatccgtgggttcgtaccagcaatggaaattgttgatccccacaatcagaagtgtgtgatctttgatgtcgatggtactctaaccaaagtgggacaacgtagcccgtatgactttaccaaagtgatcaatgatccgccaaatatcccgatccagcaactgtttcacctgtacaaaaatgcagggtataagtgtgttgttgtgtctgggcgtgaaggtaatccgcaatgcgcacatgatacatgggttagcctgttgagttatggcgttgaaccggatgaaatttttatgcgtcaagaaggtgataccaggacagattttgaagtaaaagaagaaattttgtttgacaagattttagataagtattatcctgttattgcagtggacgatagagacactccggtcggaatgtggcgagcaaacgggattccgtgcttacaagtcgattatggtgatttctgattgacatataatgtgggtatgttaaagtacccacacaaaagaggattatattatgaacgttattcgtgaagataaacacatcatggttgaacttggcgatcgcattcgcgtagaaaatctgggcgattttaaccaaaaagttcgtttgttgtgccaaaaaattgctaacaaaattcaggaacagggtaaagctccgggcgggtttgaagttagctccactccggtttctcagtactcctatattgtgtatattcatgacgtggatactaacagcacccaatctttcgggctggtgttaaatcctattactggctacgttacatgggcggctgtattatgaacgtaaaaattattgatagagcggtaattacggacgaatctgtatacccggatcctcgttattatggcggtgttttcggatacatcaaaggaactgatattgatgtagtaacaagtccgattgcagaatatgatatcaacaaaaatcagacagaagttcgcgttactacaatcaacggttcagaatatatcgttgaagcgactcctgattttatcaaacagctactaaaggtgatgaaagatgcttgatcatcctggctctatgagtatggtgctcctggaagcattaaaagcatatgatatcccttgtcatttcggtgaagtaactgttaatactatcattgacgaaatcgacaacccaaatactttcattgcttgtcttgttcgaaaatttacaagttgttttcgaccgagtccagaaaaagtagtaatcagttctgtttctgctcatcatcgagtgttagatgatggaaagattcaactttactggaaagttctttatcacgtggtgtatcatgaagattgatgatattatgtttatgcttagagcaataagcgcttctaagttctctcaatgtgtctctgttaatgtcggtgctgcattgagaaatggtaacgggcgtgtgtttgtaggcgcaaataatacggttgatcctagtcatcgttgtacagatcagtgcaatcacttattagatgataacgggaaactgagtgaagaaaagcgccctgaacattcacaatggtcagatcgcaacgaagtacacgcagaaatgcgcgttattatgctggcggcgtctcatgaacaaatcaaagacgcaactttgtatacaactcattccccttgctcacaatgtgcgaaaaatatcgaattttgtgttgcaacaggtatgattaagcgtgtagtatatctacataaatacgatcgtggtggcatcgagtggatatggcgtctacagcaatacggtgccgaagtagtacaacttgaccccgaagaaatgaataaacatttccggatcaaataacaaatgagtaaatgtatgtctgaactgagtgtaaaagcatcctttgaatatgttttgattgaaaccaacgctaaagcggctggaactgaaattgtatcaccttctggtattgtgactggtgttcgtcaacacggcgaggaaccgatctacggcacagtgttatcatgtgggccggatgtaccggaagaatataaaaccctgcttatgggtaagcgcgtaccgcttcctcatgcacaaatggcaaacgtgccggatcctgaactgattgcaggaaaggcaacaaaagaagaagctcgcaagtatccggttaaatatgtaaccgcacactataaagcgattcaagcaatttacgaataagagatccaacatggctaaacaaattcaagcaatcatcgccgataccgtcgcaaaatctaaaaaacttttcgacaaaggcgacatcctcgaagcaccgacccgcatcgatgtaatgacttcaatgatcattgatgctcaccagggaaaactaaattcccgtgcttcggaagtaatggaatacatcgtacagttcgaggatgtatgcaaatacgccaaagctgttgatccggctgttcgcgaaatctaccgcaaacagttctaaaaatatcggccccttagctcaataggtagagctaatcactcataatggttaggttcccggttcaagtcacgggaggggccaccaaacaaggcaaggcacttagagaagcgggaggaacagaatctgaatctgttggttgtaggtgcaaatcctacccttgccaccaaattagggtgcgtagcgcaatgccgttaaatggttcggaatatgcaacctttctcacggagaaggctctgttggtatccggtaataggttccccggaatgcggggtgaagtaaagaaactcccagcccactaattttaatgaggtttatatgaaatttcgtgaaactgtgaaataccataacgcggtcgaatatacacagatttttgttgatatgtctcccgcaaaattcaaagaacgttatggcatgacatttaatgaatggaaagatggattgcccgatggggactaccgaaaaaacttcaaattcaatgaatgttatgtggatgatgatccttacgatctggatatttttggtaaaacaacgcctctcattgagaattcgccagaacagctttacgaatcttgtattgactctgcatacgaaatttaaagagataacatgaaaaaattacaaaaactgtttgaaatgtctccggcaattagaaaaatcatcggagaaaataacaatccaacgaatcgcaataaaaaattgatggaactttttgcaaaagagttcgatgattttgattctgaacttcataaagcgcttgaggcatattctaaacaagggttctttgcatcgccgcaagtaaatagcaagaaagagtatagcgaacgattctttgattgggagattgtcaatctcgttcgtagaacaaatatatctcctagcaatcaccaattgatttctcttgatacttcggtattctttatccagtatcttatcagcggtggtttcaaaaatcctgaaattccgtttacaaatgaagcggttagcagtgaatttgatgaatcatttgtatacatcaacacaaacaaataatcaaatggctatcttcggatagccttatttttggggtgtctatgcgctttttaaagtatgcaagttggatcgtactcgtccctcttgacattattactggagtattagcaattctgtttgccccgtttgttgtaccgttctacaacgagaaaacagggcatcttcctaaaggcttccggtggatggaaaccttcgataatcctattgatggtgatggtggacatatccgccgttgggcgtctatacgctatcatctgggggattttggggtatacatgcagcgtgttggctggttgtggagaaacaaggcttataacttcgcatatcacgttttaggacgtgaagcgacaagcaaattcaactggaaaggcaacccaaaaacagaaggtgggccaaaccccgtaaatcatggctatctgctcatgtggaatgaatcagcatggggtttgtacgtttacaaaccgtggctacagatccacaaagtgcaattctgtttgcgcgtttatgctggatggaagctgaaacaagaagttagcgacccagttaacctggatcgtgcaatgctggcgtttcatttcaacccgttcaggtattatgtaatcaagtaaaggtaatacaatgaaagcatttcaaattttagaaggtttgcatactggtacgatctatctggaagaaggtaacgacgttcggatcgtagtatcaaaaacattaactatggattctgtgatcggtaaagctcgcgttactccgtttgaaaagcgagagattgagatcgaatatcaaccaactgttaaggtggaaggtggacagcatttaaacgtaaacgtgttgcgccgcgaaactctcctggatgcggttgaacatcctgaaaaatacccacagttaacgatccgtgtttctggttatgcagtgcgttttaactcactgacccctgaacagcaacgcgacgttatcgcccgaacctttacagagagtctataatggcaattgatgatatcaagggttataaaccccatactgataaaaaagtagaaacggtaaaccgtatcaaagatgctgaaaatgcattaggtgcaatcctggaagatatcgaacagcgactatcaaattcagatattgattcactgatagaggaagaattagatgaggtgcttgaacgtatccatcaaattcaactagcgaaagaccgactgaaagaagcctctatgtgggcgtgtcgtgcggtgtttcagcctgacgaaaaatattaaaaatcaagccgttgccgaaaggtagcggctttttcttttttggtgtaaaaagttgttgactcccttctcacattcccttatagttaatcccgtagacaagaaaacacttttatgaggatgacattatgaaacgctcttacaacatgaatgaactggttttcttcaaaactcgtcgtgaagcacgtgcttacgttctggcggctggtaaaaatacttctgctgctatcgatatgggtactgataaagctgttggtgctcgttgggccgctgttatcgttatcgctgctccggttactccggttaaaactctggtacttggtgcgcgtcacgccgaaactcttaacactgctgcaagcggtaggggccacgaagttaaagtgttcaagaagcgttcttatctttcatgtgcaaggggttaactatggcacgattcatatataaagtggaatatgaaaataccgagttatctgatacctttttgaagatgattcgtgatcacgggcaacgtctggaaagagtaacgattgatactgcgtttgattgtcctgttgggttggttctaacattatcttgcagccctgcaaaagaatcagcccgtgtagaaatgttacataaactaaatgcattttatgaaggtggtagtgtatggcgagtattgtaaaatttttcaccgactcagtgaaagaaattaaaagcgctctggaacaatggaacactcgttgtgatgtatccattaaatcagagtacgaaacaacttatgatcgttatgatccggcccgtggtttgcacaataacccccatgaggtggaagtgtgaaatactacggattcaaaacgagtcattttggtaaagcgtatcgtacagaaaacatcgatcgcaaacgtccgtactatgattctttagtacgagcgggacgcaaacgcgctcgccaggaagggaagaaagaaggtgaagatcgtggataattggaaagcgtggatatcaattattgttggtgttatcatcggtcggggtttgtatgatttaatcttttcggcggaggttcattatggacattggttcgggtagccagtacccatcatgcgcattgagcaactttgctcctcatccattcacgtttgacggggtagaatgtgcatcaatggagggctttttgcaaagcctgaaatttagcaatccagatatgcaagcccatgtatgtactctggtaggtaaggccgcaaagttcaaaggcaaaaagaaaaaatggtggactaaccagaccttatactggaaaggtatccctattcatcgttcctctgaggcgtatcaaatcctgattgaaaacgcatataatgcgttattccttaatgaagggtttcgccgtgcgctggcagcaaccggaaaaagtaccttgacacattcaatgggaaagaataaaataaacgaaactgtactgactgaaagagagtttgtacgcaacttaacccgattgagagatctgttatgagtgaaaaagaaagagtagaatgcgtgtttctgttcaaaggcgcgattaatccattagcgttactgtatgcgcaacatgcattacgttcaacgttgattcagagtgttatctataaagcaggtgtgtattatgttaccatcggcgcaaataacatggttgttattgaatcatatgttaaggaatgtgcatcaaacggcattgtctttgataaagtcgattttgatgcaggggtagatgctgtttatatgtataagggttgatatgagttacgtagtttatttcgattgttcggatctcgatccgttcgtgcttcaacaggcaaagaaatatcatcaagatgtcgttggcattggtgtaacaaatgatgatatgttgtgcatcgaatttgaatattatcggacatttgagcgtgaacaattcctgggtgaattgaatgcattcaaaagtacccttttctttgatcgttatgaggttatatcttgaaacctgttattcttaccgatattgacgggatcgccgtaaaatggcaaagcggcctcccgttctttttgtctaagcacaacatgcctactgatattgcattagaaatggttacagatgaaaaatttcgtgatatgaccgaaatcttcggatgtgatcagcagttggctaaaatccttatggaagaatacaataacagttctttcattcgttatctgaatgcgtatgatgatgcattgattgtgatcaaccgtctgaaaacgcagtatgatttcgttgccgttaccgctctgggaacaacaccaacggcaagccttaaccgaattgctaacctgaatactcttttcccgtctgcgtttaaagaggtgatggtcgtgggccacggtgaaacaaaaactcatcgttacctggaagcaaaagcaaagtatggtaatcgtctggtttgctttgttgatgatctcgcgataaacttaaacgaatgtcataacgtcattagtcagttgccgttattccatatgttacgtggtgaacgtgaagaaacaaatgcacctcaccagttagtaaaatcgtggtttgaaattgaagagaaactaaatgatcttgtcaatccttaatgaacttgcgtctactctgaaaaccaaagagaaagaagcaattttaaaacgtaatgccgataatgaattattgaaagaagttttccgcattacgtatacaaaacagattatgttttatgtgcgtcaatttcctctggtagaagggaaaccaggcacaacaccgctttccgatgcaatcaaagcattactggaagatttagcaagccggaaatatacaggcaatgcagctcgtgatcgtttactggatattgtatcatcagtgaacattaacgatcgtgaagtgctacgccgtatcattaaccgcgatctggaatgtggtgctggcacaaccttaccaaacagggtatggaagaaactcattcctgaacagcctcaatgcctcgctacgccgtttagtgaaaaggctttacgtcgcatcattttccctgcttactcgcagcttaaagccgatggtgcgcgttgcatggctgatttgctggaagcattaaaccgtaaggtatcgagagcgggtaacgagtacgaagggttaactcagcttgatatcgatctgaaaaagattcgcgattatctgggatatgatgtagttctggatggagaattgatttatgttccttccggaaccttaccaacattacctgaacctgaaacagacatgcctttttctttatctgctttcatggacgatgatgataacgacattgcgttatttgcggaagaagttcgcaaagtatcgaccccagaagaagaacaggccgaagcaaaacgcgaagaagggaacgggatcgtaaacaaatctctgaaagggacgatcaccgaagaagaacagcgaaacattgtttatgttgtttgggatattattccatatgaggtgtattacggcgaagctgaaagtgttcagacttatgatgagcggtttagcctgttgcgtgatatcctcctggatctttctctgccttctgttcgtttgattcagtctaagctggttaataacattgcagaagcgaagcaggactataacaattaccgcaatgacggtaaagaaggttctattctcaaaaacagaaacttcaaatggaaagattcgcgagtagccgatcaggttaagctgaaaaacaaaaccccgattgaactacggatcattgatatctacgcgcacactaaagaagaccataaggtcggcgggtttgtggtggaagatttatccggaatggctcgaacgaataccggatctgggttaactgataccgattatcgttacgatgatgatggtattacccgtgtatacattccattagatgaacgtggtgaactggatcgcgaatacatcatggcgcataaagatgaatacattggggccattgtagaaatggaagttgacggcctccagaagtcgaaaacgcgtaagaaaggggaaccggaatacagtttcttccttcctattatcaagaagataagacgcgataagaccgaaccagacgatattcatgttgtctttgcagatctattttaataaaaagcccttgactccggtcgggggctttgttatattgcatatcgaaacgtaaatcactgagagaatatattatgactagtagttatcagaaacacaaaacccttatggcaaacctgtccggtaaacatatcgacgaagtaaaatctctgctgacagtaaccgaaggttcccgcttcgaaaccaatcacattatcaaaccttctgtgaagaaagtactgaaagtgatttaccgacatccggtgtatcagtgcgttcatatcatgaacagcaacgcatttattttcgtatataacgaatccgatgataagtgtgttggtattttccgaaaacctaactttgaatgcatgagcgaagcggctgttgcaaccccgatcgttgaagaatatccggattatgttcaacgcaacatgcgttatgtgcaatcccgacttgattatgcatacgatttcaattctgacgcggtagaagcgctggcggatatcctttgcaaaaaccagaaagatcgtcaaatgacaaaatatctgactgatccaacaccgccaacaattcgaatttctgttgaagttccgtttgaaaatcatttcatggcagttgaagcgcttgctaaacttggtttagaagtgaaaacagaagccgtttaatagcactttttgttaaagaagcctcttgcaatgcagggggcttttttgtatattgcacacatcgaaacgaaacagacaaaaggaacatcccatgcaaatcactaaagaactcgaaggcaaagtaatcgttctggtaaatgaagaccgtttggcacaactgggtaacggtggtgaaaaactgccagcggacgcactcgaaagcctttctaaaatgcgcgtgatgcgcgttactgacggttgggttacttgtctgcctctgaacgacgaagacaaagccgtatacgatgcacaagcggattcatgggatatcgaagtacctctggtaaacatcgaagttgaagagtgctacgaaatcgaaaaataatgcttgtgttctgggtaatgtaatggtacattacctacatcgaaacgaaaggagaaacatcatgaaagttatgcacactgcaaatcaacttcaaaacggcaactacgctatccacgatgctatcggtgcgctggttgggggtatcaaactccttgaagtaagtgggaataccttttatggtgttgaaaacatcgaagcagcgatggaaattatcggtgacctgaaatgagtaagaaactcgaaatattcgaaactatcagcgaagattcgggtcttcgctggtgctgtgcgaaaactgggtttgatgctgcatggggtgatactccagaacaggcgcgtaaaaactgggaacaccaacaattgttttttgcctgtcgggttcctaccaattatgaggggagtcaattgttagcatgaaaaataaagaatatgacccaatagaagttaaagagcggttatcggtagcaagaagattccttgaatctatcgaccctgataaacttggaaaatgccctgatacgatttgccttaattgtgggcgttctgttcttgttggtaagtgttgcgataatccaaatatagttgtgatggaaaaggaacaagtatcccccgaaacatgggatcagatccaggaaatcattaaaaaccctccagcgccaactaagaaattacgtgaattgatgacaaggaaaatgaaatatgagcaaatttaaattgagtgcaaccgttcgccttattcgttggaatggtgaagagatccgttatgatgaccccgaattcgcccatgaaattctttcgcatcgtttgggattgaaaaacgcgtcattggttcaaactgttaaaacatcagcagagccggaaatttggcgttgtgttattctggatcttgataacaacattgattatgatgatcctaagaactatccgcttctggaagcacaagttgagaatgctccagaagacagacagtgttttttggttgagttgccacgcgaacattacgaaaacatcataaaggcccgtaaaaaggtcaataacaatgttttcgatctccacctcggattgtttgaggattaagtactgctagttgtgttcgtcgtagcggcgctggtaggttcccccacctgtatacattcaagtgtttgcaggtggaaatcttttgatacgtctcgaacacattcaacgatcagatattttcctgcgtactcttccccaaatacctcaatgattgcccctaccttaacatctaaacgaccctgctttatatcgaatctgatccggcgttcatagctggatagcaattgcattttagacgcctggaacggtttaccttctgaatcggggttctgaaagttggtatcatagattgcattacggtttgtgaagatccatgtattttctgtgtctgtatcagccagtatatcaccgtacatctttttatcagtcaatgacagactaaagaaactggcatctttaaacagcgttgtgttatccttatgggtaatgtactgggcttctgtgaatatgacagtatcgccaacaaacacgttatcaacgttaaatttgtatgctgggatcggtgtctgggccagaatgtcagttgaacttttaaggaaaataccggaaccatcttcccacagataacagaaatcagaagaaactacactttgcccgttgtccctgatataatcgaatatatcctgatatgtaccatttagacatccaggagggatacgtatgttaccgccgtcaacttcgggggtaagtagtttcattttgctatacagtgccgtcatacactctgtaatcgtctgtacggcgttgttactaaatgaacgggcaaacttacgtctgaacgttttatgcagcggagagaggttcatacgcagcacagagcggtttttatcgtcagtatctacgttagagtaaagcaatccgtaataatgttgttcctgtgtaccgttatactggaaagatacctgtatgatcggctggataagttgctgatagattaactgtgcgtcgtatatctgcatcagcgtttccgatgagccgttaatcatcgtcttttcactaaacgagacaagagcgggtagcaattcagtatatgcgttatcaatatatttttcgtatgatgtatataatttaatcgatgttattcgattgacgattttttcagccataaaaatccctcctaatatatcctatttactaaatagtaaataatgacccaggttcaatttgaggcaataatgaaaaataaaactcttgataaatttatgactacacggcttgaaatcaagaagactaacgttaaaaccgttcatcttccggatggaacagccattgagatccctaagatgtcgtatcgtcattttgtaaagattaaaactctgaaagatgacccagttgcgatcatgcgattcatcattgatgacatcaaaccgcgtgaactaacagcagcggaaattgaatttgtgttgatccatatgtatgcacacaataacgctgattatgccaatacgcttaaagaaattgggctaaatcttgatgacctcaaaatctccgaaccttgctatgattttacgtttgacaatgtgcggttagtctttgacaaacccagcctgttaaatgctcaccttccgttcctcatcaaagaggcatatgttgacggtaagccagtagaattaactgaggataaacgagacgaattaattaattgcctgtaccgattcgaatatgatcaggtatcgcgtggtgtcctccaggaagtatacattattcatgaggggaaaaccatcaaagggcttaacatcattggtgaatgataatggctaactcttatttcaacgaagaacaaaagaaaaagtttctgaacagaaacaacaacaaacaaccagcggtcaccaaagtaacagcctcccttgatgctgaaagcgcccgtgacctaaaggaaatcaacgataacacccttgaaagtgcaatcaatactcttgatatcaaagaagggttgaaatcgttcgaagaaaaattccgtgacaaattcgcggggttcaaagaacaatacgaagaggataaaaaggaatcattagccgaacaactacctgatttcgtcggcccgatccgtcctatatccttaaccgatgataattcaaaaactgttgacaatacagtaaacgttaaccaaaatggtcagttcggtaagctggaagaaaacaccgaatctatttttcatgctattaacaaacttgttgatttatatgaaaatactgataagcataagccgcttcctgaaccagtggaagaacccgatccgtatgtagacactaagaaaaaacgcatcaatgatgatgaagacaaaagaagcaaaactctggatagcattgctaaaagtctggtttctattaaaggctttacatcgcagatccttagccgtttcattggttactctctggaagcaatggcaaagtttgctaaatggacgctccttattggttcgttaatctttacattcgatgtgttgcgcgtcacaatacgaaaatggttcgaagatatcctgaaagaaggggaatcctcaaaaaaactatttggtacatatctgggtaacgtaaaggctatcgtaacaaagatcgaagaaggtttgaacaactttaatatgaacaacttaggtgaatcacttcgtgacttgttcgttgagcctatgaagttattgggacaaactgtacaaacggcaatcactgagggtatcggtcgtcttattcaatcattgggtgaatcaactggtatagacagcattaccaatgccggacgcggaatgcagatcaccgctttacgtgataaacagaaatttggtcttgaattgactaaagaagatattcttatgatcaagaaacaggaactagaagaccaaaaagcggcattagaaaaagaagataaagctattgcagcacgtcatgcattaacaataactccttctcaaattcctaatggttctatctataaagttgctcctactgattatcaagaaagaaatcagaaaaccgtagatgctgataaagaacggcttgataatatgaagaaagcaacggaagaaatgcagaaacaatacgatttagctaaaagcagcgaagaggaagcacaaaaattagccgatgaggaaaacaaacgcaaccgcgcacgtatagaagaagcaaaaaggttagaacaagcgaggaaggaaggaaaacagccgccagaaggtgaagagaaaaagggtgatgatctgttgggtaaagcaaccaactatgctaactctgaaaatctggatgcagccgatatcaaatacattaacgatgaactgttggatcagcttgaaaaacgtcgtaatgaaggtaatctggacgatgtacagaaggatagaatctctgaccttatcgagcaattgcaaaacaagattgcagcccgtacagaatccagcaccccgatcgacgcacagccaccgttagcagcaaataaaccggatgctgataaagcaagcaacattcaggttaacaacaaaactgttaacaacaacgtaactcattcagtacaacgcacagagcataaaccgctcgtagcgctggcataaggaacatataatgaagttttctattattgatgacagtataaacactctcaaaaatattaaaaatcgcggtatcccctctgggggtgccgcaatcacagaatcagtattaaagcaaactatcgttaccgccgaatttccggcccaacgtgcagcaggtatcgataacgcttataatgcttcgagtctgtataataacggccttctgttcactgcatatgattttaatggtgttggtagtaaagacaactatcgttcattacgtcaggcagcacagaacccaaaacaaatactatcatctgcgacgggtaatgttaagtacaaacaagtgttgaatagttctattggtactatggaacctgtttgccagatcctgctaccgcgaagcctgaacgataacgaagtaaacagccaccgctatcaagatgcaaacgatagtttcttaaccaaagggttgagccgtgttgtttcaaacatggtatggggcgctgtagaatccatttcaggcggtattatggcagaccgaagagaagcccttgatgttggtactaaagccgctttccagggttctgacaagcgaacaaagatgtattacaatacattcgtgatcgaaagccgtaatgatttgctggaactgattaaaatctactatctgtttactgttctgggatatggtacaacttctggcggtactgctaaagaggttgctgcattggttaaacagtattacggtgttctgggtgctaaaaccgctaacgcaattagcccttccagtaacccagtaacagcgtcagattttgataatagtctgggtaatgacgtggttgatttcatttcaaacgtagaggttattaaatcgcctcctgtctggtttattcgtgatttccagtctggggattccttgcgtttacctcattcaacctttgggccagcaggtattaccagtgttcgctttggtcgttctattgataatattgtaaatacattaagagaatcaccaaataccccgatctcacttgaggtcgaaattcaatttatggaactgatcgatatgcgtcaggattctatttttgatacaaattactaaggagatatgatgttttacaacgtagatgaatttttatcaggtatggctaatcgcgattttcagcgtagcaacctgtttagcgttgtatttgcaaccagccctgcatcacgtatccttgacaacacgatcggtagtattcgagatactttgattgatggatctattagttctatcaacgcaaacaacccgaacgaattcattaatgctatcactggcggtgtgagtaaattgtttagttacaccgtcgataaggcgattatgtcgctgaacaaaacaggatttagcaaaatcatcggggcaattagcccccgtttgattacttccctgtttggtgatagcatgtatggacaactgctatctgaattccgtgatgaaatgatgtataatatgggtttaagcattatgggagttaacctccctggtaaatccattgggtacgaatacgtttataatggtggcgtacctcaaatcagattcactcgccctgagaatggggaattgtcattgacgttccgcaccgattcagaagcccgtaacctgaaaatctttaacgaatggatttccgctattcgcgatgatgtaacaggacaatacgccttcattgatgaagtgacaagtactattcaggttaacttacacgatcgtgatggttcaccgcatacaacatacgtatttcagaagtgcttgcccgtcaaaatcagtaacagtgaattgagctatgagaacaacaacgaaatctggacatttactgttgattttgcctataaaacatcatgggttgttgaggctgataaagaaggctgggaagggttcaaacaatccgtagaggaaggtttagccattgcagcacgtaccgcaattacaggacaataaaggggctacggccccttttgaggatcttatgtttgatattattcgagtaacattaccatcagggatcaaacgattccctatgtttacagttaaagaccagtttaaattaatgctgacccgtattgatatggaaggtcggccccttaaagagcaacaggaaatactggatgaagtgctggatctgctttatcctgggtattccaaaacagaacaggaatacattttcagccgggtgtattgtggttcgttcggtaaaaacgttatcaaggttgtgataggcggtaaaggtgggggccactccgaagccttcatggtgattaatgatattcaactagaaaatgaatacaagttgaatgatgaaatcacattagggtttaacttcccccgtacacgcaatacaagcgaagagttgtttcttgaatgtatcagttatgtaatatacaacgaacagcgctatgaatggacatcactaaccgaagaaacgaaagagaatattcttgatatcgtcgaacttgatgatgtcgaaaaaatcgttactatgctaacgaaatcggttgatgtgtctatgcgcggtaaatcatttagtggtatgttaaccctgttcaagatattgtttagtcgtggggatctggatgaatttgtgaagaccaactatctgctaaataaaaacggcctgaacctggaacctatcatgaatagtagcccaatggaaaggcaaatttatactgcattgcttgcagaagacttgaaaaaacaaggtgctgttaaatgagaaagcatgaatataaacacgttgagaaatataatgttgattatcgtcctctgacacatacagagtttacccccaatgcagattttatcaaaggggatgtttacctgtatcaaagagaatatcttttcattctggcacttctggaaagtaaaaatattgatacccgtcaactgttcatcaactgtgaagaatgtcaggaaagaatagaattccagcttaaacgcaatcaaatcatggttgaagatttcgacgataagctatacggcaatgacggaatcgcgctatctgttcaccctcgtaagactggtgatgaagagatccccgatcttatcgattacgtaatgatagacggcgaacagatcatgtggagtgattgtagcgacaaagataaagaaatggtgttggatgcaatcgactatgcaacctataaatcgatttctaccgccctggataagccagcagtggtcgcaaacattccggtaaggtgttcgtgtggacatagccatatcgtctctctgagaggcttacagcaatttttaaaggtggtctaaatgggtgtaaatctgaggttgctatatagcgatatagaacctaacatgcaacgagattggaataatgacgtagcggcctcaaaaggggccgcagcagtgagaaatagtttgattggtatcgtaaccacgatcaagggtacacgtccatttgatagtaactttggttgtgctattagtgatatgctgtttgagaacatgaaccctctgacagcggaatcaattagaacttctatcgtatctgcgatccggacatatgagcctagagtatataatctttctgttgaagttattccacagtatgatgataactcagtaacagtaaccatctattacagcatcattgatgacccggatgacgtagagcaaatcaaactacagctttccgcatcataacaaaaagccccttcctttcggttggggctttcttttagaattcaatgaatcccattagtgtttgatatcgcaattcaaacggggagatataactttgcatctggttttgatcggatatgatgtaataatacacctcatcattatcatcatatagcgcttctttgatgatacaatagcgatcggtttccacgttcacataaagagtatccatgtactttgtaactttggaaccctgtgaactgatctcgtgaatagcgttatctatgaacagtgacaatgcttgcatgaagttatcaaactcaccatattcacaacccataatagaaattgcggtgtattggtgccagcctttgattgtatctccacggcggatccatccaatttgtctacccccaatagatacacaccacactttaccaatagggctatagaaccgcacaacttcttttaataacagggacatgaccccgcattttgtataaggattcattttaacctcatttcatatcaagtagccatgaagggctagtttcaagcgaaatcgcagtatattcgtattttacagtataacctttgaaaccgaaaggaataattgcgttttcattgagatattttactttatgctttgcttcttcttcattcagagcagcacagactgttgtttgttcaacgttaccagcaggagaagtaaatttttcaatgatgatatatacgcagttcatcctattgtcctctttccattttttcaagtttcatcgtatccacttgcagttgaagtttaagaatacaacctttcgatatgttatacaagtagtcactaacgatttttgactttacctgatcgtaatcagaagataacgtaatccaatcatacatcgtttggtatgatggaagatacgtacattgttcttcttttgataacgctttaaatgattggtaatcggttggaggttccgaagcaattgcggttgtggtcataagactaagtgcaagtagtagatatttcataatgtattcctcattgttttcgatagaaccaatatagcaaaaagccccgaccgaagtcaagggctttttcatcaatgcaagaaagatttcacgtactgttcgatcttttcacgacatgtatcaactgaggtgctttccgcaattacggcatgacataacgcctcgcctccgacccagaaactcatcatgtactgaatatcacgaccttccatttctttttgatgcgctttgattcgatcgaaagcgttttcgattgtttcagtagcagtaagcatttcggattccccgtcaacctccgccagttccccatcgatcatttcgctttcgacttcttcccagtatactatcgttatcatgcattaccccagtggttaaccgtcgtaatccccgccacaattcacatcgccttcaatgaacagttcgcggttatcacgtaataaattatactttctttcgagttcaggcccgaacgcgtcggcgtcttcataccagctataattgtatcttccgcattcatcatcatattctggttcatcgccgcgttcattgaagtgaacaattttgatatcgtccatccccagttctttcaacttatcccagatatacgaaatctcaacgctatgggaaccgaacgcttccagtgagatcgtaccgttgctatcgacttgaggaataccccacttcgaacgagtatcatcggtgatcatatctattaatgactcaatattattctcaccgtagatatcagcaacttccttttctttaccagggcgaacaagtccgatcccgataataaagctactgcttgagctattgctcacaaacccagaacgaattttcatcgcatcaccatattaccaatcatgaatagagggattagcgcaaagacgataccccatagaatgaccttatcttcacgacggtcacacccatgatagataacacctccagcgaaaatcaatacaacaactgaaacgaacgcgaataaagaaatcatttgcgggtatccattctcatagaaacttctttcaggatcttattcagatcgtgaagcgcattttttacgttaccttcgttataggcaagcatatcctggtacagccctttcaagcaacgattgattacatatgctttttcagaaggtaacattgtaccagagcgattataatctatgaaaatatccctcatcgtgccgttgttaccaggtaatgacgggttgaagttaaccataccagacatcaaactatcaacatacacaacggttgtgttatcagaacgatacgcgccaccaactttaaaccagttgctgaacacatacggagattcccgcacttcgctcaaatcggttccgatttcatcgatgtttacacgaatgttgttaaaatacaccgattcatcaatagaaccaggacgccatacgatagcaccgttgttatttttgaatccgactacatcaacctgccagccgttatctgttaaccggacatcatcaacgacgatgaaatcaggtagctgtgaatgaaagccgatgttttcaggacgggaattacgaaacccatcacgattggagaaataaaggatgtcaccttgattcagttcgcatatattcataagatttttaaagtccaattcaagtaattccacaagtcacctcaaagccccctttcgggggcgagatctcattagagtttaacttctttttcttccagaacgattgtgcaatcaaatttcacatctttccagaattccgctgcaacgatatctgttgcggtaacgcttacgctggtttcttcaaaatccagatccgcaaaccatgcgtgtccgacgacaataccgtacattacacgactcaggcgattattaagggcgcgaacctctttaatagtttcctttgtctgcttatcaagatactcgatcaggtcattcttgtcaagcgcttcgatctctttagatacagtatcataagcccacagaatgatcaggtcgccattgttgagtttcttcttaccttcggcgcgttttgcaacggtagcagcaacagccggaagtgatgaaacgcctttgattttcacgttcagttctttcgacatgtaaacatcagtcgattctgtgcgctcaaccttcggagaaaagccgtaatcacggatcccttgctcagacaaccattcaccagccgcctcaccaaagcgctgtttaagcccttctgcgttgcgtaaaccaatcgcgttatcacggaagaacttcattaccttctgacggcctttcaggatttccagacggacgttatcagcaacaaattccttaccagaaataccgcgagtcatcgaacggttaaccagaggcagagaggtaaagtcaaccagtacagacatacggtcttcaccaattttagccagcggtttgatagtcagaccagaagcacgtaagtttttcagagtcgggatatcggtttccagcggaagtaccttaacgttaacgataccatctttaacaatggtaaagttacgcacttgtttggtttctactttttccggcaatccaaactctttttgtttgctttccggaatggttacgtaaccttgtagatccgtattgatagaaatgttcggacgggaactgttaccaaccaggtgtttcactgcaactttcgttgtggtttgggtaaattccggtttccatacttcatgcgctaccagttgcgccgccagtgctttacgttcttccggagtagaagcgtttgcaatctgttctgacagtttatccagtgtatcatcatctttctggacagtctgacggcctgtacgattgtacgcccagtgttcagaagacaggtcgatcactgtgtcggtttctgccagcagttcgagagcatcaaccagagtaaacgcgttttcatcaggaaccatgttgtaatcaacaccatccatcagacgtttagccggatcaacaaccgcttcggagatcatatctttagcgttggaataatcctgtttggtaaagcagttatcgtatgctttaatcagacgcacatcacccagctttttcagaactttccatgccagatctggattcatggtatgaagcgcatgatacagaaccacatacagaacctgttcaccttctgctgttgccggatcgaagccgtcaacgtcattgatcgcgttttcacccagcgcccaaatgtttttgatatgttccggaaccagaacaacaccatttgcagcattcaggacatacacacggccttcatccaggtagatcgcatgagttgcatcgccaactttgacttcaacacgtgcggaggtttgcgcggtaatgatttcatcaaatgcaggtacatacgcatcaaacccttcaacgaatttgtgtaatgcgttggttgcttccgccattttttccagcagaggacggtttacataataaccatattccaggaaagcaatgttgttaaacgtcaacggcagagtagaacacgctttcaggatgtcatcagtacgccagcagttatcataaccatcagtcaggaagatcagactgttcagattgccattatccgcttgcagatcggtagcgacttcaaccgccagttgcagaggttcaacgaagccagtacatccggtcggacgcagataacgatcgatagcatcattgattttgctcaggtcggatacagagctaaccttttcgcccacgaatacagaaccgaactgaccacggctggagaaatacagaatagatacggtatcatcctgcttaaccagcgttgccaggttgtttttcaggtgctgacgaatgcgcgggagttcgttatacatcgatccggatacgtcacaaacaaaaacgtggttagtcggggttggtttggctacggcgtttttgaattcaatgttagtgatcataattttctcatttataggtaaattttattaaaatttcgtttacttttttgctaatagtatctaatgcatcatcgcatccaaacttactactcaacaatgaaacaaaatcatccatcgttgttgtttgagactcgccaacgtcaaaagacagagcgtaggcaacaggatttttaatccttacgatttgaatagtatactcattcagatcgaaccgttcaagatattttcgcaaagaaaataaatcaatcggtactggtagagtttgactaaacgttatttcttcccccagttgataggggggcatttttacacagatttcgtattccatcagtgatgactcttcatagtgtgttccagattacggaaaatttgcccgtgttcaagctgtgattggaattctccgcattcatcagagtaagtaaattcataaatgaatacaccgttctgattgccaaatttagcgttgtactcttcatacaaccacatcttgatcagagcgtctttctcttctttttccagatcataccagtcacgcccatcataagcaagcgcaatttgaggattagaccgatatcgagtttctgcgctatcttcggtttcccattcataacgcttatcatcatagtatgattcgaaaccatcacccatatgaccacccaggtcgcggtgtacttgctgtacaacttcttccgctgtcgggcaagtcatccagctataaccacagttaggaacacaatcacccatcatttcgcggagattgttgatatcagtcggatccttcgggaaccgtacaataaagctacttgatgaactattgctcacaaaaccagaacggattttcatttgatttcctcaaattcaaaagcggtgaaatgttttctttcgtcatacccaacagtacaacgatgcgtttgctttccggtaaacccgtcaaacacagttacacaatagtaatgcaacgacggaagcggtgtatgtttaatgtatttgatcgcgacgttcaggtcaacagtagaacatacacaatcagacgtttgctcaaaacggtcatcaaaaatcaactcaatgctatagatgttcatctttcacttccttcatgtttttcataacctcttcaaaagttacggggatttcgttgtactgtagtgattcatcatcccatacatcgcgatgcccgaatgttgaactttttgcaatgattttttcattttcccatacatcaatagtaacatgatcaccaagataagggaaattaggaactttgttcagcgcatcaacgcagttttgcaatgattcagaaacatgggcaatttcagtgaattcataatcagcactataagaagctacgtaaatcatcaccaccccctaacgatgctaaccagcagtaaacccaggatccagaccacagcaaccgcacaaatacgggccattactacatttccgcgactagtccactccgcactaagaaacaagaggacaaaagttaacgcgtataaaaccatttcaataacttcggtaatcatataaacctcacgaaaaagcccctttcggggcttgtttaattaatgcccgaacacaccacgaatagactctgcgaatgcatacagttcaggatttttagctttcactgtttcgatttgctccagaatgtaatctggtttatatttcgcaccgaaccagcagtaagagaaagagcgatcccacatgaacacgttatagtattcaccgttgcgaacttcaaccatcacataaccaggattagaacccagcgggtaatctttcagaagattgaatttcgcgccagcaccagtacatccgttaaacaggtcattaaaagtcatggtatgttccttttgtcagtttcgtttcaacaaggtcactatactattctttgttatcctatgcaagcgcttttttgatttgttttgcaattgcttcgatcaccggaacagatacagagttacccgcttgtttgtacgcctgtgttttgctcttatgcatcttgaatgaatcaggaaatccttgcaaccggaaacactcgcgaggtgataacattcgagggttcttaccttcctgcaataccagacattgaacaccatccttatagtattgggctgttatcgtcccagtacacacagaatcaactgtaacggcctgatagccaaaccccttgccgtttgccttgtttcgttctttacgctctctaaagcccttccaggcacgatctgatatggtgtattgatcattatccggttcgagaatgtcaccgacccttgttggggtacgtggaggaacaggaaagctaaagaacaccggatcgcgaaagcagacaataaacacacgctctcttcgttgaggcaatccaaaatcttttgtattcattacctgataatggatatcgtatccttcgtcctgtaacagcctgtagatggttttaaacgtgttgcccttgtcatgggttaatagctggggaacattctcaaagaacagcacagagggctttttagcccgtataatgcggagtatttcaaagatgatagtaccgcgaggatctaacatgccctgttttaaccctgctttactgaacgcctgacaaggaaaccccgccaacaggatatcgtgatcgggtacatcgttttcatcaatggtgaatatatcaccctgaatattttcatcaccccagttatcagcatatgtttgttgtgcatgtttatcgatttcagacgttaaaaggcattcgaccccgccgaatgccttatcgaaaccgagcctcacgccaccaacaccagcgcaaaggtcaattattttcatacgtcgaaatcaacctcatcgattttgtatgattcttcgccaatatcagcccatagctgaatattcacactttttgcatcacgataaagagattgaccacaaagcccacctgtataacaagtttctgtaatctcgttaacttccaggcggaggctattgcgcataattttaacaacagccttttccattgcagaatccagggttttagtatcacccaatactacatctttaacgttcaaaataacatcactcattatcgccactccgtttcaattccgtgtttgtatgcgtcaacgcccagaggggtgatcactaaacacatatcagtatttttcgttggcgaactaaacgccattgatgcgtaacctttttgaatcagggcatcacgccctgatttactgggtacatcgttgaaatctaaatccaacattttcgacgagtatccgtaaagtttacacagaacatcaatttcagcgccggacaatttcggatatgtcatttgtagtacctcacaacatgttcagaatacacacgttcaatgaaatcattccagaaatcgcgatcaacttctttcggataaccagatacagccgccagcttttcaacttcacacatcgttgattctagcgcctcttgtacggttgcgaaaggaacaccgccagctttaaccattttcaaaaatgcgctatccggaagaggatacacaatatcaccttctttgaaaatctggatcaattgcataccaccgcgcaacgcatgagaaagagctttccagtcgatcccgttgttggcttctgcttgccgtgcgcgttccccgtattcatcccagagtttatacacggattttttcatttccgctacggtgatcgtagactggaatttacgccccagaacttcgtaaaattcctgacaacctgatttcagtgttttgtctgtaacgaatcgacaaaactcgttggtcgggaatcggttagaaatctcaccaactttgatgcgcttgccgtagttagattcatctacgttacccagcaatgatgtgccataccagtaatcaggaatcatcagtaacacatcgacaacttcacgtaatgcagccaggcgagaacctttaacgccatacttcgccgcttgcttacgaacataaccaaacaggccagttagttccgtagtgtagaagcgtgaacggttagcgcggagatattgccagatatcagagttagcgatcagtttgctatcatctgcatgaagcatatcaatcgccacggtgtcaccatcacatgcgaggctgataaacttttgcagactgtaaatctgacggtctacgtcattaacaccgttctttgagtttttatcgccagttgatgtatcgatagacttcttcgcagtgcctaacaggatttcgcgaggatgagggagatagatccctttgtagtctttatcgcttgttggtgtttccagtccgtacaggtgagaaccgaatacggtttccataatcattttcatcagaattcaacctttaatgtttttgcgatcccgcgcaattcagcggtagtaatatccggaatgtttgttccgtagctattcccaaatacttttttaatcttatcacacaaatcgcggcgatacaccatttctttgtattcttcttcgctacgatacagttgataacccatccacccctcagcccacccggaattgcgcttgattttaatattagtacaacaatcagacccatcttccggtcggaaagatgcatacaggtactgacgcgcaactttttgtacgtaaagggttttggggttgcgattttgtcgctggtcactacggatcccagcatcatacaacgtatcaccaactttcacatcacttaaatcaatcatttacgtctccaacaattagttttttcacagtagtgaacgggaacagacacgcccaacgtttctttactgcttctgttgtatgttatcacaatgaatcgattttcgccacccctaacacactccagatccaaaatctcgcgggttcctttcgtgttcatgtctgcaacatagtattcttcgttgttgacaatcactatatccgacataatcaagcgaggtttcatgcagcatacacctctgattcatcaatccattccagatcctgattgagtgattcaatcagctttttatcgcgtctggaaataacaacggtagaacctttttctgccttcgcgatgatatcaccagaagaagtgatgtattcaacctcataatcacggcgagggcttccgagtctgtcaccaactttaacagcacgtctaaccgattcatgagatttttcggtgaacactaatccatcacctacatgggtaacaataccatcaacagcagaacgagaattaacataaattttgctaatctccgccatgaaaacactatctctcagatatcgagcagtcactttatctaaacactgagaagatactttatctccgccaggatataccgagataatcattacatgaccctgaacacgggcggttcctactttatgcagaatgtaaaccgttgaaccatcagaatctttagatatcaagatcacactgaatgattctttgtgttgcttctgagtttctccacaggtaaaactcacgtccagaaaatcaccaactttaacagcacggggttttgctacttgttcacgagcactaataacagggatcataatcatttcctcacagtttcaaattcttcatcagatttccaatatacgttaaaattacgacaatcgtgttcggatgtcaacgtgtatttttcatttgttttttcgtcagtgataaccatagtttcattctcgatcgagttaacaccgtaaacgaaaacattctcaccacgtttgtttaaaaacgcatcacccttttcaatcaactgccaacaggtaacaggcaaaccacccggactaaccgggcgggtaacaagacaatagggatgtttaatcatttaaattcttccattgcataggaagtaagatctttgaaataccttgcggtgttgccttctgggttgtttgtaatctccatcaggataacagcactatcaactcctgctttcttagccatgaatgaaagggcttcggtagcaataatcgttgctttcataacatcagctttagaaacgttgattgtattcatttttcttccttttcattaatcacttggtatgtgtgtataatacaaaagccctcacgagaacgcaagggcttttttattaaatttcgtataaatctggattcacaataaccgcacataaaagatcatctatatgtgcggttattgttctaaggtttgcttagatgaatgtgctttcaagcaacccccgtaaaggcgtttactatctggaaatgatcatcgaagaattccccttgtcgttgcacgacctcatgcataggtagccagaacgcgtctgctgcatcatcagcaccgcccatgatacgaggcaatgaaccatcgttattaggttcgagcttgatatactgtgctacagtcggttttgagaagtacaccgaacgtttcggatgatcgaacagcatcgaattacggatagaaccacgaataaccttttcaggtactttaattcgtacttcttccagcaattcacggatcgcgcaatcaaggaacgtttcattaccgtttttgtgtccacccggaagcgccaacgcatctttaccaggcgcaaacttacgacgaattactaacacgttgttattacatacgaccactgaatcagccgtgcaacagttcagagaatccggatacggatattttttgaacttgtcaatctctcgttgccagtgcgcatcttcatgggacaaacgctggaattcttttgtttgtgtccattcatcgataaaggaaaccgtagtgctaggcgcatattttaacaaatcttcgtcccagccttcatgatgttcccagataattttgcgtaaattggtcgaggatagatcctgatctccaaccttcacaggttcaaccggaatatgattccatccgaatgctttaagccagtaagaatctttgtctttttcgtacccaacgatcgcaattcgatcatttcgagtttcatcgattgccatacgaacacgggatttccatttttcctcgttatagaggtaatccggaatgtgcgcgaatttgattctggctgcatcttcaacatcaagtttgcagatagaccagcgagtgatcattgcttgacgctgtttagcggtcaatgggtttaatgtgttcggatatgcataagcagaaccgatcagaatgtaaaccgtatcagcaacagcaagggcttcccttaccattttctcatgaccatagtgaaaaggttgaaaacgtccaattactacagctttatcatatttgtgtttcataacgtgctccacgtttaaaggttaatcataaaacagacgcaattattaaaacaccaaacaatccaccaatgaaaccaaagaatagtgaaatgagtattgtcaatacgatctgttttatgttcattatagtattctcgttttagatgtcaagcccccaaagagggggctttaaaacattatttacgagaatcgaaaatcactttacccgcataatccgaacccattacagtttgaggtacgccacctttatagcgggtagagtagttcatctgtacatccagttctttccagcggatcatttccggtgtaatggtgcgttgcagggcggcgttggcttctgcttctttcttcgctgcatacagacgggcatcagcatcacgttcgttagcgattgcagcgttttcacgcgcctggcgatcggcttccgcttgttttactgcttgtaatgaagtctgttctactttttgcagttcagctttagcagcgttaacctgttcttcgcggatcttcgtgttagttacctgttccatgataacttccggcagggtgatatcctgcaagaatacctgtttcacagtgtaaccgtaaggccgtgcataatcttctacttcctgctgaattgcgatttgcagttggttttggatcttcgcatcaaacaggtcttgcgcttttggtacggatttaccaaattcgcgaacagtggaaagcagtttttcagttacatacttatccagtgcctgatcctgattacccgcgttgatacggttgatcggtgctttgctaccgtcgaattgcagcattacggtcatatccacagtggatttaaatttatcctgggacggaacctgtaatttgtcgaacttcatcgcgatgtctttggtgctgaacgtatcaaacgttgccagcgggtttacaatgtggaaaccaggcagtacgggtttcggtgatactttacccatgaaggtttcagttttaaccgtaccgtcttgcacaatggtatacatgttaggcactaaccacagtgctgcgactacgcccagagcgatcagagaggttttcttcgggttgttcacgatagtgtttaagttcatcataatttccataagttgttgttcaattcgatagttattctatcatcacatttcacgctgtcaaactatttttaagaaagttttgtcagcttgtagattgtttgatagcacaagcccttaatctcgtccaggatgttcttcaaagaactatctactgattcgtagatctcgtttgcttcgttggctattttacggagatacgccaccgtgtcaagcacattttcggtttttagcacaggtttgtatcttcccgtgattcctatgtggatttcggtgaatttatcaaccaaatcctgcatatcttcgtaaaaaccctcatatgctttatgttgtgagtatgaacctgttgcaaaatgtgcgctatgcatataggtaacggacataaggcacatgccaataaaggcatctatcttgcttgagttctcagattctgtaatttgtttaaatgattgcatgatgatccctttatgaacgatggatacttgcaaactcatacgcgaccctaatccctagctttgcgcattcggattcagatcggcattgtttttggcgccattttcgttccatgtagttgtagaatagttcgcttgtatttacgctgggagggatcgttgtgatgtatacttgaagggccgcattgatataatcgtcaaattctttctgaaccggacggtcggcggcgtgtgttgtgggtgtcatcatcaacaatccaaacaacacagccattgatatgcgtttaatgttcataacaattactcttttactcatagacccactataggtctactcctgtatatatttatagcaaaaacgaggccgaagcctcgttataatatttttgttgtaaagtcaatcaagtaatgtcataccaacacaaacttctttcgaaagcgcgtattttgttcacgttttctacgttttcatcccaaccgatcacaccagctttcatacgtttcagttcctgacgtaaacgggtacgtacttttgaatcaattttctttactgcaatagaaagcattgcgttcagatcgccatgagctttgttaccgtcgcgacacagattattatcaaatcgaatgtatgcacatcctaatttgtgtttccagtcggttgagtgccaacgtaacccatccggatcaataccatgtttagcataataacgagaatactcttttacttcttctatcctttcgttagatgaacggtcacgaagaggattgtatttcttacggtaagtgcgactcataatgatctccttttgtttatgcttccactgtatcagggttgttctttagttgcaagtagtgttttcgacaaagtgaaacatatttgtcttctgccccgatctcaatctggtcgccattagcaacaaatttaccatttgcatcaatacgagcaacggtagttgctttctttccacaatgacaaaccccccgcaactccctgatctcatcagccagcgccagcaacatataagaaccttcgaacaagttcaactgaaaatcggttcttagtccataagtcattacgggtatatctaattcgtcaacaacccgacaaagatccatgacatttttcctggaaaggaattgcgcttcatccacaaacacgcaagaaaccagattcgggctgtctctataaaaatgattgttgtgaacatcataatacaagtccatatcaggcgtgatcatggtgcatgttgcttccaacccaatgcgcgaagagatactctgtttaccttctcgcgtatcaattgctggtttgtacatcaggatccgcataccgcgttcctggtagttgtatgcatcagtgagtaaacgagcactcttgccagcattcattgatgcataatgaaaatacagtttagccatttatcctctcaacaaaatctggggtattctggaattttccttccccttcatggtttttgcatgttttgtttgaacagtagatccaccaatcccactcatcataagggggtttggtaatgttcattacgcaaattaaagggaaatgacaatcccgacaacgaactttttctataatgtgtgcgttagccaattgaaaaccatcctttacccatgagtttttcattatgtcgcgcaagatactctttgatttctggcatccggatcgcagtgtcatactcttctttcgtcatggtatgatttgcgcaacccatacacccgcacacctgcgcgttacaccaacggagtgttccatatgtcgcaatcaccttcattgctttagctttgattttgtcagtcatgattataaccactcatttcgttatcttgtgcttgatgtatatcaagataccacatattgattttacttttcagttcgtccatttccttactcagacaattgtcaacgatacatagaacatcaacagtttctttacgctgcataatgttgatgttattcgctttcatcgcttgcgccaatgcattacaggttttaaccagtgcggcgcgttgtcctttgattacggtgatccgtttgttcgctttcttaatctcccgacctgctttgataggatccatcatgattaattcgccttacgaggatcgaaatgaacgacaatgatcgggtaatcaccagtcacctcattaataatgcgcttaatgagttcccagtcgcccccagcgaggccagcaccgattaaaggtgtgatgataggctttccagtcttaacggcgtcagcaagccctacagcctgtttaaaagcattgccgattgcgtcataatcgacacgcggcccaggtgtccagaaatcatattgagtatatgcattgaaaacaatgttgcctttttcgccaatgtaaacagaacaagttccgagcttatcacgggaaccttttaacgtattggcatcaacttgaaatgcaccaggaatacgatcgcggatttcgcgagcaataccagcgcccatattgcaatagcagttgcatccgtggatcaaatggccttcaccgttcagatacatattgacagcattacctttcacttctttaatgatcatttttatttttccgatatagtagggccacaacaaggcccatcaaaatcacaaggatccacaatacagtgaattgaacccctacgctcattttctcgctttccgttcacggcggcgatcttcttgatgacacatatataaaacaccaccaaaaattataaaaccgataacaacgcctataaagtatccagcactaaacatagtcatcatccccgcaatagtaacaaggcccagtgctctcatgcttaccagcattgtacgccaagaacaccacaaccgccgccataataataaaaatccagatagccattagtaaagtcctatgccagcattgaattcgtcaaccaaataagtacggaacttttcgcaccgttccttatttggcgcttgtttgcatagattcatcattggttcagactgcaaaaactctttttgtttcagcaacttaccgcgtttatacaggtgagcattttcctctccccacatataagcaacatctaactgttctgcgatcacttgcttacatactgcgacatctttgatatcacgattgttgcataactcatccaggcgagcatcacccgcgtgagcaaatccagcaaccagagttaaaagcagtgctaactttttcatgatgattccttattcatcctcttcgataggagtataataatgcgcattacagatatacgcaagaacttttttcagagacatatccgagaatgtcggatcctggtttcgtctcatcccactaccagtttcaacagcccaacgtttgttagctggattgtatgtcagccagtaacaatcccattcagacagagtatgttcgaacagatcgaaacgcttacgcccatttgcttgcggcctgacaaaaggttcaaccatttctaaagcggttaaaactcgattaaggtttgaaccgtcttcatccatcgcgatccgcaaacagtattggttaatgtccggatccataccatcgatacccagaccgatagattcgaaaaattttgttgccgcgtgataagacacactggaagaacgatattccaacatcacggggatcttttccccgtccttgacgttgttaatgatatcctgatcgatgagttcaatcaggtctcttttctctttaatcaacgtggaaatttcttcttgcagtggggctatctgtgcatgaagttcttttatccgttgatcaattacggtcacttcgaacgctaagtttctcattgtacccattccccgtttttgtcaatgtacatgatccaatcagcaaccgcccaatgggaagtattgcctttcggagtcgccacgatgtaggaaccagctttaaacagtacgcgtttagtttcgttcaggatcaggtcgctcataatgtattcctcatttaaccaaagtgaatcgtgattcataagcatcgttcgggcgctcatacacagtatccgaacttgtaatgacagtgtacacggtttctttcacaagatccatgattttctgtgattctccccagacattgatactaaaatacatcccatttttaggaataggattgtattccatatcataatacatatccatgagttcacaaatgaacaggcggcgctgttcgttatcatatgtgaaataaatgttaaaacaatcgagagatttactcaaagtaatctctttgataacgatgttgtcttgtttgctaaaatgatcgcggattgcttgcacacaacgcaacaggttagggtaatcatatttttgtgaaacaatgacttgatgtgaaacgctcataatgtattcctctcaattagatgcactcataataaaaaagcccccgaccgaagtcaagggctttttgtcaaatgatttgtttttcttctaacagcttcgcggttgtattaaccatacgagcataatcacgggcttctttctttgtatacttgaaaccagcgttatagctcgcaagcgcctttttcaagtcgcctttgtggtaatcaagccagtactccagttcatagatcgcatacttcgatccaccttgaagagtttcgagctttttgattactacgcgtttaggatatgacttatccattcgtgcgctggcgctacttgcggtaacttgccagcatccataagcgtgatggccttttttacctttaccgacattctcacatgcgcgagactcgatccagacaatagccgctaaatgataacctaaacgtttagccttatctttttctacaggttttgcagtcttcaaatcatagttgtgtccaactcgataagcatactccagaacctctttctgcttcggtgtgatattatccaaatccttgatgtaggatggagaatttttgtttgccggaggcttcacagtagccttttgtaaaggcaattgatgagtaggcaaatccgcaatgaaatcccctagcggatccgtcgcagcgttgccagaaaaagagcacaagaaaatgctggcagcaataataattttcttcattttaatacctatgttgcaaaaagagtggcaataatacaccccactttatatttatgcaactattttagatagttttcgcgtcacgtagtttatcgttgataaactcagcaatgttataatttgaaatagcctcgttaggatcgtatagtgcaatgatttcatctaacgataccataacggcatgtttaaagtagacgctccagctagtagtaaggatctcacttttgtcaaatccacaatcagggctgaacaatgcgcggtatttgtacccactgtatttcgtcagacgatttgtgctgtgcgcatcactggtgatcagaaaagtcccctggtgagtttccacgacgaaaaagtatccgaggcgttctttgttgtccagcatcttttcaaacttgcgatcggtttcttcgcgaacaatacgagaagtcagcatttccaacactttatcgtattcgggccaatcattctcgatcacgattgcatcaaacggtttcttaccattaatcccgcgcccgatctcgattttcgtgcaaatttcgttgaacgttttcaaatcttctggcgtcagttctttaagatcgctcaattttgctacataataacgtttttctagtttcatttatggaaacctcaattcaaaaataatttcacagagttaccacatttgggacatgtgataaattttttcacgacataatcagcagcagagaaaaatccattgtaaatcgattctctcttttgctgtatatcagatagttcatattctaacccacttttacagcaactgcaaacagtaatcagttttgggctatggataacagtaatcatatacacctcacaaaaagggggctttcgcccccatcattagaaattgtcttcgacaaacgccgcgagacgggaacgatacactgtatcaagaatgatatggcttgagtgttcgtattctttcagcttttcaacagcccatacaaacccgttgttaacggcagtgtttcgagggttgtcgatctgcttaatgttcccgcatagtatcagaagtgtgttctctccgcaacgagaaatgatagatttaatttcgtggttgctaaggttttgacattcatcaacaatcagcacagaacctttgcccggatccggatgtccgatactgcgaccacggaagtaatacaggctagggaattgcaccacccctttttcaatcaaaccttcaatgtatttttcagattccggattatccttaaacagaatgttcaggctagtaatacaaggttcgatagaaggccggagtttttcgcccaatgtaccaggaaggaagccgatttcacttgataacgggctatctgacttcacatacatcaagttagcgtaatgtccactattaaccaggtgcatagcaccggaaacagcaagcattgttttaccagaaccagcgccgcccataatggtagcaacatcgatttcattgctcataatggattcaacgaaagccgcttgcagagaatcacggggctgaatagctttcatgagtttgcgtttcatagcctgttcgtgcttaacaggtaagacattcaagcaaatctcatcagcagtcaccacacgcccgactaactcaccatttgaggtaatgtactggttaggataaaaatcttcgtcaggaagcgaactgtaagtgatttgagctacattatctgtatatcccaacacttctacggtatcccagaaatcagggatctctacgtaaccggaatacaatacatcgctatcttttaacgtatcgtcgccagtatactgttctaccttacacccacgggacattgcgatcagcaacatcataatatcgcgagtaactaaggttgcatcctgttgcatacaagtttcaatgattcgttcgtcttgcttgtcaagagcaaacgttttgtttccgacataatcaaccactttaagggtgatagtgtcagacagtgctgggtttgtcaggtttaaaggaatacctgatttcgtaatcgcatcatatgactgaccgaaaataacttttgacagaagccggatcgccaatcgtgcttcgtgcgctgttcgttctttcgttttcaggtgatctaattcacccatagtagcagaggtaataatgatttctgtaccaggttgagtgaatgaatagattgaataggggttactaatcaaaacattggtgtctaatacgtattttgacatacattaaccttatgtggtttcgttaaaaaatgcaccgaaaacctcttttgctttccggttataaacggattttgcttcttctggagtgttatagtaccccaaaaattttctttttccatctatgtttatctgcgctttgtacttcccattggctttatgataagaaacacctttcaaccctatactactgtttgagttacatttctttttcatcgcattttgctggttcgtcgctttctgtaaatttcttgctgtatctccattctcaacaccatatacatgatctacgataggaggaagataaccattctcaacgtaaaacactattcggtgtcgcaaatacatagaacctttaaaatgaattcgggaatactcgtttttgcttccggcttcacttccaggagacatagggccgcgctgaactttccaatacactttacctgtagatgtatcaacatctacaaaattcagaagagattcgatcccttgaatctcttcatgtatggttcttgatgaatagccatgacttttcattacatacccagcgaaattacgtgaatatatgctaatgggtgtctcttttgtacacaatgcatgattgtattatatacaatgtccatgcgttcattgtgtgtgagatcacactcatcaaaaataaggtttattgcctggtgctctattcgacgtccacggaaatgattaagaatcgcccctttactggtcaatacatcacatccggtagcaccgtgtagccgtttggcttcttgtgctgcatttaacgtatgcgctacgtaaatgttaagggaactatcggaacgtttcataaaatcaaacgcgcctttagtcttttgtgttcgtctacccagatccaacctggtttcaaataccataaaatcgttagggccgtaattatgcgttggttcttccaactctcgcataagatgcatcttacgacattcttcaattgtctttacataaaattcactattcatgttttacctttaaggggccaaagcccctttgttacgctaattccacatgcggggcatcaatgaattttgtttcgatcggaaggttcggatcatttttccagttgataccaaaacgcagtttaacacccagttcatcacctgcttgtttaacagcattcaggacaggcaaccacactttagggtttgtttgccagccttgaggcaatacgctaggatacagatccacagcatcacccgtgatgtgttttgagttcattgtttgagatacacccttacggacgttctcgcgctgttgttcaacagtacgcagaccttcacgtacaccaaaatcaacaggagatagttgcagagcacgttctacaactttcaccagttgaggtttaacacctttaaggttgttaaggcttttttgactgaatttaaacataaatcacctcttgtaaaaataccctgtttgggtacacagggtatttatggtttaagaggttcgataattaataatcgtaaagatcaccgaagcattcttcaaattcacgtttacgtttcatctgttcttcttttctctctttcatatcagaagggagacgatcttcattgacttcatcaatataagcctgtgcatcctcttttgttataaagaatgcatggaagttatatccgttgcgcccattcatactacggtcttcaagagagaactctgtgtggcagtcccagtcatcaaacagggtgatgcattttgcaaacagcccgataccgcgattcatataagggaaaccagtaacaataatcttgttacccatttccgccttttcgccattcacacaaaatacttcatacatgatcgcgcctggtttaacatctttcttaacagcacgtttttcaaaagcacttttcataatatattcctctcaattggtgtaactacagactactggtttattttctggatgtcaacaaggtttatcgttttttgacggaaaagttagagtgaacaaacgatcgtgaaggttgtctatccgttcacaagcctgtttcagtatggttttatcaccatcatttgttgtttcaatgcatccaagttcatcggcgtcaatgttcactacatcgctcatcaatgaagcaaacacgttagcatcaggatgtaacagttcttcgatttcggccttcatgccgtcgtgttcagaaaggatatcaataatatcgcgggttaaatctccctggtacgggaaccctgtttctaaatgattaatgatcctttgtgctttcgtaatcataattttacctacaaaaaagcccctttcggggctagttaattagagttcacagcaacggcacacaccgtattttgtaaatggagcatcaccgctaacgtaggcccagaaatcacatgcttcttcggcagtatcgaagattgcagcatcatagaacccgtgggcttcgttaccgttctcatcgatgaaaaccggagtccagatattaggattgaagcaatcgtcaacaacaacccaaccttctttagctttcattgcttctttgttggcttcgatgtgagctaagatttcgttcatgatgtccatttttctctcctaaagtgcgtttcgtttcgacatggctatagtctcataaccccgtatctacgtcaacacttatttgaagcgaattgtgctatttttgaaaaatagtccagagcacacagcaccttcaattttcacccctgtagggcttttagcaacgaaccctgttgcgtaggtgtctttctcatcacatgcgaaccaggcgtggcctgtgtacgtgatatcgctaaacccgttagcagtcagaatacgttcggcttctttctcatcggtgcatccggattgtgctaaaacgacaataactactaacaccaaagcaataatatatttcatgttaaactctttttaagttggttttactggcttcaatccagtacacgggatcagaatagttaccgcacatacccagtaacacagttgtacatcctaaatgatcggaaggtctcaatccatcaggatgaaaaggcaattcgttaacaccaatactggtagcaaaaagagcacctccagtactgtaaaatgttttgatatgatcgtatgcatcatcaggccactgaaaacgataagttttattgtcaatggttactgtatacatatcatattccgtaaacaacggatcttttccttgtgttgccccatacagagcgccgcgccattcaaccagatttgcttcaatgtcgcttacacaaatttcgttacccatacgcaaatcatgaaggatcccttcaatggtacgaatggccccactaagttcattagttaacatagagtttcctttaaatcggtttaatggttttcaggtgtagtttagcataaaaagaaccaaatgagttaccattatgatcaaatttatagttttcactcttccagtatttccccgatttcatcaggggaacacgcttcttacctgctgttatcgtttcaaccattccggtatgagtaaatgtcatgatataccctcttctttcagcacttcccagatcagtttatcaaggtgcatcaggttccacataaccgaatcataagaacccagtgagcgggagtaaatcactccccatgaacgataacttttctggaatgcttctgcactatctacatcatacggcatatcatcaccggatgcaatcaaaagtttaaggatcatcagactgttcagaagttttgaactagcgtcttgtgcttgtacttttgcacaataattttcaataatcgcttttgcctttggttcggtgatgcgtccatttttgcatcgctctttgtacacatacataagttcatcgattatttcttgcatataacgcctcccgttctactgctgataacccgcgaatgtagttctgtgattctctatgcgcatctgctacagcgcgtcctgctcgttccgacgccagtatataagtaacaacttcattacgaatgtgccataggtaatccatcattacaagatcttcttctgtatgaaaacctttaatgtcacactcgcagcaaatagcgtctctttccgatagtgccagttgcgcggattgcgcgttgattggcatcatactgtacttgtcgatcaaactatccaacgttcgcggtttcacaataccaactgttacaggaacaggacgaagagtaggtttatccgaataaatcatagtattcctcttcatcaagtctagatgtcagtttagcgataaagtcgaaaatgtgttgtgaaccatcttcaacataatgacggtatgcaagcaaagttgatacgtgacacatatcgaccgattcaactttgatgcttgatgcgatcattgtatcatcatttccatatccgtcaatatcacggagtaccatttcttcagtcgggaaacgctgaaggagtgacgcttcccgatccgataccagagcaactaagcgattatgtcgcgtgttgtacgataatattttcatttcaattccaccgcgtaaacatcaggttcaggggctttgtgtacgcgcatatctttaccgcataccgcataagccggacagttacgacaaccgttatgatccttattaccgatcagttcattacggaactgtttggttttcggatgttcccagatatccttaatgaaatcgttcgcttccgggacattcaaaccttcttcccaaccaccttcaacccagcgttcggtaaacgaacaagggaagaactcgcctttctcgttaatgtacgagctaaacatagttgcttcgcaatcttcggcatattgcttgtactgttcgaagtttgggtgtccttccatcgcttcaacaaaagcaggggctgaacagctatcgaaaccaaatcctacaccagaatcgaggcaatattcaacaagttttttatattgttcgcgggtaactgtgtcccagttcttgcctcgtcccttttgtttcagacccaggaatacgatcgcgttaacttgtttcaagcgcggatcattctttacagcatcaaccacgttaaacgcgtcatcataggttttagagctaaccatgaaatgaaggttgatttgctgttgtccggcttctgcaagattagccactgaattaaacgctacatcgaatccagcatgtttgtatactgataccgcaacagccccagcaacagccgctaaacgcgctgcaacgtcttttgatacatcagcaatagtaaggttaggtacaatgcctttagaacgcgcataggccatcatatcaaacatatcagggtttgtttgtccctgtgcatcagcaccgagggcgcattgtgttaaccagggcattttatcaatgatagatttgaatgtatcaagatccatattgaagccgttagggttattagacttgtagcagaaaccgcaaagtttaccagcagggccattgcatttagttgtgatctcgatatcgagaatttctgggaatggggcataggtaggatcagtttcaaacgatgttccccagcgagcaaactcaccagttttaacgttgaaattgtagttataccacttagagcgagcgtaacggatatcaccatcttgatagatgaacagggtaggagctttcagaacagtttgtgcgttattcataatataattctcaaaatctaacatgggattggaagacagcgcgagcgagactttcattatcaaacggtattgattggtgctgccctttgctatcgatgttaacgcgccaaaattcactagaacaattttcagtggagtagttcaacagcgttaccgttttattcttttccaaaaatacgcgtttgtcaatctctgttttgattacgtgttccatcattttacccaccgttgtttgcgttcgtcagccagttcttttttgtacaccttgatgtattcgccgttcaaggcacggagatttgaaaatacacgattgaaaagatttttcttttctttgtatgccggagacatacggatcgattcaatagtcatacccatttcatttttaggatacgctcttaactctgcgccgatctcatcaatccatttttggtactgatcgcgctgtgctttgtactgttcaaaagtcaacatgtccattttttatccccgtttcgtttcggtatgggtgtaagataacatcatcctacacccagcgcaagagttatttgtattccatgaagaattttattgcttcttctggcgtcataccgtcagagaaaaatccaaagaaagtacagtgatggtcgttgtatgaaatattcaaaggagatagtaaacttcgaacatgttcagcccacaaacgatattttttgctgaatggttgatctctcattcttcgtccccttgtgcgtagtattcacacactgcatcttctggggtgcagccgtccgagtaaagagcatacatcagatcttcgtcataatcagaagaacccagcatatgttgaacagagcgtttccatttgttgtaatctttttcgccctgggtttcgctgttttctgatttaagcatttcgtacatgttcatagaaatctcccgtagtcggttgcagcatcttccggatccgcatcaagttcgtacagttcgcgagctaatgcgctgggtttaatatcgcgccctaagtgggcgctaacattacgtagccatttcatatagggttcgaatttgttcattttatacgtaccgcgttaaaagcctggttccggagatcatacgctttttcaagctgttcagtagtgaacagaggactatcagtgttagtggtgaaactgcaaatggttttgttgtcggcgttgacttcttcgacaacgatttcataaccccagatcccgctatactcacatttcacgttccggtacttgatgtaaaccgcagcaacatcttcttttttgtagttccggcttttgtagatgatttccatgatttcctccttcgtttcgatgtgtgtacaataacagatcagggttatcgagttttagcaatttgtgctaattatgccattttcttagcgattttccaggaggctttgaacgccggaacgtcttcaatatcaatccagaaaccagatccgaaaccatcactatagcaagggcaaccgtcgcagtagttttcccaggtcatcacttcaccaccaacagaagcaccagtttccatagcacgtaatgcatcttcaactttttccagtttttcggcgttgtcgtcgtaaatgacaaagtaccatttaccgttgtattcgttacccagtttgattgattcgcgaacaagtttcatgatgatttcctttttgtctgtttcgtttctatgtgtgtaatataccacaaccagaatttaatgcaacatttattttgcttcgagttcaatatttttccatgttttcatcggaacccctatcgcatcccaaaacttaacatcttccgctgcaatcagagtaaagaagatcccagttttccagtatttcccgtttctgatttcgtttgcgatctcattcatctggtcgcaaaaatgttcagtccaactaacatcaccatcccaacgagttttcccgttgtacagagagaatatgaaactatcaatataagaagattttccggtagagatacccatcaaaacagccaggattgtgcgaactgcatataaattctgaaccttaacacttctcgttttaatagtcatttcatgattcctctgttttgtttcgatgaatgcaatataacaaaacccctcaccataggcaaggggtttttgcaaaaatcatcgtttgattggggtattatctataaccctttgaatttccgaacgcatcgtagaatactgacacaattcggtaagcgcccgatccaggtgcatcatagcgtaagaaaactcttttccgcatttgtcacatcgagcgtataaatgtaaatggatgcgcccgatcccatctacctgactatatttctggaatatgtaaggatctgcacctcgatagccagttgcttgatgcttacactctcgtttgaaccatgacattaataatatccttgtacgttgaagcgatcacataacaattttcttgtttggttagtatcgctttggatagaatgcaacatagcgctgatcatgtttaggttattttgcatcatttccgcgctcatgagaacttccatacgcgcacgtaagcgtttattttcttcttccaactcaaccatacggtcatatgctttgatgcgctctaagggcatatcaggacgctctttgagtacgcgagcacgttcaacctcacaagcatgatttgctttccagtggttcgattccgcttcaaatttattgaggcggcggatctcttcaaccagctttttgatcatgtgtggatccatcatgtcgatgaatttcatcaagcaattggattttgtttggttgtcagcaacagaccaagacgaattatacgtaaccgtaaacgtgcggcccatttcatcaacaaccccgatcttgttatcatcggtgattgcagccgcccatttctcccgcatggctgtacaggttccgctggctacactatgcaacttgtttaatgttgcgtcatcaaacacaatttcatcactcatatatgcctcacatagatttcaaaatacgcagaagtgcgttagtaaagatatcaggaacgcaaccaccaaacaacttatgattcatcagcgctaatttcatgctgtgattttcagtatatcgcccgttctggatcccccaggcaacgacattaccaggttcatgaataactaagttggtgagagtaacggtcatgcgctctttatcattgatagagaatgaatagcggtagccggatccgatgtcgccgtaaaggttaaggtctttcaatttcccttgctcatgcaagcgtttcatatgaactgcacatgcatggttaatagtcatttcgtcatccctagcccagtcatcaataccagaggtataacgaatattgaaatagttagtcagttcatttgatacgctcattagaaacctcacttttataaaattctttaccagtcccattacagctactgcatttgggggaacggttgttatcataccgccccgatccgttacatgcaacacatttccttaatttccagccatacacgaacctcatgtaataatcggttcgtgcggccttgcgttcatggaaattcatgctttgtaaacctgaaccaaccacatttcgatgttaggcgcgtaagtaacgtttaccttatgcatagtgcggtatttgtaagcggctttgtatgcatcgagttcagtcggaacacagaaagagaaaccgttatcatagcgttctgcgttagaaacttcacaaccaactacagcggcaatgtttttattcatgttcatgatgttttcctttctctgtttcgtttcgatgtgtgtaatataacaaagcccctgcacgaatgcaagggctttttgattattttggtaatttttcgatggttgctttcaactcattgattttattaaagagttcatcgctatatttcatcaactcactacggcgtttttcggcccacttgatcaggaattcatgagaatctacaccatacgtgtaaccttctgcactcagttgaatacgagcacgggaaccataatcaacagaactttgttcaatgagaaacttaaccgcatcaagcagggctaaatcttcatgacttaccatgattccttctgcctttggaagatccacaacttcatcctgaatgagttcacgacgggttgtttcttccagtgtttcatgattctggatcatcgtttcgaccggatcctttgccacggctggtttgttttcacctacttcttccaaaaacatcaacatccatccaggaattttagtccggaaagaactttgtacttcactggtgcatgaatttcccagaatgtggatcgcgttgccatgcatatcaactttattgatatagataacgttctgctgttcctgtcggttgctaccataagaaaggaagcggcgtaacgatgtgttatgaccatacttccctaaatcgatttcagccaggcaatcaatgatcccacggttagaaaccttgtaacgcttaccctgtttgaaaaataacgattcttccaggtgagtaggggtaaactcttcataaagaacatagaattctttaggaattttgcgctgaaccaagctcagtttacaattattagaaggaacaataacagcgtgaatgtttccttctgcgtcacacatagcttgcattacttgcggatagtaaagatggtctttcttgcaagtatagctatggatacgactctgccgttttttgaagtaccatttaccagtttcaaaaggcgctgttgtaaaattcattttgcattctcatacatagttaaaattgcttgcatatgttccggtgattgtggaacccctgcaaagttcactttcaaaaagaaattcaaccgatcttttatgttgcactcatcgagtccaagcgctggtaatgaaatgttttcaaaagcacgttgttcatgtctttccatttcaccccaaaacaaacgggaaccgttaggcatcggtattccaatttcattgttccagaatttcatgatagttgtcaagcgttgttttccgtcgatgacttctacccatcgagattcgttgaattcactatcaaccgcgatcgcgatgataccgcaaggaaacccagtaatcaaagtcttcatgaaagcatcttgctctttctgcttccacacgtagggccgctgataggacggattcagatccagatcgttgttcttgaaccagtgaatgtaactaccaaccatgatcgcatgatcgcgactttggaaagtttttaactcacgaatacggtttcttacaatttcgtctgtcattataaaatcaccatccagtatataatcgtaatcataaccgctacagtgaaacacattgcagcgtacacccgcgcattatgaacctgtgttttcaattctgcgatctcttgatccttttcgctttcaaactcttcgcgagtaccataatacccaggatcgttagcagttgccaatctaaccgcatctttttcaaccagcgttgcataaccgctttttatttgtgtcgccccgtaccatccaccccgatcgttgttaatgatcagatgatcgcctttttcgttatgctttgattcaccaacgacaataacccgcttaccattcataatatgatcctcaaaggggccgaagcccctattttgcgttcttctgtagataatctaacagatttccgctttgatgtaaatccaaaactttagaaaacttctctgcgtttctttcgtttgtgagttcgtcgaaatgccatacaccatcatcagctattaacgcgccaggtgatgaacctgtttctacatcacgggaaagcgcaagccccagagggtgtaagatttcgcggttaatgcgccaaacaaggcccatttcagatagagtattaaaatcgacgtatttcatattatgcctttggtttcacaccgtaggccaacataccaaaacgatgatcattatctgcatctttaaacagaacttcgttaccatcaatgcagatgacctttgcttccggatcgatgtatggaagcaaccacaaagggatcaggcgtaggccgctatgttcatcccagcgactgaaattgagttcttccagttcatcaagggaaagctcattaggatcgatataacggaaccatttggtatttttgaggcggtcggggaagtttacaatttcttcatagccgaattcagcactccatgaagagtaaatagtgacttcggatgctttggttaaaacagcatcgcgaattgatttgcagatatcgattaaagtcagttgattttccatgatatatttctcatcttgctaaaattttaggcagtagttgccccatcgttttacgtgcatgtgacggaatctgtgagatcgggacatatttaaaatcatccatttcacgtatagtccgtccgttcttaacgaaagttgatgcacaatagcattcttccgctactgggtaatcttgccctacatagaggaataaagcaaggttttttgttttcgtgtaatcgagaacacccaggctaaccaattcctccgcgaacacttcaaatcctgtttcttcgaagcattcgcggatcgccgcgtcaatatgagtttcgcccttttcaacatgccccttcggaatatcccaatggggcgtttcagtggcatggcccatcaacacggcaccatctttaacaaagataatacccgctgatagttccatttattcacccgcaaaagcgttatcaaatgcttcaagtgcgttgttagcgcgagcactggcttttgtctcaccagcatgaaggttttcgaagaaagtacgtttccacacttcacggcgactggattcatgttccagactgtttttgtgatcaccgcgaatctgttcttccatgtcataacggtacagatcgagttctgcgtttaatttctgttctaatgcctgtgcaaatacatgttcaatattcattttgtatagcctatttcagatttaaggttttcgagggtggagtgataaacaacattcccttcgtgtcgagtataccatacttttccgttctggttacactcattcattacattttcatctaaaccagggatcggcttcatgctgggagaaaacgcgatagacatcatttgttccgcactatcagcaaacccacaagggaaaacagatccagttggtttatcaagatacatcaactctactttagccatagatttcttcgaaatcctcacaatcaggcaaatacgtttcacagaaggtgcaaagcgtaaagaatgcaggttgacgaataccaggattatccggtagatacatccagaaggtgttagcaaacacgatgaatgttttcaggttttcggtggtaatttcgctaacaccatcatacccggattgattgatcgcgcgttgcagtggcacctcgtactgttcgcaatagtcggcataatgatcgcttgttacaaggccattagccattttaatcaaatcgacgattttcatgattttacatattccactttaacaggttttgcaacaaatttatctttggtgcgcccatgaccattacacaggtcacattctttgttgaaatctttcatatcttcgacccatccagaatctggcaacccagacggatatgcgttataacgaatggtttcataaccttttccgttgcatttcgggcaaacatgaggacgttcttttttagcagactctgccagttcgcgaagggtggtagaactaccataagcccgacacatgttttcaaagtcttttaaagtcattctataaacatcaatgacgttatattttttgccggatggtttagccataatatatttctcacttaaagaattttttgatgaaagagatagcaaggccgataccaaagaaaattaagtaaccttttccgtcaccgtgcgccaaaacatagagtgagctgccgtatgcgatgagttctgcgatgttcattaagtttctcatgatatcctcctttttctatattaagtatcttaccataatataaaccaaagtcaacaacaaagttttatcaacccacttatcaccagtcattagtaatcccctacaggttgagacgccgcaacactcaggatcttgaaagtgcaattgttccactcacaatacgtttttgcacagtgaacacttcctttcataacaaacccgtttgagaaaattaaccagtaaagtttcatgatagcctcctttgtttcgacaaggccaatataacaaagcccctgcactaatgcaagggcttttttcaatttttcaacatccaaagttgcggaggacaatctttagaagcgattagacgatccaagcgggacataacccgacgataaccgtcgtattcaaaattaatttttggtggaacgtagttgacctggattgtttttctgttagctaaagaaacatactcagggatcaccgttcgtaaccgtatagcgatcactggcttctcttcgccttcgttaaagaacatttgaacagttataggacaagcaaagattttaccatttacccgacgataaacaataacttcctgtgtcccttctgttttggccttcacagcgtaggttagaacataacacgaataatgatttgctagactcatcatgatatcgcgataagtttcaatatcttttttaatcgatactgaacggtctttaaagcgatctgaaatgtggtcagcagtagccgctaccttgattgtataccagtcacctaacgcgctagtaaacgcctcgctaacttcttttcgtacactgttaacaagatacattaaacgtgttctgttcatataatcctcactgatttttgaagtattcgatctgacgcaaacgcttttcagcggcggctttcgaatcgtattcaccaagttcttttgtgcgatcgtgattcaaaacaacccacttatcgccacgctgttcaatgtgttctgtaatatcttttaacgacttatccagatccagtgattcagcctcttcacagataatagtcaaatccacgggcagtgtcaacaaccttttcactccgctgatatcatcaagcatcgaatcgtatgcaagggttacgtgcggcttgtaatccggataatcgtatgttgcgccagcatcaatagaatctttgaaacggctatgcaggtattcagattccaggatccctacaatagtgctaccgtattttgtgtcccacttttcaacatcaaccagtttagcaggttctgtgatgtcctgttgcgggaacaaatcaaccgttttccggctgtatacgatcgttgtatgcatcttttcggctgaaacagcattctttgtgatacctaatgtcttttgaacatttttcaaagcctcacatgaagcctgatcgaatttagcacacatgtagataccaggatctacaacaggttttgtgatttcaagaaatgatttcataaaacaccccaataaaaaaggggccgaagcccctttgtaataaatttgtttttacgcttcttcgccaaaggcggcttcatcttccgcgactttttcgacttcaacggaagggatcagagcggataccgcgccaattaccgcttctggggttactggctggcttgcgtcaatacccagtaccgaacacaggtcggacagaagttgacgatgaacagagagttcactttctttttgcgcgataacttcgttcagatcgaatgcgcggcctttcagtacaagtacttcattttgcagtttttgaatatcagacattttattacccattgttaaaatttaaaagtatcgagcactttgctctttagttgtttcaaagtaccttcgttagtgatgatactatctccaggttgaggtgtcaaacctttttccgtggaatgttcatcaacaattccggtatcctttacaataaacacaaacttagcacctaagcgttttaggtatttgtattcgtgttcttgacgacagtcagtgaccagaagatggttgtattcgtcaccagtatatttattgacgaatctttccaacgtgtaacgaacccaaaccgtgttatcatacttgcatacgatatcagttccaaacacttgcatcaagcgtctgatactccagggagtatcgttactcataatcaggttatcaatatcatcaggactataaacaatattgtatccacgttctttgaggatttcaagcccgattttgaaaatatttagaacatcttcattagacatcacaagaggtttctctcgatcgcctttgtaaaaaatagcatccggatcagaatattgtccttcaatcatattgcgaatgtatggtttatcgtaaccatatcgctgcattgctattcttagcgttcttttgataccaaatgccagtgcttcacactgaacatcattgtacgcctcttgaataaatttagcaaccgtatctttaccagttcgcttttttccactaatcacataaatcattagctcattctcttttgagaagtgactacttttccgtcaatttcaacttccatatgaaggaagccaaaagttgccatacacgtaaccgcttcatcactatcgttagtataacccaattcaacctcacccaagtttgttgggaaggcaccataaaatctaaatgtggcgatcgttttcatctgggagttatccaggatatgcacagcgaatgattgcttaggatcatcccacgcaacagagttaaactcattgtaatcgtttgtgctcaacatccatatgtaaatcccaagatacgatctcatttcctcatcgactacaaagcggatcatcaaaggatcaaactcaaaagccgaaccaggtactttacctcgaaccatcatatttgcaggaatatcaactgctgggaggttcattgatggtagtgtaaccccttgaacttgtaaagtcaaacctttcatgtaactgttatcaggaatatcaacccgaaagtttgtaggtgagatttggtttaaaatcatttctgtagacataggatctcctttcctctatttagcggggaacgggatcaaagcggcctgacggggtaatataaaaatttgaagaaaatgcttgaccttttaaaatctttgatctataataattattaattaaaattttatcaaaaagatctaacaagatcaagtaaaatttaataaataatttatcaaaaaattttagatctgatcttgaattcataaattttatgatctataatatattaatattttattttatcataaatttttatgaagatcaatacttagatctaataaattttatgctttttctgaaaacttttcctttaccccgtcactaaatactggtactatgttcccatattggaaatcaggaaaaacaaaatgactcacttgaaaaaattcaaagaatttctgaccgaaggtaaaaccctcgctcgtaccgtagcacgtggtcaacgcgctaaaacttccgataaacattcaatcggttttcttcacttcaaacatggttctgatttcgaagttttagcaccggattctcacgatctggcatacttcggtaaaaacattgtacgtttgaaaggtatgactactggtaaagttcaagcggcttatgtcgattgggctaaaggtactgtttctttctacagtggcaatccggatgatgatctggatttcgacaaaccagaaaaattcaaagctgctactctgtatgaagaggcggaagaaaatctggatctgtataaccagttagcagaagatttcgaaatcgagatccctatggatgaagctctggtgaaaggtaaagtttacaaactcccaagcaacgatatgcgtcttctgtacactgggcgttctaaaactaaagcaagcggtgaatatgcagtgtttaccgtagtcgatgcttccggaaaacctcgcctggtatctggtaaaaaattcacccaggaatataaaggcgatatggtttctaaactagttctggttgaatccgaagatctgaatgaagcggctaaaggcattcgcgaaaaagttattgctgtgatggtgaaacgcgggtttaacgaaaaagatgcagaaaagatggttgacaaaaacctgaaagatgctatgaaagttagacctggtgcgacccctggcaaacttgcagaaatagttagcatcctgtaaaaataaagccccttcctttcggttggggctttttgattagtatttgctccagacttttttcgcgccgtaaggtttccctttggacataaattgctgagtcggtagccaaacagctttcgcccaatctttaggggcaatctctgctaatggtgatttgaggtgtgatggtagatatgctttgatcatttctgttgcgcctcgcatacctttcacgttaccccagttaattttaagcacggtcttgttagagaggcgtttagtggatccgtacccacgcttcaataactcttctaaaaactcctgtcgtgctctgggtggcgcatagtgcaagttcaaaccatagaacactaagttacccgctttcgatcttccggatcctaagaaaatgatcagtggaaatctatcccaatacggcagggtgtctttatattttgcatcatatgcaaacgtgtacaggcgacccgttgctggttttgccacacggtgtgttttgatactggttttgatgaaattaccaaaccattctgttgaatctttctgtcgctttgccgccgatacaccaacagtgatctttttcagactattacggaaatcgttgatgatctcgatcccgtgttttttacggtagtcattacgttttttacgggcttctgtctctgcggaacgtcgttcaatctcatcatcaatctgttttttgtaacgatgcattgactttgtgaacgttgcgtagtttaatccctcagaatcggcaaaacgtttagcagaaacacctttcgtttttgccttacggaatttgatccccagttcaacccaatcactcaatttgcgtttgggtggtgctttgggtttatcctcttccgcgatgatctcaaactcaaaaataaaactcatgtttccctccagggattactgacctcgccacccaaaaacttttttgagtgattcttctgttacgattttgaactgccagcctttttgacggcatagctcatttgcggctttccacttatcaatattaactgtataggtgtaaagagcatcaataaatttctttttattgtgtacgttgttgtttactggcttcggtggaggcatggtttctttaaggggcttaacctcccaaagatatgtagtaccattttccatttccacatagaaatccatgtaatagcgtcttctcttaccgtctgcattgcagaaatacgggatcactatacattcagaattccaacgttttacgtgtgggtttttatccagccacttcataacgtagcgctcccacgatgacctatacgtaatctttcgcggatcgcctttatacttctgtatgttttcgggtacaaacgaccctttatacgtctgtcttccagccattgcgtaaatcctaaatagaataatataacgtttagataggggaacttatcgtgctattttcatacttcccgcctgttgattacaaaggcacccagacaactgatattttccgagactatcgattttattttaatcgtgtgattggaaaatataaaacccgtagttaccagataacaggcacactacgacctgaacaacttgcagaatcattatatggaaaccagcaatactactggatcctgttgatgcttaactctgtttatgaccctttctatggttggatctccgatcaggaagccgcgtatcagtgcgctatacagcgttattctgaggttggcggtgaacaggttctgtatcacgtagatgaaaacaacaacaagtattataaccttgtcgaagaccccaataaccctggtcattggtatgacaaaggtgacaaaccaatgctgtatttacagtatcaaggtgtattagctcctgtagatatttatgaagatgcagtgttgcaaaatgaagcaaaacgaacaataaaaatcattagtccgtctgacatccaggcgtttctgaatgattttattaaagaaatggaaaaggctaactcatgaaattaggcggaaatttacactcccctttctttgatggggtggttgaaaacgttgatgatccgcgcgggttgggccgtgttcaagtccgtgtatttggacaacacccagcccaaaaacaaaaatccgatgcaatcggtgttcctgttgaagatttaccctggatgatgcctattcaggatattagaagcgctgcgatctctggtgtgggcttctctccaactggtatcactcgcggatcctttgttgttggttattggcgtgacaaatggcaccaagatggtatgataatcggtactgtcgctggtgaatatgtcgaacaaccagacacacagaaaggtttttgcgatcctatgggtgaataccctcgctatgttggtaacgatgttaactcccttgcattaggtggtttgaaaggcaaaggatcatcaagtgtcatcattcgtgattcaaacacaagcatagcagtaaacccagacgatcgcccactggatgagataccagaagataaccgccctgatacgggtggatttacgatcgaaaagatgctcaagcaggatgaggggatccgtacacgctggtatacagacagtgaaggatatccgacaatcgggatcgggcatttgcttatccgcgaaaagactcgcgacactgcaaaaattaacgctgcgatcagtaaagcggtaggtcgagaagtaacaaacgggacaatcacggcagaagaggtatcaaccttatttgctcaagatttagccaaagtaagatctgatattcagagaaccgctaacgtccgtgaagtgtatgtgaacctaaaccgtcctcgtcaaatggcgatcgaaaacatgtcgtttcaaatgggcgtcggtggtgttgctaaattcaccaataccctaaaagcgatgaaaaatgaagattggcaagcggcttataatggtcttcgaaattcactgtgggctagtcaaactccaggccgttcttctcgcgtgtctaaaatcgtcctcacgggcaaccttgaatcatatggggtgcaagtaccagatccggaagggcgctctctgagtgctgcttacgctgcgtataacggtgctacattgtcggctactagtccggaagatccgtttactcctggtgatacccgtgtgatgtttgaagaaccagcatcatcttataatgcggaatatccgtataacatggtgtttgaatcgagatccggacacattcaagaattcgatgataccccaggatacgaacgatataaccgtgttcacccagcagggagttacgaagaaattcgcccggatggaacccgcgttgttaaaatcgtaggggatgattatcagatcgtgatgcagggccggaaactcaacgttaaaggcaacttacaggtagttattgaaggcgatgcgttcatttacaacatgggtaacgttcaacaaacggttgatggtaacgtaactgaatttgttcgtggaaacgttcaacaaacggttgaaggtgagtacgttggcctgattaaaggcaatgctgaactaactgtaaacaaagatgcaacagttaacgttgatcagaatcttaccgcaaatgtgaaacagaatgcaaccgtggctgtaacagaagacgcaacggtcactgcaaaaaatgcgaaaattgagattgaagaaacgatggatatcggtgctaaagatatcaatatcaaagcaacgaataacacgtttattgattctggcgcattaacaaaaatcactggcggcaccgtccaagtggggtaattaaatgattatggattatgaatcaataattgatggaattatgcaaaattatcagcatccttgtgatgctgagatccccgctggctattatcggcgggttatctggcaagggcatacagaaaattatccggctgttggggttgagtgggataccgagataatcaaaatcggtactcatctttatactcaagaaccattcggacatagaagcacggatctacctgttgtcaattcaccaggaacagatccaaataccggacaatcaacagggatccttgttccaaagattggctattatttcaacactcaagcagaaattgatgcttacattacatctattggtgcaactaaaatcaatggtggtaatgattggtatggcgcggatctgtcaaaatcaaacctatacaaaaaccctggcgaactggctatgtataaggtcgaaaacagtggtgggtatctttccggaacaaaccctgtatgtgatgctcgcatacgtcagacgtataatcaggacactggcgcattcaccaatattgattattattggaatggtaatcgtatagcctatatgaagcatgatgaaacaggggcgcatcaatgcaaatatacgggtatgcaggttaacaccaacgcagatacaagcattcctcctgttcctcctgcaatgccttccacttatggggcattaccgagtgaattaagccgtgctgatatttcgtgcattccggcaactgttggtttcgcatatacaaatatcagtgatgctatgttacaggcatggaacgaaacccgtaatacgttcaagctacagtttaacatgttaacgggtgctgtacagaatggattcgggatcgcgacgatgtttgatggtttatccgtatcgatggaagaagtaatggcgggggcgctcgcattgtcacagcaagcatggcaaactgctatgaaagttttcagacaagtgattagcgctgcatttaacattatcggtggtgcatggggattgattaatcagttcttgcctcaagtaaccatcttaggtgttgcgatcaacatttacgatctggtgtttggtgataattctgttcagactttgaaagatgcgtttaatgcaatcatcaaatccggacaacaaacatatgaaaccgtcataaacgcaatatacggggccataggaagcgcatacaattactctgtggaatatgtcaaagctggcgctcgcgaccttgtggatgcgtgtagcgcgttatttgattggtgtttaacgatgttccaaaacggttgcgttgcattaatcgacttatacggtcggatcatgcaaacatgggctatccctccggaagtcccaaacccgttatggtctgcggtgctggctatccgtaacatcatgatgcaaatcaaaccacttgatataattctgggcggtaacttccctggattcactgcaatggatttgtatcaacaagcacaggaaaaagtcaaggcttttgttgatgagtcatacgaacagatccgagggctttatgaacaggggcaggaactttacaaaacgttaaaaaatcaaattttcgaacgtgatgcaattcagagaaaattcaaccagtacttaaactggatgtggggcgctgtaacagacgaagcaacagcggcttatcaatctgcattggatgctgcaaacgctgctgtagccgcaacacaggccgcgtatgacgctatacaggaacagattggatctctacaagatgcaatgaaagatacatacagcatggcgatggaagaattaaagaaattgcctttgatgagtacaataaacgagtttttaggcttctgtggtgtcgcatttgacgatcttctcaagtcatatgaaaatgcgattactggtgctcagtctctgtacaaaaatttcattgatagttcgcgatcgtttaaagatcactgcaaagtaatctataaccaaatttgtacgttggcgttgagtaaagtcacacaatatgtgaataaattgctgtctctcataggattagcaatcaactttggttcgattagtgtatgtgttccagtactgaaatactaaatagtcgaatgatcaagaggaatttataataatggctactgctaagactaagactgtcaaaaaacagattaaccaaatccccgatatctttatcgggggtactttcgaagaaattaaaacagatctgattgattggctgggtggacaagaagagtttaaggattacgatttttccggctcgcgaatgaacgtactgatcgaccttctgtcgtatgctactctttatattcagcagatgggtaacacagctctatttgaatcgtttattcgcacggctgcattgcgtagttctgttgtacagtctgctcaagaactgggatatatgccagattcgcgcacggctgcaagtacagcagttatgattacggctgctaacccactgaccccaacatcgatccgtatcccgcgcggtacaaaattcatcggtactgtaaagaatacagacagttattcttttgttgtatcagatgacgttgttatcgttcgtgatagtaataacaactatacatcaatgctgaacctggtgcaaggccgtttagttcgtactgaactaatttatgacggttcgagtatcctgatccgagatccaaacattgaccgtagtcaggtacgtttaactgtaaacggcgcacaatgggacgactggacaaacgaaagcattgtaaacgcaacaggcgcaagcacgatttactacatgcgtgaaactgttgatggacataccgaagtttatttcggtgaaggtgaagcaagtcaacaagtggcgggtggcgcactaaccgccgaatatatcgggggcttgaaacctgctaatggttcgactatcgttattgaatatctgtcaaccgatggggaagcggctaacggtgcaaaagattttatctatgtcgatacattaaccaatattagcatcacggcgattaaagagaacccaaccaacacccctgattatgtcggtgctgatggtggtggtgacccggaagatatcgagcgtattcgagaactagcccctgttatgcgtgaaacacaacgccgttgtgtaactgcatcggattatgaatccttcctgtctcacaggtttggatctatcatccaggcggtacagtgctttactgataacgaaaaacctggttatgctttcatttctgttaaaccaaagtcaggtttacgcctaacatcggtacagaaagaagatatgcaaacgtatctttcgaaatataacctcgcgacgatcaccccgtcgattatggatcctaactatctgtatattgtgcaatctgtaaaagtaacgtatgatatcagtaagttgacggaatcagaggaatggttacgcggtcaggttatttcgtcgatcgactcttactatactgacaacgttgaaattttcaacaaatcgttcagtgtatctaagatgttgacttatgtcgatcagtctgatacttctattatcggttcggaagcagatattaaattgctccgtgaaattgacaactattacagtgctcctatgtctgggatccatttcttgaaccaggtggaatcgaaatcaatcatttccagtacgttcaagttcaccaacgaagaagacgaaagttatgttgttcgttatgcttctacggaaatggatcaggatggtaacgcaaaaattgtaataggcccgttcaaggatggggatatttcgatcgctgcttatacaggtgatgactttgaaaaattaacagatgcaggaacccgtaataaatattacgaagtaggatcggtgtctcattataccgatttcattagctttgatctgggcgttctgaacgtatccgccgatagtttcagtgctgcttatatcgagctaaccgcaaagcctctcgaagaaaccatttttactcgcgatggatcgttgatcgtgtttgaaaatgacctacgtcctcaatacaccacattgactatgaatcctatcagtcaataatcgttaacccctgtcttcggataggggtttttctttttataaatacgtgatatacataaccgcaaatttggagaaatataatgattaaagcgccttcgattacgagtttgcgcgttgataagctggctgctaacttcgtttaccttaaatgggatgatgttggcatggatttctattatgtggttgaattggcccgtagccgtgatatggacggaactattattccagacgaagagttaatctggacgcagttgggttatagctacgaaaacgaatggtttagcgatcaggttgccccaaatacacgttataaattccgtattcaaacaactcatgaagggtttgaaccttctgattgggtgatcagcgatgaattatggacgtttgatgagaacgcctacgcatatacaaccatgcgtgaattcacccctgctgattcgtttatcaatgaaaaattcgccaaaaacaatcgtgattacgtcgattttaacgatgatgttattatggcttctctgatggttgaggattttgtatactctcccctgtattctgatgtaagccagatcagcgataagatcctgaaacaagaaagctaccatgaaattcaagatcacatcgaacacgtttgtaatgatatagatcgcacgttcctggtatactcaaacggattgctttacctgtttgaacgttttcagaatatggctaaagtgtcaaatgacaaaggccaaacgtggtattactacaaagcattaaacgatcgtgtaggcaatccggtttcccgtaccgttgcttatcagagcgctaacactacgtatgtgttaggatacgatcgcatattttacgggcgcacgtcaacagatattcgttggtcttctgatgaagttcgtttttcttctgatgatgtaacgtttgcgaagctggggaaccagtcagggttagattttgatgttgattcatacaacacatatgcgcgtctaccgggaggagtgtcgaagtatgccgaagctatagcttgttctaatgaatggctctacgtggctgctaagaacgttatgcgccgtattgcgttacgtaacacaccaattgatactgatcctggttcgccgacctttggtgaacgtatttttgatgaagtttcatataccatcgtaccaggaaatgataaaattgttgttaaaaaaatggacgtgctgaatgaccgtctatacgttctggtaactggtgaagttaaaacggcgatgatggatccgactgtcaaggctaacgtgatcccatcaaacgatgctggcgtttatctgtgggatgagaatgcaaagacgtttacccgtgtttatggtaaaaccgaagatgaacgtttttatatcactcatgaatataccaatatgtcaaccaatggcgatgaagtttacatttctgttggtaactacaaatatccaggcactttgccagatccagatctggttgaaaagtatccggaagatgtgcattcagcggtgaaatacgatcttgttcctggttatactgcgagcatttcgattaactttgctacagttcgtgcaaatcagaacgatcctacagtatggaactttgggccgcaagagtactacaatgaagcaaactttagctggcatttccgcgataaggttagtacatggatcaccaatgataaccgtcctctggtggtttatccggaaaccctgtatactctggttactgatagcgcgtctcctgcgtcaacgattcgtgtaaaccatgaagtttgggacaaaggaacagttactatctacttgaataatatcaagtttactggttttacgaagtacacaaacggtgttctgttgtatcgctcaggtggtaggataattggattctatgaactgtcataccgcgcaagggatgaactcactattttctggaaacccgataacactttaatggtggcaagtctggttaatcaggaacgtgaaaacccatatacgccggatattgaacctggattaatcgaccctgatctgagtcacatgatcactcgttttgctccgcaaagctatctggacaaccaacagttcgaaaaatttggtgaatactatctgcaatacatttcgttgggaagcaacagttactataacaaattgctgaacctcatccggaacaagtatccgagagagaaaaacaacgtcgaatatttgtggtctgaaattaaccgccgtaacatttacctggataaaaccaaacgtgaggcagtggttagatttttcgaatcacgtgcaagcgatttctattcaacaaaagggattgaggcaagttatacgttcctgtttaaattgctgtataacgaagatgtttccgttgagatcgaaagctccaacagtctcgaatatgatattttggttagttcaacaaatatcagtcaggatatcgtaggccggacgatctatacaccaactggacgcgctaacgttacgtacatcgaacgtgaatatgaaaatggtcaattgcgttggtcaatgactctgcataatgctcaaggtaactttatcgaagggcaggttgtcaagtcagaaaaaaccaatttcaccggaatggtaattcgtggtgttcgcggtaaacaaatggctaacaactcgatcgactatatcaaccgtggacgatcttactatgtgatgaaaattcgttcaaatctaccgacttcccgttataaggatgacgtattgaggtttgttcatccggtaggatttggctttatgggtatcacgatgttaacagtattcatcaactctggtttgtcaatgactcataacgagacaatcattgatattctgagaaactaccgtttcgatagtggttatcctaagttctggcctgatcgcattgcgagtatggacggtaacggaaaccaacaattcgacctggttactggtgaacctctgtacaccgtacacccgcgagcgggggaaccttttgatgtacctccggaatatgacattgaagaaaaaccgcttaacggtgttcttccttctgcgcgacggttcgatcaaagtccgttgttcgattgctcaggcgttaaatattcacagttccgtaatttggtggataaacgactgaaagatgatgcaggaaacccacgtgatccaaatcctccatcacagattaaggtaggaaattaaatggcacaacaaaacttgtatcggtcggtaattactgcaaaattccgaaccgaaaacttgatgaacttcaaagatatgatcggcgatgccgccgatctaaacacgatttacatgtctattggacgaactgaatcgtggtcggataacgaatccgaccctaacttcgcccctccatatccaaatgatagcaccgatggtgttagtgatatgtggacgcatatgatcggggctactaaagttcctggtgatatgatagatgcaattttaccacgtaaagactggggtgatactcgttatccaaacccgaaaatcttttactttaacgatattgttgttgtaaacaccgcaccttataaccgtactgatccgggtaaaggttggatggtttatcgtgtggttgatgttcctgatatcggttcttgctccatttcgagcattaccggaaaacttgaatgtatcaggatcggcggtatctggagtccgtctcatgaatctagtgaacctccacgcggagaagctaacgggatcgacatgggagacggttataaatgggaatacctctacacaatcccgccagatgtcgtgatcaaccgctgtacaaatgaacatatcgtagttcctttccctggcgaactggaagaggatccggtacgttggggttatgataacgtgattcaatggtatccaggacaatacgatctagtgtatcggttgaaggtgaattcaatgcgttttcgtgcatacatggattctcttttcttcccgcaatctacgcttcctggtaacaaagggttccgtcagataagtattattgtaaacccgttgattaaaaaggcaagcccgaccgagcctgaaaagaaagcaactggtgattactataatgctaacgcgcttgaacctgattccggacgtatgatttacatggaaaacagacaacctattattcgctcccttgatcagactgaggaagtgagtattgtattcgaattctaaggaaaaacaatggcttaccaaacagcaaaaaaactaattgatgtcggtgaaatcggcaacccatcaacaggcgacccgctttatgatggtggtgttaaactgaacgaaatgatcaccaacgtttataatgcgtttggtgatgtgcgtatgctgtctgcaaacgaaggtgtcggtaacatggtgatccatgctaccggatactatcagaaactaccacgcacttactattcaagcacaccgatcgaactgggttccctgcacgacatagatacttcaacaggttcgattaccgttgttcttccttctggtaaggttggcgaaggttgctacttcataaatagtacgggtagtgtctctgttgatcgtcctatcgcgtttcgtcctcaagttggggatactatcgcgggggttgcagaccagttgtatatcacgtcaccttacacctttgtaaaaatctggtgtaccaaaaaagaaggtgcggtaacaaaatgggattattctgtagaatctatgttcggttctaaaacgatgcctgttgacactacggcgcttgtactgaaagcaaacccgactgctattcctatgttcggatatagcgaatttagcggggctaaggtgcttgtatacgcagaaaacttagctggtacagttaccaaaatggcagaagttttaatgaccgtggatcgtgtacacaaaacgatttattcaacggaatacgctattttgaaaaacagtgaagatgaaatgtttacattaaactttactgtcggtgctggtgatgtcgtatacgctaacgtgcaagcgatcaaagaagatcgaattaaattcacgattaaagcaatagatacgattaaatcagggatcgcgtcatgaaacaagaaattttaataggtcagattgtagacgatggtacaggcgattacctgcgtcgaggtggtcaaaagactaacaacaactttacagaattgtataacatgctgggggatggtgagatcccccatccagcaggtgcctggaaaacttttgcgggtacgacgctatcaccaaaatttggtgaatcatgggcgttgaataccagtgcaaacaaaatcaccgtaaacctcccgaaaggcggcgtaggcgattataacaaggttattcgtctgcgtgatgtgtggtcgcgttgggctaccaacaacgttagactgatccccgcaactggtgatactatcaaaggttccccaactcctaaagatctgtttaaagattttatggatgtggaattggtgtattgttctccgggccgttgggaatacgttgaaaacaaacagattgacaaaatcacaacttcggatctggcaacagtagcaaaagaaacgtatattgctactcagggacaaactgacttccctaacgtattcggtgttggtaatgaatacaacctgcaatcgttcgaagtttactatcgcggtaacttgctgttcatcgatgagaaagacggattcaatgctgataactcagactatggatcgattggttctgctcctggtgaactggttgcacttgatggtaattcagtacgtcttaaaaacccgtgtaacgctggtgacacgcttcaatttgttacctatctagatgggttagcaacatggcgatctagctatgaagcgtatgtgatgcgcatgtatcagactggcgatacttctctggaaaccgttcctggtgaacagtgggtaggtgatctgacaaccaaaaaagagtttacacctgctgaatttggtgtaaaccctcgcgtgttgattaaccctaactcgtttgaactgcttctcaacggtaaacaactggttaaaggcggtgacgctgactatccggcgttttcctgtgaaggtgcggaaggtgttgatgaaagtacgtgtgttggtaactctggtgtatgggttccgtcaggacaggattatagtttagtattcactgattctgtagtgacttcaatcaagtttgctcaggaactggaatccggcgacgttgtaacgatccgttggtttaacaatgatattggtactctgatggattgggaaggaactggcggtattaaagaaaaatctgataaggtttatctcaataacgaagaagaagttatattgacgaaccgtatcgaatataccgattataataacccttctcagaaaacaatgcgtaatacaggggaaacctatcaggggcgtattctggatattcaggctatgtttgatattatccacccgatcggaaccatctatgaaaacgcacataacccagcaaaccctgctgattatatgggatttggtggttggaaacgttacgcagaaggttatttcttggctggctggacatcaaatgtaacggatcctgatttcgcattaaacaataatgatttagatagtggtggtcaaccgagtcatacggcaggtggtactggtggcgatcgtggtacagaaatcaaaatcatcaacgttcctgaacttgtatcaaaagataaagttcttattgctgatgaaaatggtgctgtgatcattggtggttgtcagttagatcctgatgcttctggccctggatacactaaataccgtgaggatacattgaaagtgaatcatggtaacacattacctgataaaatcaaaactattccaccgtatatgactgcacatcgctggataagggttgcataatggcttacaaaaatatttcaaaaacaagggagggcgctcgcgtcctctctaaagaagcagattacttacagtatgatacttatggtaagttgcctctgatcggcggtaaacgttcgatcggcgaaccaaacattgaccaaacaaaacgcggtgttctgtatggaaacgtacaatccgcaattgatgacctgtatacgcttatcgagcaaatcccgattaacggcgttgttaccatgactgaggatgcccctccaatcgctgtacagcaggttgagagcgtttcttttgatggtattgtacagaacatcgattcagaccaagaacaggctgtagttcacgtgtacggctttcctttcatctttgataatgggactaacgccgcaactgtttgtgaaacggcatacaacaaatttactgaattcgttgcagcggaaaaatatttcgcagaagttaaccgcaaaggtgttgatggtacgatccttgaatgtcgatttattgatagtgttccgcacccggcaacaaatatctcagaaaacggtattcgtcaaatcggaactatcgacgtagccgcaaaaagtggctatggttcatgggttaagttgggttctggtttcttacctgatgttactccgcaagtaaccgtgtattacttcaaacgaattgcataaggataacacatgagtaacaatacaatcaaccacgtaagtgataaatccatttacgtgacatttgacccaacaggtactgattggcctgataccataaccaacgtacaagatgcgttggaaaaaataggtagttgggcgcgtactgatactgggcttcctatcgcaacaacttctgttcgtggtattgctcagatcgcaaccgaagctgatattgacgctggcacggataacactaagattgttactccgaaactgttagcatatcgtatgcagaaccctaaagcatcacaaaccgtatggggttatacgaagtattcgactgatgcggaatccacaaccgtaactaacgatgcatcgtctattactccgcgatctctgaactatgtgttcaataaccgcaaaggtacagaatcggtttggggttcttctaaaattgctaccactgcacaggcggttgctggtacagataacactgtaactatgactccgcttaaagtcaagcaagcaatcgcgtctctggttcctgttcagtcaagtgcgaccgaaagctcgcaaggtttggtacaactggcaacagttgcacaggttcaggctggtacgatccgtgaagggtatgcaatttcaccttatacgtttattcgtttaactgcaaatgaaagcaacctgggcgttattcgtattgcaacacaagcagaagcaaacgcgggtactgatgacaccaaagcgattactgcgaaaaaattaatcaatacccgtgcaactggatctcagttcggtgttgtcaaattagcaacaactgttggttatgtggcaaacactgcactttcttcaaacgctgcggtattacctagtgatcgaaatgcggtaattaacggttctctttatgagaatagcgcaatatataacaacaaatatcagacgtggacagatcttgattggcatttcccagtaggtgctattgtcatgactggttttcagactgaccacggtagtttgtatatttgtgatggtcgctcactgaataaaaataactatccgttactttttgagcgtataggttatacatttggtggtggcggtgattggtttaaccttccagattgtcgaggcgttgcagtacgtggtcatgaccgtgggcgtggactaaaccctaatcgtgggtatggtacatatgaaggcgatatgttgggctggcatgaacacccattacagcttatctaccagaacggcggtaatattcctaaatggcaagcagtttacgaactgaaaagcgccgaaaagaatgaccaaagcgctcgcgtatttgatgcttctataactaaagccactggtgtgggtggggaagaaacccgcatgaaaaacatcgcattaaactacgtaattcgtactcaatagaggttattaaatgatcatcgacaaattaaacccgttgccgaagatcccgtttgttgatggcgtcccagatgacgccacgactcaaacgaagattatttggatcaaaaacggtgaaactctggacggttcgccagataaagtgtcaaacactggtagtcttaaccgaactggtgtaaacatccagcagaacgcggttcagttagaacaaaataccatcacccataatgataaaatcaacgaagtaatcgatcaggttaacttgattactgaaaacattgatgctattggtgatgagagcgtaatcaaaaaagttaaccagttggatcaggatgttcgggcattaactttatctaacacccaaacacagaacaaggtagcacagttaaccctttctgtaaatgctcaaaacgatgaaattggtgaatacgatccagaaaaagatcctaaacaccgcacaattcgtaatgatatcatttacattaagaaagaagttggttcatatcctggatttaacgttgatggtgatgttgacccctcttctactggtactggccttaaataccgcgtactgagtaaccaacgtgctatttctatgcaggaaactcgcataaccaaactggaagatgattgggcgctttccgaagtaggacaactgacagaagaggtaaaagaacttcgtgctgaaatgggtgattctggtcttgccacaacccgatcaatctatgcgcgaatcaagatccttgaggatggttctattgtaatgcaaaatgaacttgatgcgattaatagttatatcggtcgcacgtcaggttcaaccagttccattaacgatcgtgtgaacagtctggaaaactccgttagttctctggctacacaaatcaatgatccggtaactggtatcactgcacaaattgcaaccattaacggtcaaatcggtacggcttctgctcagggtagtatccgttatgatattgcggaaactaaacgcagattgatggatatggaaatgattctgggtgaatccggcgatgatggattgcagggacaagttgcgatcttaactggtgacgttggtgaagattcagatcctaccagtatcaaaggccgtttgagtgttgttgagggtgaattacgcaccaacactagcgcactctgggaactgcaaggcgttgtaggtaactcttctagtggcctcgttgcaactagccagcagattaacaaagaaatctatggtgatggtgttagttccgatcctgttactcgcgctggtttgaaaacgacaacccgcaacctgttcactcaggtaggcgataacgcagaaggtaacgaaacgggcatttatgcactgattgccgaccttaataaacgtgttgaggatttagaagcgttgaacattgcacaggcacttgcagatcgcgtaactatcgaagatctgaatgctaaactggctctgtacatcaaagaagctgacgctgatctccgttatgagagcaaaaacccgcctctgtcattcggtactaacctaactggtgatactgaatatactactggcgacccattgtctctaagcgtaactatgactggtggcgtttctccgctgtcttatcagtggacgaagaacggcgtaaatgttggtactaatgctaacacatttaccattgattcgctacagccttctgattccggaacctacaaagtaacggtaactgatgcaagccataaagtcatcgtttctgatgaactggcgatcactgtcgcttaacgattaacaaggggcttcggccccttttgaggatctttatgattacgaacaacccagcacaattaaaagatgaaattctgcgccgcttaggtgctccgatcgtcaaaatcgaagtgacaacagatcaggtttatgactgcattcaacgagcattagacctatatgcagaatatcattacaatggatctaacaaagggtatatcattcttaccctggggccggataacccgaaaaatattttcgatctgagtaaagaacacattttcgcaattactaaagtgttgcgtactaacatgggttcccttgtatcgatggatggtactgcggtttatccgtggtttactgatttcctgatgggccttactggtggttctctgggcggtggtggttgtgcatcacgtacctacggaatgaacgcatatggcgcggatatgggctattttacccagatgatgagctatcagcggtcaatgcaagatctcctgtctccgcttccggattactggtataacgacgacacaggacagtttgcagtatacggaaccgttaaagatggtgatattgttgttatcgaagcaatgatcagatcctttgttgatgtacccagtatggtcggtaacgtctctggatacgctacagcgggttctgatggcgaagataagccaactatagcagatatatacaataacccctacaaagctgtctcaggcggtgtgaaggctggtcaaggtacaagcgttcagggttcatcctctgcgtataacaaccgttgggtgaaagattacgcaactgctcttgttaaagaggtaaacggtcaggtgctggctaagtttcagggtatgcaattgcctggtggtgttgctccggatggaacccgactgatacaggaagctatgcaagaaaaagaaaacctccgtcaagaacttctgttactgtctgatgcacttccagtgttgatgatgtaaggaggaaaaatgcaaaattgggatgaaagtctgtttgcacagttagaagatggttccggcgtcgatcggaacctaagacaagaagtaacaaacccgtatgttaactggtacaagtataaccctactcaacagttacatgattcactaacagccgaagcaattcaaatgaaatctccggatatgtattacgtccgtcgagaatttgttaatattgataaaattttgggcgaagaccgtgaatcgaagtttacaaaatcgtggaaaattgcagcatacatcgattcgtatgcaaactacgaagggcagagagacttttacagtaaattcggtatgatgtcaaacgacgaaatgacacttgtgatcaatcctcgtttatttgcacatcaaactgatggcgggatccctgttctgggagatttgatttatttccctatggataacagcctgtttgaaattacatggattgagtttgacccgttcttccagttcggcgatcgtcctcaacgtaaaatcaacctcgttaaatttatctatactggtgaagaattggatcctaaactgcaacgaaatgaagggattaacctttcccccgatgccgatctggatctcgaacctattcgaaatcttgatgggttggcggataccaatattgaacaatacgaagaagatcaagcctttgaagatgaaggtgatgaattcattgaatcgtttgatgttgttaacgggcgcggatcaccgttcgcacagttcccataaatataaccaggggaaaccctatacatgtagggtataggagaaatcttatacccgctttaacccatacaggaaaaagaaaatgtttggctactggtataatagttcgctgcgaaattatattgtcttgatgggttgtcttttcaatcacgtgcaagttaaacgcgttcgcggcgaacaagaaaaatttatcaaggttccgattacctacgcatcaaaagaaaaattcctggcatccatgaacaagctgaactatgcatacagtcaggaaaatgttgctaaaacggaaacaattttaccacgtatgaatctatccctcgttgatttgcagtataacgcaattcgtaaaacgggtatcgcggtaaaccaaaaaatgacgcagttacgcgcacctggaaaaacagtaacgcagtttaaccctgctccgtatcgtctcatgttcgaactgggagtgtatacccgttacgaagatgatgtgtttcagattatcgaacaaatactgccatacttccagccgcatttcaactgtcgtattacagaattacataaaaacgacattaaaatagaccgagatattaaaatatctctgcaatctgtttcccctgatacatcatttgaaggtgatgcaacgacacggcgacacattgaatggtctttaatgtttgaattacagggctacctatatccgcctgttaacgagattaaaggcgagatcagaacagtatacacggatttcttttccaatatgaacccgttggacaaagataattttgaatccgttgatgctcaggtggatccggttgatatgcctatacaggattacacgggagaagaatacattcaaacgtatgctaatgatatcccaattcctagcggtgatcaacctcctaaaccgaggggccaataatggaagaatttagcgtaaaacaactacttgatcttgaaaatctccctggtgctgaaactggggaagaaatggttgtatatgaaaaactcgaactcgttgatgtcgagtcacacccagcagatcgaaaacctgatttagaggaagactatgcacttgcgcgtaaaaccgcgcattacatgaatcagatgatcatggatatggcacaaattgccttgcataacgctaaaaactctgaatctccgagacacgttgaagtttttacaaccctgatgaatcagttaaacaattctaaccagggattgatgaaaattcataaagaaatgcgagaaattaccgaagaaacaacaaaaccaggatctgaaaaaggtaatggcggcggtaatgaaatgaacatagagaatgcaactgtatttgttggttcccctacggaattaatgcagaaatatggtagtgcatacgaaccaaaagaaggcttcattaatggtgaagcggtagaggtaaaccctgatggaaatggaaccgacgatcgatccgagtaaggaatcagatcacccaatcggattaatgcatcccgattatctgaaaaagaaaattgatgaatttgggatggagtggacgcaaagcgaacatgataaaaaatggtatccgacaaagtttagcgattacctaaaaattaacggtatccataaagttgatattcaagcaaaagacagttcaaactttgcgacgtataaaaacaaaggaaacaagaaaactcgatataacggaaacccaaacctgaaacgcgcgtacatccaaacgaaatggacgcaacagatgttgatggagtgggttaaatgtcgtgatgatattgtttattttgctgaaacatattgcgcgatcacccacattgactatggtacaattaaggttcagttgcgtgactatcagcgcgaaatgctgatcgaaatgcataaaaaccgtatggttgcctgtaacctgtctcgccagttgggtaaaacaaccgttgttgctatcttccttgcacactttgtgtgtttcaacgaggataaatatgttggcgttttggctcataaagcctctatgtctgcggaagttctggatcgtacaaaacaggcgattgaacttctccccgatttcttgcaacctggtatcgttgaatggaacaaaggttctattgaacttgataacaaatgtaaaattggtgcgtttgcatcttctcccgatgcggtgcgtggtaactccttcgcaatgatctacattgacgaatgtgcgtttattccaaactttattgatgcgtggttagcgattcagccagtaatttcttctggtcgtaaatcgaaaatccttatcacaacgacacctaacgggcttaaccacttctatgatatctggaacgctgctatagaaggaaaatccggcttcgtaccatacacggcgatctggacatcggttaaagagcgtttgtatacagacggtgatgatggcgtatttgatgacggctattcatggtcttcgaagatgatcgccagttcaagtaaagaagcatttttacaggaacattgtgctgaattcatgggaaccaacggaaccctgatcgctggctggaaattgtcaaaactctcatgggttgatactgatgaaacggaaactaatttttatcagtataaagctcctgtagagggacataaatatattgcggtactcgacccagccgaagggcgcggtcaggactatcacgcgatgcatattatagatattacatctatgccgtttgaacaggttgctgtatatcattcaaacaaaacatcgcaccttattttgcctgatgtcctgttacgttatcttatgatgtacaacgaagcatgggtttatatcgagctaaatagcacaggccactcagtggctaaatctttgttttctgagttggattacgataacgttatttgtgatagctataatgatttggggatgaaacaaagtaaacgatcgaaagcgattggatgctcaaccctaaaagacttgatagagaaagataaactcatcataaataacaaaaagacaatacttgaatttcgtactttctcagaaaaaggtgtttcgtgggctgcggaagaaggtttccatgacgatctcgttatggcgctggtttgctttgcatggctaacaacacaaatgaaattcgcagaattttgcgagaaagacgatttgcggttggcaaatgaggtattcgcacgtgagcgcgaactgctttatgaagatatgttatgtcctgttatcgtaacgagtggcgacgaaacaatatctgtcggccaacacggtatttcgtttatataaatttagaggaaacttaataatggctttaatctctccaggcattgaaactaaagaaacatcggtacaatctaccgttgttcgaaattcaactggtcgtgctgctattgttggtaaattttcatgggggccagcttaccagatccgtcagatttctaacgaagtcgaactggtaaactattttggctccccagacaatgacaccgctgattatttcatgaacgctgtaaactttttacagttcggtcaggatctgcgtgttgttcgtgtcgtcgataaagaagccgcaaaaaacgcaaccgcgatctataatcagatcaaaaccacgatcaccgctgctggttctaactatgcagtagacgatcagatcaaagttaaacacaataacgttgttattgaagaagatggtgttgttaccagcgttgatgatcagggtaaagtcctgtctgtgttcattccgagcactaagatcatcgcacacgctaaacaggttggtgtatatccggatctgtctagtggctggactacagaaatcgtttccagttcttctggtgtttctgctacgattacaatcgacggcgtagaagttgatccgggtattactctgctcaaccttgacaccgcaaaagaaactattcaggcaactgctttccagaaactttgcaccaaatacaagctaccgtctgttattgcaatttatcctggcgaaatgggtagcaccgtaacggttgaaattctgtctaaagctgcatacgattcttcggctgtcattaagtcttatccttctggtaagtctggtaaaaacagcggtcgcagttcgatgaactttggccctcagaatgataaccaatacgcgtttatcgttcgccgtggtggtattatccaagaaacgtttatcgtgtcaaccgctaaaggtgataaagatatctacggttcaacgatctacatggatgatttctttgcaaacggtggttcgcagtatctgtatggtacgtccctaaactggcctgtcggattctccggcgttctggaactgggcggcggtacttctgcaaactccactgtaggcgctgatgaactcatggctggttgggatatgttcgcagatcgtgaatctctgcatgttcctctgctgattgctggtgcttgtgctggcgaaactgccgaaatttcgtctactgtacagaaacacgctgtgtctatcggtgaaacccgttcagattgcgttgtattcgtttctccgccgcgttctgctctggttaatatcccactggctcaggccgttgataacctcgtagaatggcgtacaggctacaaaatcggtaatactaccccagttgataacaacatgaacgtaagttcaagttatgcgttcatcgacggtaactataagttccagtatgataaatacaacgatgttaaccgttggatcccgctcgcgggtgatatggctggcctctgtgtttataccgatcaggtatcgcaaccgtggatgtctccggctggctacaaccgtggtcaactgcgtaactgcatcaaactggctatcgaaccgactaacgcgcatcgcgattctatgtaccaggtacagattaacgcggttactggtttctctggtggtgctggatacattctgtacggtgataaaaccgcaacgactgttccaagcccgtttgaccgtatcaacgttcgtcgcttgttcaacatgatcaagaaagacattggcgataacgcaaaatataaactgtttgagaataacgatgatttcactcgttcttccttccgtatggatgcaggacagtatatgtctaacgttcgcgctctgggcggtgtatacgattaccgtgtggtttgtgacactacgaacaacacgccggatgttattgatcgcaatgagtttattgcatcaatctacgtcaaaccagcacgttctatcaactacatcacactgaacttcgtagcaacctcaactggtgcggatttcgatgagttgattggatcaacgtcagtataacatgtaaggggctgaaaagcccctataaatacacatagaggttagaaaatgcttactgatattgtacgcgcctttgaatccggtgatttcgcacgtccgaacctgttcgaagtagagatcccgtacctgggcaaaaactttaaattaaaatgtaaagccgctactatgccagcgtctaccgttgaaaaagttccggtaggttacatgaaccgcaaaattaacgttgctggtgaccgtacctatgatgactggacaatcacggtatataacgacgatgcacacacaacccgtgatgcaatcgtagcatggtcaaacatgctgcatggtatgggtgaagacattacaggggatatccctgcaaactacaaaaaaaccgctacggttaaacagaaaaaccgtaacgacgaagtaaccgccgaacataccatttatggcctgttcccgaccaacgtgggagaggttactttagactgggatagcaacaacgaagtgagcacttttgagtgtactttcgcgctagactggtgggtttaaacgctataaatacaggggtagcaataccccttatcattatttttcggagttgtaaatgaacttttttggattagacaatgtgttagggtttttcaaaaatttcgccaaacaggatgaaatggaatttgaagcccaattaaaagatgatacaggttcgattgcgcctccgaaaaataacgatggggcgcacgaaatcgaaacggacttatcaaaccagcgttattcttctgtgttccaacagttctattccggacaggatccgcgaattcagaacaaaacacagctaataaatacataccgtggtatcatgacatatccggaagtggaaaacgctgtttctgaaatcattaacgaagcgattgttaatgaacaaggaaaagatattgttacgatggatcttactaaaacgaattttagtaaaaatatccaagataagatcatggaagaactcgataccgtaatgaatattcacgatttcgataaccgaggatctcgtttattccgtgattggtatgttgattcgcgtatctatttccataaaatcatgcacaaaaatgaagctgacggcatcaaagaattgcgccagttagatccccgttgcatggaactgatccgagaatcggttacagaaaccctacccggtggggttaaaattttccgtggctatcgtgaatacttcgtatacaccgcaccgaaaaacggttatagctacaacggacagatttatagtcacaatgacaaggtaaaaattcctcgctctgcgattgtttacgctcatagcggccttgaagattgcgacaacaacattataggctacctgcaccgcgctgtcaagccagctaaccagttgcgtttgctggaagatgctatggtgatttaccgcattacccgtgcgcctgaacgtcgtgtgttctatatcgacgtaggtcagatgggtggccctaaagctacacagtacgtaaataacattgcacagggcttaaaaaaccgtgttgtatatgacgcgagcactggtaaagttaagaatcagcaaaataacctgtcaatgacagaggactattggctgatgcgtcgtgatggtaaagcagttaccgaagtttcaacgcttcccggtggcactgccttctctgatatcgacgatgttaaatggtttaaccgtaagctgtatgaagcgttacgtattccgttaagccgtatgcctcgcgatgatggcggtatccagttgggtaacgatggcggtattacccgcgacgaattgaactttagcaaatttattcgcgaattgcaaattcaattcaaccctgttcttgcggatccgttaaaaactaacttgatcgcgaagaaaatcattacagaagatgaatgggatgaaaacgtaagtaagattgcttttgtatatcagcaagattcttactattccgaaatcaaagatattgagattttggaacgccgtttaaacctgatgggccaacttgaaggggtggtcggcaaatatatctcccataaatacgtaatgaaagaagttctccggatgtctgatgaggaaattcaaagcgaagccaaacagatagaagaagaatcaaaagaagaacgttttaaaaatccagaagcggaagaggaaaacttttgatgaaagaatttatcgaagcaatcaaaagcggtaatctggtggaagctaaaaaaactttttactccatcatggaagaccgcacagaagcgcttcgtcacgaattacgcgttgaacttgccgaagctgtacgcatcgaaggcgaagaagacaaagaaaaagacgacgaaggcgctgataaagatgacgaaaagggcgataaaaagccagccgaggatgataaatccgataaagatgatgagtgaggtgtgtaaatgcaacttgacatcgaaatcaccgccgaagatctccaggaacatttagacgaagcgaaagcccgtgtagatattctgggtatcgatgaaggcacggttaaaatcatcgaaaatttggcggtcaccgaaccaaatttagcccttgctatgatggcggttgttgaaggtttaacacttgatgaggtaattgtcaagcatgttgattcccgtggcaacgtagaacgcctcaaagacaggaaaacccgtgagcgtaatgcgtatcagactaccggattaactaaatcccaacgtcgccagatcgcgcgtcgtgctctcaaaacaaaacgtgctaacccgtcaattgctactcgcgcacaacgtaagcgcaagaaagcattgcgtaaacgtgctgcactggggctataaatatgaatgaatcccaaatcaacgaaaacggcgatatgcttttaatcgaagaatggggtttaccttgcggtgacgtttcagaatctattttagaatctgttggggaatcaaaagacggtaaattgcggatcgaaggtattttccttcaagccgaaaaggttaaccgtaaccgtcgtttgtatcctaaaaacgtacttgaagaagcagttaacgattatattagaactcaagttaacacccgtcaagcattaggtgaaatgaatcaccctccgcgcccgaatgtggatccgcgaaatgcttgcatcctgattgaaaaattgtggtggaagggtaacgatgtttggggccgcgctgttgttgttgaaggcgacggtggtgatggtgacaaactggcggcgttgattcgtgctggttgggttcctggtgtttcttcccgtggattaggtaagctctccgattccggcaaaggctacggcgttgtacaaaagggctttaaattagctgtaggcgttgatgtcgtctgggggccaagcgcacctgatgcatatgttaagcctatagtggaaaatcagcaaagcaaaccgcttgttgagaataatagtgctgatgacgcttttctggcattgtccgagcgtttgaaaggtctataaatacattaaacaaaacaacaggaaaatcaaaaatgcttaaagaacaactgctggcggaagcccagaacctggatactccggtcgagttagacagcattttcgaatcagttgaactttctgatgacgtgaaagcgacattcaccactgtattcgaacaagctgtaaaagctggcgctgcaaaactcgctgaatcccacattacccagatcgcggaacgttccgacgaactggtcgaagctcaggtaactgaacgtgccgctgaaatcgaaactaagctgtacgaagatgctgataaatattttgcgcacatttccgaagaatggctgaaagaaaacaaagaagccgtttcccgtgacatcaaagccgacctgtttgaatccctgatcatgggcctcaaagaagttctggttgaacataacgttgtcattccggaagaacaggttgatgtagtcgccgaactggaagacgaactgactgagaatcagcaggaagttaaaaccctgtttgaagcgaatcaggaactgaccaaagaaatttcagaaatgaaacgcaatgcagtagtttcagagaaaactaaaggtttgaccgaatctcaggtcgaaaaagtagaatctctgattgaagggctggaatattccgcaaccttcgaaaataaactcagcgcaattgttgaaatggtagcaaccaaagctgaaaaacccgttgacgagtctgtaaatactccgcaaacgaaagatgactttgttccggtagtcgaaagtgttccggcagagaaatccaagatcaataaatatgtacaagcggcaaaagccctttcttaatttcaaaaggtaagaaacaatgtctaagaaaaacgaattgatggaaaaatggaacgatcttctggagtctcaggaaggcttaccggatatcgctaccaaatccaaaaaacaactgattgctgccattatggaagcacaggaaaaagacgcagaagttgatccggtttaccgcgacgagaaaatcgttgaatccttcggtggtttcctggcggaagctgaaattgctggtgaccacggttacgacgcaaccaaaatcgcttctggtaactcaagcggtgctatcaccaacatcggccctgctgtaatcggtatggttcgccgtgcgattcctaacctgatcgcgttcgatatctgcggtgttcagcctatgactggccctactggtcaggtgttcgctctccgcgcagtgtacggtaaagatccgctggcttccggtgctaaagaagcattccatccgatgttctccccggatagcatgtactccggtcagggcgcggctccgagcaacggctttaccaaactgacttctgctcaggctattgctgacggcgctattgtgttccacgatttcgttgaaactggtcgtgtgttcctccagaacgtttctggcgctccggttactgtaactggttctaccgacgatgctctggatgctgctgttatcgccgaacaggaaaaaggtactctggctgaaatttcttacggtatggctaccagtgtagcagaactgcaagaacagttcaacggttctactagcaacccgtggaacgaaatgggcttccgtatcgataagcaggttatcgaagcacgtagccgccaactgaaagcacagtactctgtagaactggctcaggatctccgcgctgttcacggtatggacgctgacgccgaactgtctgctattctggcaaccgaaatcatgctggaaatcaaccgcgaaatcgttgacatgatcaactataccgcacaggttggtaaaactggtttcactcagaccgttggctctaaagctggtgcgtttgacttccaggatccgattgatgttcgtggcgctcgttgggctggtgaaagctacaaagctctgctgattcagatcgacaaagaagcaaacgaaatcgcacgtcaaactggtcgtggtgctggtaacttcatcatcgcttcccgtaacgtggtttccgctctggctcgtatcgatagcggtatcactccggcaggtcaaggtctccagaagactctgaacgttgacaccactaaagcagtattcgctggtgttctgggtggcgtgtacaaagtatacatcgaccagtatgcacgtggtgattacttcaccgtgggttacaaaggcgataacgaaatggatgctggtatctactacgctccgtatgttgcgctgaccccgctgcgtggttctgatccgaagaacttccagccagtaatgggcttcaaaactcgttacggtgtaggtatcaacccgtttgcgaactctcgctctcaggctccgtccgaccgtatcacttctggtatgattaccaaagaaatgttcggtaaaaacgcatacttccgccgcgtgtatgtgaaaggcttataagttattgaaaaataacgatattaaagggaaccttcgggttccctttttcatttctataaatagtgaaaacaattgaggctatattatgaaacatattatctacaaaataacaaatttggttaataataaaatttatgttggtgctcattcaacagaagacatcaacgattcatacatgggttcaggggtggctataaaggcggctcagaggaagtatggtatcgataaatttataaaagaaatattacatatttttgatacccgtgaagaaatgtatgaaaaagaaagagagattgttaatctagaatttgttaataatccacatacatataatatgggtatcggtggtgatggtggccctatgttgggtatgtttcattcagaagagaagaaacaagaaatttccaagattactaaagagagaatgacagatgaagtaaaatctcgtctctctaaacttaaaaagggtaaaccacagtccaaagaatccaacaggaagcgctcagagacgttaaaagctaaatatatgaatggacgtatagacagagagtataaacctctcacagaagcgcacaaggcgaaattaggccgttctgtatcgatagatggagttgtatactcatccggatcggaggcggcaaaatcccttagtatgtcccactctggtttaaaatatcggattaatagcgacaaataccctacctggaaatttgttgcataaataccattatacactttacgcaggaacataaaatgagtgaaaaattttacacaattaacaagctggtgcgtcagtcacagctaccgcctggcctgtctaaaaaggttcttgatgaggcaaccggaacagaaacaattaacgtagctaatacccgtccggatctggtatctcttacccgtgcggtaaacaacctgatctacggtgaacttgtagcaattcaggaaactaatttgcctaccgcaaccctgtttggtgtgcgttatcgtaaccctaaaggcgatattacgttttccagcgctgctacctattccggtaagtatgcaagccgtgataacattccagttggtgcggttggtactgcctataccaaaggccaagtttttaaacatccgacaagcgatgtcgtatacgaagcaactgatagcgtaactctcgcaggtgctgatattgatgaagcaattatggtcgcagtattcagcaataaattacgcctggcaagcgaagccgcgccaacaagtcagtatgaaaccagcgaagatattagcacaacttctttcgaaatggatcgttggaatatcaacgttcgttcccgtaaattcaaaactgaaatgaccgtggaacttatgcaggatctggaagcaaaccaattcaacgcagaaaatgtgattgaagatgttctgggtactgttgccagcgaagaagtaaacaaagatatcatccagactctgatcaacgtatcacatcgttacaacgttgatggtgtggtaacaaatggcattttcgatgctacaaccgcatacactgcaaaggatgctccggctttaggtcgtttcctgtatcaattagtgtgtgaaatggggcaggaaatgaatagaacgacttcatttgaagctacctatgtcctggcctcttctcgcgttgtaagcgttctgtctgcgtctggttggatgcatgaaactgatgaaacccacccgttagcaacaggtcgacttaaaaacggttactatgtctatactgacaccaatacaccgtttgattacctgctgactggttgcaagtacgatctgggtgaaatggatcatgttggctctctgttctatacgccatacacagaagctgatcaggcaggttcgatcaagatttctgttgatcctcaatccttgcagcctaaagttgctattctgatgcgctacggtttatcggttaacccgtataccactgctgctaatgaaagacttgtgaaaggtgatgactgggtaaacctctcaggtaaatctaagatgagtcagattgtgggtatcaaacttcctaaactgggttgatagtattataacccaacggggataatattcaataggtggagtagggaaacttactccatcttttaataattataattaatattaaattagatcttgaatttataaatgatttatgataaaatttattaattataattattatagatcaaataatttttgaaatcaagtaaaaataaatttgattttataaattagattatgtataattattcttttaataatatattatattagatcaatttaaatttgactacaaattaatatagtatattatagatcaactgggtaaattggtgagtatgttatgagtttgaaattagaagatctgcaaaatgaacttgaaaaggatatgctgatagatcccctcaagttgcaatcagaatcagcggatatccctaagatttgggctaaatggcttcgttaccattcaaacgcgaagaaaaaactgatccaacttcatgctaaaaaagaagctgatgtgaaggatcgtatgttgtactacaccggaagacatgacaaagaaatgtgcgaagtggtgtatactgggactactgaaatcaaaatcgcgatcgctggggatccgaagattgtagaaaccaacaagctgatccagtattatgacatggtggtagatttcaccagcaaagcactggatatcgtcaaaaacaaaggatactctatcaaaaacatgttagagatccgtaaattagaaagtggtgcataatgtctactgaaaatgaaaaatgtgtagtgtgcaagtgtccggttccttctactggttttgtgactgaatccgggcgcgtgtgtagtactatctgtgctgactacatcgcagaaaaaacaaaaaacggcgagatcaacgaatccgatgatctgaatgaagttcaaatgttgctgtaggtacaatatgaaaaattattcgaacattgattttaatgaagttaatcatcttcttgatttgatggaaggttgctataatgaaatcaaggcaatccgcaaatcatgggaaatcgggtatggagaaggctaacatgaaagaaattgatttgggtatttttgatgaacgtccagatcttttagaatctgacgaacatcctgatttttaataatcataaatagtattgtagtagggcaagggcatgtttatcgatggatgcatttccataatcgaataaaccttatggcctatatagaatgcaatatatatccgtgattgagatttatctcaacctggaacctttaagctaacagtgtgcaacggcacggactactataactttagtacccgaaaggggcttgataaaagaatgctggatgataggcgtactcttttgcgccgtccgatggagtttaccttcggcggggtgattgataacataccttcgatcaagggcatgagtaaaaaagccagaatagtacctcactggctataatcaaatgtacgtgttgggctgattgcgtcccaaaattaaaaagccccttcctttcggttggggcttcttttttagaacttttcttcttctccgctttctagttcggcctttaattcttcggctcgacctttcagcgcatcgcgcatagaaatatcgtctgacggcgcaacatcaacttcttttacacgatttttgtaatatttttcaagctctttaaggccgtccatagtacggcaagaggcgaccttgctcatgaaatcatcaatagccgcctcataaagtcgaaaatcgttgaaactcttcattttaacctctaaatttcgatttgtttgatcacgtagtcaaacttttcttcattgtaaatgcgtactcgttcgattgcgtgtttcataccatagtttttgtatgaatatttatttttagcatttttggactttgccagcgttgctaagttatcaaccaaatcccaaacagtagcaagagatttagaatcatgtttacgcagtacgcgcccaattgactgtttgactataacagcagatttgcaaggatgtccgaagatgatgtgatgcaggttcttgacagaaatacctgtactcagtacaccaatagaaccgattacgatcagccccttcgttgattccgcgatccgtttcatttcgtttcgctcatcaatccccgtttccccagaaatgtatacaacgttgtcatatacctttttgagttgctcatacagccatttaccatgtttgatctgattgaacatcacaaacacgttttcatctttttcccttgccagtttcaacgccagcttacagatccatgcgttacgcctggtatgcgatgttatatacttgatttcgctttggtaatcagcccccttcattttcttaatctcatcctctttatatctcatgaagatggtattaattcgaaggttggtaacttgaccttcctgcatcaaccgatttgtatcaactggcttgaagatttgaccaaaagcgccaatgtattgcatcatgtttgctttgccttctttcagagaaccagaaaggccaaacttgaaaatacactgatccattgtgttgatgatcttctgtatgctttgtccggttgatttgtggcattcatccaccatcaaacacatgaactgctgaaaccactcaggaggcattttaacagccgattgccacgtagacacgtagatcaatgcattactgtttttagcagttcctgaacgtattccaagcattgcctcgcgaggtaaaaggcgatagttgacaatatcaccgatcatctgatcaacaagggcggttgttgggacaatgattagtactttgcctgtgtaattttccagacaccaacgagatatcaacccctgaataagagatttacccgctgacgttgggaggttaagcacagcacggcggtttttaatcgcatggaacaccgattgtttttgataccaatacggatcaatttgcttgtttccgtcgtatactgggtgttcttctaaccacttgtcaaaatctggctgggtaatttcttctgtttcgtggatcttaggatccatccagatagaatacccgcgagactccgcgaattttgttacaagataggctaaaccgtagggcagtttcccgttatagtccatcaagtatatgtagccgttccatccaccatatttgtattttgcctggtactgataacctggcggctggaagctgaaatagtcgcgcaattcatagactatgttagcctctgcctgaatctgcacatgactagtgttaaggaatttgacttcgatatccactatgtgtatcctatatacggtttatatgaatatttataggctaaataatgataaacattggagaactacaatgagtattgattacgaaaaggttgaaggtttcaaagccttagaacaaaaagaagccaaattacagcttgctacctacgcgcaagaaacgtttgatgtcaaactgaaccgtcagaagtcattcgaaaatatgcttgctgatctggaagctgccgtaccggaagaaaaaccggaactgttgatcgactcccctgatccggaaattgttacatacgaaggtgaaccatctgttcctgatgttgctccggaaattgccgaccagattgaaattgttcccgacgctctacaagctcctacaagcgattctgagacggtttctgatgaactggcatggatggaagggtttaccccgtctatcatcatgatgggccgctctgtttcgaatactggcttttatacgtgtccgtattggatctatgattggatgaaacaaaatccggattggtataagcaccctgatggttgtcctcattattcagcgcgtcaaaccctcaagtcactggcatggtacatgcaccgtgatgggatggttactgtacgcgaaaccagaaatagccagttcgacacgttcaaaaaataattttaaaaagtagttgaccttaccctgctgttcgagtatatttgtattcgaaggcgggggaatggctctcgcagtgaagaaggaaatacaaaatgaacatgatgaaaaatgcttactacccagttctgtttgtttggactaatggtgaagttaagaaaatcgtcaattctaaagctccttattacactgtaggtgaagcacttcgccacgctgcggaagcaaattatcctgttcatgccgaacctggttatgctcgttggaacggttctaaatgggttgctgatacctgggacaactacgaagaagaaagaatggagtgtgatcctgattacgtatctcgtcaaatggaagctcatatgattgcagatcgtagactggataatgaagctcgcggattctattgattaacaaggggctacggccccttttcttttaggtgaaatatgaacttaaatcacgaatgtttaaaagatttgagcgatggtaacgagattggtaacgttatttttcttgatatcgatggcgttctaaataatatgcggtgcatgaaatttggtgaacatatggacatcgaatgcgcacgacacttacgccggatagtgaatcacgctaattgtgatatcgtcatttcctctacgtggagaatcggcaacagtacccataatctacgtgaaatattttatccgtggggattgtatcggatcattggtaaaacttgcactaacttccctcatagtactggaatgcgtggtgatgaaatcaaggcatggatcgatactttcggatgtaaaaactatctcattcttgatgatgataccgatatgctttcttcacaaaaagaacattttattaaaactgatgggtttgttgggttgaccgaagaacaatccacttatgcgatccgtaacattttcggggttactactccgttttgtcctgaatgcaatgggtatggacgtgttaacggctacgacaaatgcggaacgtgtaacggtaaaatactccggctataaataccaataaacataagaggctaaatttatggcaattccttctgtaacaattagcgccaacaaaaacgaacttttgattggcgaaactttgaccttagaggttgaaactactgaactagatcctggtgatgtgtttctggcctatcgttggcaaaaagacggtgtagatattccaggcgcaaccgccgatacttacacaactacggttgacggtacaactgctggcgattataccctgatcttaaaacacggtgctgatgaagaatcagcaacagaaaccacgtctgatacaatcaccgtgaccacttattctgatgatcttgtttctaaatggacggttcacccgattccgtggcgtgataccagctttaccccgatcggttattgggtacttgatgaaattctgtatcaaaaagcacagggtaaagattggaaaactgattatgctgattacaagtatagtgaggaagtacaaacgatcctgaaagcgttcatggaaaacggtgaatgtgatatccaggattcacgaaacggctatattcataaaatgagtgaaatctaagaggctttaaatggcaactgaaaaatggactacggttcatcctattccgtggagaaataccagttttacatatcttccatactggctatacgatattatcgttgatgcttttgagaaaggcgacgactggcgcgattatgcggaagaaaaatataaattagagtttgatactctgaaagaggcgtttgaagattatggtgatattcatgtaatcgaatctcgtaatggtaaactggttagtctgttgtcattgactcctgctcctgaaccagatcctgaccaataaaataaggcaaacaatgaatacacttctttttgatttcgacgacactttagcagaattttctcaggctttttatgataagttcggtgtacgtccggaaggaacgccaaaggaacgatatgatgaaatggcggcttctttggtgcgtactgatttttataaaaaccttccccgtattcaggctgggattgacctccttcaatggagtttccaacgccgaatcggtgatcctgctactttgctgcttcgcgcggaagcggtcagccctctttgggttatgaaagaaaaactgaactatacagataagatttgcgctgaactggggatccatcgtctcgattttagtcgcattgactatccggaacagttcgcagaacatgcctatcgtggtgttctgatttcccgcaaccagaaacatcttgaaatctggaacaattctcatctagctaataaagttcctggtattttccttgcggaaaccctggaagaaaatattcagctagtcacggaagcgcttgcaaaggctaatcaataacaaaaaagggaaccgcaatggttccctttcttttacaatctttttaattcatcaagcgctgttttcttatcaccaacaaagaggattgctttacctcctgcttttctgaaaggcaacaccgcttttgcccgatcgtcaaacagaattcctttaccagcgaatgctgctttttcatggctacttttaacgtagtggaattctggaacgtaacccaatactttttgcaatgctttacgtttttgttcggcaacaccgtcagaattgaatttaccaacactggttagtattgctacatcaccaagtgttcttaaatgatggaataattcaaatccttctttgattggttccagattttcgtagaaatcagttttggcaatttttgctttgcactttttcaactcatcttctgtcatcatagagggttcgccatacattggcacaaatgaaccttcccagtcgaacaatacaccatccatatcaaagaaaaacttattcatatcaattcctcagtttgtgtatgcatactataatgtttaatcattaatgtcaaccccaagtgtcagttttcggtgcgtatgctgcaactttagccacaatttccttatccagttcagctacagatttctgaggcttaccacgggctttaactttgatgtagtttgacttaacaacaaacatccctttgttacttgatttcttgatctcgctatcaacaccaactttgttaaagctgatccaaatgtcgccgtccatatactgtttaagagaatcacccatgttcaggatcttcgccatagtaagggccgcgccttcgtgggtatccatgagaatttctttaggaactacacgatcgcgtttctggttctgctgcatagcaatatgcacatcgttcataacccatacgatatgtacgttttcttttttgtatcccagcgtttcgacatcacgcgcgatgcttgccagcttgctcatgccttttaacgttacgtcaaagatgaggttaggtttacgatcttctggtgctgccataataccggaataaacacggttttggtttttgttggaaatgttgaaaacgtcggcgatcacatgatggagggtagatacgttttctgggtttttgaggttcattgttttgacatcatgacccgtttgtttcttgatctctgctgcgagtttatcgctacccattacaagttttttcagggcgtcaacgtccagggtaataccttcgatgcctagcagtttttccagtgtgaaccctttacctgaaccagcaccgccagcaagaataacaacctgaccgaacttaggataagcacggcctccgaaggtgatcagcgcttcggttaaggtgctttctgtgaattgtttaaatgacttcatgtaaaattctccagtttattttctattatttattgacatgctttctgacagtggtgtatggttatggtgttcgacggataggccggaagaactttaaaccataaggtatatgatatgaaaatcaatttacatcgcttcattgtagaattttcccgcaaccgtgacatggactcttacaactattactcccgtgagattgaagatctttttgcggctcacgttggattccttcgccaccatacccctaaaatgcgtcctgaccacgatccgatatatagccctattacatggcaagcccctatcgatggttacgttgaagggatccggatcatgacgtttaacgcgatgtatggaaacgcgttgatccatatcgcacgtgagaaaagggccgaattccctaacggatggcgtattgatgaagtgattcaaaaccttatgcagttacgacgtgaatacaaagcgggtatgtgtctgcgtaatgaacagtatcagatgtataaaacgtatgcatatatctctaagcacctaattaattccatgttttacatcgttggtaatcatggttccgctatagatatcggttcttatgaaatcgtggcttatgctcgcgaacaaggaaaggccgctgcactgaaaatcattgagtctggtgctatcattcttaaccatcgcattgatactattgcttactatggtgatcaggttgaggttgaaggcgtacaccatgaacgattcaacaaagccgtatttactaaaaatggttatgcgtatggtaatgacattataacttctgcggttcctttcgttcgtctaactgttgaaggatttggagaaaggttgccttataaaccgtcagaagctcaaatgtgcgcggctgctgaaagaatagccagaaagcggaaaatgtataccgatgaatacctggcgtatgtcaacaaaacaaaagaagatgtagaccgagaaatttcttgcatggatttatccatttgatataatgtaagcatctttttaagggaggatacatgaaaacgatacattgcagaaatgaaaacgttgtttattatcacggttcgtgtactgctgctggtattgaaagcatgttattgcctccctgtgattctgatactctgtctgaaaagggcagaaagaaaaatttagaccgtgttttctttaccgctgatatcgggttagctcgtatatatgctggaagggccgcacgttctataggtggggatcctgttctgtacagggttgtgtgtccggttgatgttgtatgcatgaacgaagacaaaggcgcgagcgtttaccatgcagcatgggcgttttgtgaggaattatgaatgataaagtgttggcgtatctcgttttcttgctgggatatcgcttagaagtgatgggcgcgtattcatcaatgtatggtgatttaacggctatctggatggtcgggttaggggttgcttttacattcctttcctttgcaattgttaatgaatcggaaaaggatattgtatgaaactatatcatgtgatctactctggtgttttaggcattgacaaacaaatgttagttgatgtaatgtgtaaaaaactcgatgaacgaattggaaccagatacaaaaatcatgtatcggaaagtgttttcatcaacgttgaccatccaaatgacatggaagaaatggtcaatactcttgatgatcagcagatcccgtttgttgacaatttcaacatgagcgctggagtgtatacggtagtaacttttgttctaaaaaatgttgacagccgaaacgatagcgtgttgaatgtagttgcaaaaatcgattctaccaaaggaaaataatatgaaaattgtacaccgtagcatttccgaactgtctcaagccgaaaaagtgcaaatccatttcaaattcaatgatttgcgtaaaggttatgccgaaattgcccgtgaacatgggttagataacggcgatatttaccaggtagtacaggaaattgaacgtatccgcgcgttccgttctgcaaatctacctgttaaaaatgcaatgcgccgcgaagcgatcgaaatccatcgtaagcgtgtgtacaatttagaacgtgctaaacgtccgatgaagaaagaaaagaaacctcgcccgtttaaacgcgaacatcttaacacctctatggcgctggcgtttcaagatgcggggattatctgatgcgtaaatctgcgatggatcgttgggctagtattgctacttcaaacgtaaaaccaaatcaagccgctcctgatgtagaagcggttcgtaaagcaaaagaacctgagattgtggcccttagccccgaactcattgagcatcgccgccgtgcgtctgctattgaactggatctgcgtattgcgcgttcatacaatctcaagcatgaacacgccgcaaagaacaaccattcttttgaccttactctggaagattggaaagtattgatgacaactgaacgttgtcagtattcaggcaagatgtttagcaataaacccggtagcccgtatgcccgtacaatggaacgtattaatccacgtctgggatatacacaagaaaatacaatagcggttatcaatgctgctaatgctgaaaaatcaaatctagatgcattcgttaagggtgatgtcattctggatgaagtaaaagtgaagttgctgcgtaaagcactttatcaagtcgaaaaacgtgtgaaaatgaaaggttaaattatgtttaagaaatattcttctctgactaaccattatgaaggtaagttcatcaatggtgtaattatgaacgggcttactggcggtgtgtgggttgcgcgtgaaaagatccacggtgctaactttagctttatcaccgatgacggcgttaccgttacccccgcaaagcgtactgatgttgtgaagccagccgaagatttttatggctgttcagcagtagttgcaaagtattcaccagggatccgtaagatgtgggaaaccctcaaaaagaccggaacttatgatgatttggttattcaagtctacggtgaatttgcggggcgcggtgtacagaaagatgttgattacggcgaaaaagatttctacgtattcgatatccgtgtaaatggtgaattccttccggataacctgtgctcgcttatctctcgatctcatggcctgaaaatggccccgctgttgggatacggtacttttgaagagatcaaagaactgccgatcacgtttgaatctgtggtgaataaagcaaatagcggcattggtagcgataacacagtatatggcgaattcgtatatcctatcatggacgttgaagagggcaacattgcagaaggttttgtaatgaaacctgtttcacctgcttttatgccaaacggtgaacgcgttgcaatcaaatgcaaaacaaccaaattcactgagaagaaagcgaagaaagcaacccgctttaatgctccggtttcattgtcagaaaaagacaaaaaccaactcgatgagtttgtttgttaccttacagagaaccgtgtgaaaaacgttctttcgaaactggatctggcttcgatcactgctaaagatttcggtcgcattatgggcttaactgttcaggatgctatcgaagaaatcagccgtaatcacgggcctttcctcgaacagttcgaagacccagcaatggctaagaagctgtttgtaaccgaagcccaaaacatgattcgccctgtatggggcaaaatcctgaaccatgaattttaatcagattctggttgatgcaaaagcggctaccctgatcggtagccgtaaacctcctgaacgtatcgcaaacattgctgttaaaatcggacgtgctttgaacgaacgcgggatcagggcttattctggcggcgctcctggtatggatagtcattttctgtttgactataatccggataacagatgtataatccttcctgagaacggttttaacggccttttcgcaaacggaaaggatatcatcgactttcaagatttaaacacacagaaagccgctgacgaagccagaaaggtagcaggtaacttcgatacacagaatgaatacgttcaaagaaggtatgcacgaaacacgattcaagttcttcgtgaaaatcttgacaatccaactgattttgttttattttgggcggaagaacgtgaaggatgtgttaaaggtggaaccgcgatcgctgtaagattggctaggttgtacagggttccatgtttcaatctcttcaaagaaagtgtattgaacgatgtgtgtgatacgttagggatcaatatcaaacccccaacgttggattttttatggtaattgaacatgcgcccttacttcgtgaaacatacgaaagatgggctgttaataacgcaataggtgaaaatatgattcatgtacgtagtatcggtactgacggcgaaactccggtagaaggccgatcacccactctcgcagaacgagcaagagaaattatcaacgatcagaatactaagatgatcgaacatgcgcgggatacaatcacaaaaggtgttctgaaacacgcgacaaaacaaaaccttatctatgatatgaagcacgatatcggctcttgtctgggtattgaatgtactcgctatgcattccaacgagtttctgaatggttggaagaagaagggctaaaattcgatacagaagaaaaacgcaacgccgctaagatcacaaattctctggctagtaagtacaatcaaacgtatcgaaaccaggaagaacgcgaagttttcggtttcaacattcctgaaaggaaaacagatcgccgtgtaagtgaattcactttttacattagttggtaaaaaggtgttgacgggggttggttatagtagtattctaactcccgtagacaagacactaactcaaaaggataaacatcatggaaatcgtaatgaaagcaacttatgctggatattgcctggaagcaaaaggtgttgctaacaacggtaaaggattacgggccaatgttgaagcaatgctggatgaattacatgcaatgtacgaatacgacaacgtagcgggtagcgttcttatccaggcgttggaagttgatggtgttgattgtgctggttggtgggatgcttacattgactacaacgataaccgggtttacctgttgagcaacaaagattatttctaaggaaccactatgagcgatgaagctgaggctttagaagattgggctgattttgatgacgaagaagacggtgaatatttctgcgttaatcgtggtgcttataaagaccgtttagaactccgtaaacttttatcgggttcctctcaaatatcaggatccaaacgaaaaagtagtaaacaaaaagttcagtatagtgatggttctgtacgtgatgaaactgttgttgctgaattccgtggtcgggttatcacaaaagaaagacaaattgatgtaaagaacttgtatgaagtggctaaggctgctaaaataggttctgtgattgtttgtcctgtgtgcaaagaaaaacacacaaagacaacgtatcacaaagttttctgttcgaatggcagaaaaaccagtaaggattgtaagtctaaatatcacaatacaatccatcccgaacgactggatcgggtattttaaaataaacctaaaacgtggagtacgtttatgaacaacaaaactttcgaagaactgaacagcatcatcacttccgtagattcctataaggtttctcactggtcgcaatatccaactggctccgaagaggcgctgttttatattgaatctcgtggtggtaaatttgatcaagtagttacggctggctgtaaccgccttgcgcaaatcctatcacgtccggtgactatggaaaacgtagattttgctaatcggttgtacaaaatgcactttgggcgcgaaatcttcaactacaaaggttggaaagaaattgctgaactgggttacatccctcttgaattcagagcgattccggaaggaactccagtagcggttaaaaatccggttgcaactttccacgctgggaaaaatgcgctgtggttagcaggacacgtagaaaccctggcgatcaggggagtatggttcccttcaaccgtagcaactctatcccgcgaatgtaaaaaagtgttgaagaaatatctcaagaaaacctctgatctcgaaggcgaagcatttgatatggtgttacgtacccgtttgcatgacttcggcgcacgtggaacttcttctgctgaatccgctggtattggtggcctcgcgcacctgtataacttcctcggtactgataccgtagaagcgctgattatggctatctctctgtttgaagattgtcagaaagcgtttgatgatggtgaaatggcggctggtatttcaattcctgctcgcgaacattccactaccgtttcttacggcaaagaaaacgaagaccttgcgtacaaaaacagtattgagatcttcggcgaagggatgtatgcatgtgtgtatgattcctgggattttaaagcggcggttcgccgtatcgcagaatataaagattcgattctttctaagggcggtactctggtagttcgtccggattctggtgatatggtagacaatatcatgtacgctcttgaagaactgggtcgtatctttggctatacagtgaactcaaaagggtataaagtactacacccagcagtaaggatcattcaaggcgatgaaattcatggccctgaaacaatcaatcgggtgttgaactggatggagtctaaccgttgggcgtctgaaaacatcgcgtttggtatgggcggcggattgcttcaagaagttacccgcgacactcaaaaatatgcgatgaaaatgtgcgcaatcaaaattaacggtgtgtggactggtgtgtataaatgtccaaaaggcgctgaatggaaaaagagtaaaaaagggttgttgatgactatcactgatggtgttaactttaaaaccattgatactctggaacagaaagtgccggaaggctggaaagatgctatgatcacatactatgtcaacggaaagattacttcccgtgacactttagaggaaattaggaaccgtgccgggatttagtatccgcaaaaacaacaaaggaaccgtgattttctatgacaacattccccttgtagctcgcaaggggctttttgctaaaatcgctgggtattcctttaaactggaagaagtcaacgacgaaacactaaaagagatcgtaagaattgccttacaattaagaggtaagaaagacgaacagaaagctattgacatgatcaataaattgggtgaaactcaatgctttatagtgaatcgtggttacaagtacgataccattgcaaaatttgaaaaagggctttgtgaattatgagttattatggtgtgatcccatacacaggaaacaagcaatcgctattacctgaactattcaagctgttccccgaaagaagttcatacatgcgtttcattgattgtttttgcggtggccttagtgtgtcgctaaacgtccctaaacccgttctaagcaacgattatgataagacgctgattgatatgtatgagcgtcttaaaacgcttcctgacctgtctccggtgcgagaattgattgcatcgaaggggctggggaaagacaataaagaagagtatctgaaattccgtgatgaatacaaccagaacaaagatcctttatggctctatgtcctgatcctgcattcattcagcaacgttaaccggacaaacgacaaaggcgattttaacgctgctgtaggaaaacgaaccctcaactttatgacagaaaaacgtttcgaacatttcaaaaagaatgtgacaggaattgaatttcgttctggttcatactctgatattgaaatcaacgataacgattttgtttattgcgatcctccgtatctgatcactgatgcggtgtataacaaattctggaacgcagatcacgaacgcgagttatatgctttccttgactccctgcatgagcggggtatcaagtttggtttatcaaacgtgacacatcatgcaggaaagcaaaatgatatcctgatcgagtggatgcaaaaatataatgtgcataacctcgataaaaagtatctgttaggccagcatactgattcttacgaacaaaataaaacgcaagaagtctacgtgtgtaactaccagaaacgcgacgtaaatacataccctgaaacactggatgacttaatgtaaggtaacatatgtttaagatttttggttatatcccttctgtttataattgcgctccatgcctgaattctaaacgtctcctggacgcaaaacgaaaagaatatgagtttgtttctgtagccgatgaaaaagacgcagacggcaaaccgatcctgaatgaaacggtcatttctgaactcgaaagcctgttaggtactcgtagactgaccatgccccaaattttccacgatggtaagcacatcggcggctttgaccaactgcgtgagtacgttcgcacgttgggataaatattaacacctttatttgattggtgttattatgctcactaaacgtattactaagaaagattatccatccattaaacaagctctttttgaacagcaaaacggcttgtgcgcgttatgtggtcgccctttagagggtgaccttgaaaaacatcaccttgaccatgatcatgctctatctggctctaatgccggacgtgtgcgcggcctcctatgtaacctatgcaacggtacagaaggtattgtaaagcacaaatttaatcgttctggtctggtttcccgtgatgttgattacatcgaatggctagaaagcctgcttgcatatctgaaacaagattattccgaaaatcgtattcatgacaaattcataccagataaggtaaaatggttttcaagacttaccaaacctgatatgattgccgaaatggtttctatgggcttcgagtacgccgacaaagacgaacgcaaagccttaaccgcaaaatatagaaagcaattaatgaaggcaacgaaatgaaatatctaaacgctcgattatcaacgcaacagaagaaaaagctgatgatgttgatatcctccactgacaaaaagatcatatctctacatgattggatgcttggaaggggtgactctgatttgtgttatgtcaaaccgaaagaccgaacgatgtttgatgatcgcggtcgcacattgactaatttttctcctatcaccgttattgatatgtgggaactccttgagattgtaggacgggatatacctgttgacggggttgaactgatcaaatatcttaacgagattggacacaatttagatattatccataaggcaacgaaatgaaagtagaaaaacgcgacggcaaaaccgtcgatttcgatcaagaaaaaattcgcaatgctgtgtataaagctggcggtacgatgacggatgctgatgccgcaatcatgctggttcagtacaatcagatccgcgatggtagcgcaatgaagatcgcccgtatccaggaactcgttgaagaatccctgatgaaaacgaacccagcggtcgcccgtgcatacatcgaatatcgccacgatcgcgatattgcccgtgagcagaaaagtaaactgttcaaagatatctccggcatggtgaatctgtccaacaaagagatcaccaacgaaaacgcgaacaaagacgcaagggtattcccgacacagcgcgatttgctggcgggtattgtggcgaagcatttcgcccgtaatcatatccttccgaaacacatcgtagaagcgcatgattccggtgacatccattatcacgatctggattacagcccgttcaccccttacactaactgctgtctggttgacctgaaaggtatgcttgagaatggtttcaaaatgggtaacgcggatatcgaaccgcccaaatcaatcggtgttgctactgctcttatggctcagatcaccgcacagattgcttctcaccagtacggcgggacaacctttgctaacgtcgataaggtgttagcgccttatgtagaaatgacatatgaaaagcatgttaaggatgctaagaagtataaaatttcgttagaccgtacatatgcaatggaaaagactgaaaaggatgtgtttgatgctttccaatcgtatgaatacgaagttaacacgctgcatactgccaacggacaaacaccttttgtcacaatcactttcggtatgggtactggttggcgcgaacgcatgatccagaaagcgattctgaaaaaccgtattcgtggactgggtaaagagggtatcactcctgtatttccaaaactggttatgtttatggaaaaaggaattaaccttaatccggaagacagaaactatgatattaagaaattggccctggaatgttcttcaaagcgtatgtatccggatattattagcgcggctaataaccgtcgtattactggttctagcgttcctgtatctcctatgggttgtcgtagtttccttagcgtgtggaatgatgagcacggtaatgaaattcttgatggacgtaataacctgggcgttgtgacgatcaaccttcctcgtattgcgattgaagccgaagcacaggaagatgaagacgcgcatgatgcattttggcgtatccttgatgaacgtctggaactgtgttttgaagccctgatgactcgtattgatagtctcagaggtgttaaagccagtgtagccccgatcctttatacagaaggtgcgtttggtgtacggttgaaacccgatgatgaaattctggaactgttcaaaaatgggcgtagttctatcagtctgggatacatcggattgcatgaaactctgatgcttttcggatctggacaacacccattcgaccggatcggttctcagaacatgggtagactgattctggaatatctacgcgctgcgaccgaagcatggaaaaagaaaaccggatttgggtttagtctgtactcaacccctgctgaatctctatgtcatcgtttctgcaaactggactatgagaaattcggaagtatcaaagggatcacagataaaggctggtacactaacagttttcatctggacgttgaccgcaaggtaacaccgttcgagaaaatcgactatgaagccgattatcattacattgcaactgctggacatatcagctatgtagaattccctgatatgaaaaacaacctggaagcccttgaaaaagtctgggattatgcaatggataaactggactacttcggaactaaccttccggttgataaatgctttgaatgtggctctgatgatgaatttaagccaacagaagacggttttcattgtacccattgtgggaaccatgatccggaaaaaatgagcgtcacgcgccgtacatgcggctatttgggtgctcctgctgtccgtgggttcaacgaaggtaagaacaaagaaatgatgcatcgcattaagcatcaaaattaatcaaaaagcccttgacttcggttgagggcttttgttatattgggcctatcgaaaaaggagacagattatgaaactgactaagaaaatgaccgatgtagtagcatgtgcgtttgcattaggctacaaagttgaaaatcatccaactcgcgttgaagtcatcaaccctatcaagggccgtcctggtttggttctgtgtgaagacggcacagcatatcgtaatgatgtctctttagaactgacaactactatccgcaccgcaaaacaaatgaaagatgttcttattagcggcgcaaaattgagggatttatgatgtattggacaaaagataaatttgtttttcgtgatgatacgtgctttgggactgcataccgaaacttggctattcgtggcggttcgttttcggctaatgatttgtctaaggtagtatttcctattaaagttactgagtatgacgtattcggtgttaaagggtttactgattactttggtacaaagtttgaatcagaatcttacatttttactaatagcgatcgtgaattattcaaaaaacacgttgttgttaaagagaaaccgttattaccaaaagaggatgaagcaaaggaaatctatgatctcctgaacatgcttgacaatctcggtacttgtcatctgttcggtaaacgcgcccgtaaagcgaaagatgttctcaacttgttgcgctctcgccggaattacctgatccgggaagctgaacgcaatctgaaaaattcagaaaaacaggctgaaatccataaatccacccttgcgaaactaaaggctttgtgatgtttccgttatacgctaaagtgcgtcgaaatgtcggtaattcatatcaggaatggagtgaatggctacgcgaaacgaagtcattctacatttcaaaagccactgatatgaaaggccgtaacattcgctatcgtaaacccagtggtaaacgagtgaatgggatagattacattgttcttgattcgattcgggatgatatacgataatttaactttgaggcaatattatgattttcaacaaaacaaattcacgtaatttgaactatctacgctgtgaactggaagctaacgaaattgaactgtttttctgtggggctacagatccggaacacaaattgcattgggtatccggtgagattgtaagcctaaccgatcagattgtcgaagaggctacccgccgcgatgcaatcgttaaaattggtgctgttgatgtgaactacgaaggacatccttcatttttcattcaatattatccataaaagtattgacctgtatatctgaatgtagtaacatccttcttgtcaactaaggaggatgttatgaaaatcaaaaacactgctactgaaactctttgcaacgaaattgcagaaatgtactggagtaaaggtcacttagaggctatgaaagagtttcaaaagtggtgtgatacccaaaagttagctaaatgggaatacatcgttattgttgaacggatcaaagaactgatcctcgtgaagaaaggtaacatgaaatgattcaactgaaattagacacaaatgcggtgttaagcctgtttccggaaggttcaaccgcccgcgtagacctccaatctgctatcatcaaaaacgtggtgaatagcgtagttggtaagcgtgttagcgaagaaatcaacaaacggatccaggaacagttagctgttctaatgccgaactcatccgaaattacacagatcatcaaatctgaattctcggattacgtcgaaaaacgttatggttattcgaatgttttcgatgtcaactatggcaatgttcgcgaactgtctggtaaaatcaaagaatcggtaaaacagcaatgccaaaccattcttaaagatatcgagaaagaggcgattgctcatgcaacagaaaacattattgcagacgaagccgcgtttatcgctcgcgtctcgaataacctggaagttactgtacgcaaagcagtaatgcaacgggttaacactcagttcccagacattattgacgaagcgatcagagaacgtctgtttggtgaaaaagcatgaattacgaccgcatctataatatggatgtggtcaacggaaaagggatccgtgttgttttgtttgtgactggttgcaatcataaatgcgaaggttgttataacaaatcgacgtggaatccttgcaacggaacaccgtacacggaagagacagaaaaccatctgatttctctgttgagtaatccgcatgttgatggacttacattaactggcggcgatccgctttaccgtgacaactatcctactatcctaaaactgcttgagcgcgtttctaaggaacttccaaagaaaaacgtatggttatggacaggatataccctggaggctttacaggccgacccagaacgttctaagctacttccttacattgatgttctgattgatggtaagtatgaaaaagatttgccaacgaaaaagccgtttcgcggttcagataatcaacgtatgatcgaattcgctaaaaattcgatagaaattaaaaatattgcttgacctaatgtgtaactatggtaatcttaccacatcgtaaatgacgattaactttaattgagagataatatcatgatcctgaatttcaaaacccgtaaagaagcacgtaactattgctggaagtggaacattcccctgaaaaccatccgtaatacagggcgcggttcttgcccgtggacagttcaagcaaatgaactgaaaacgttcgtggttggtaaaacttacaaactggttgaccgtgaagggtttactac

SEQ ID NO: 4 - DNA, 177146 bp, Unknown
  bacteriophage strain capable of infecting bacteria of the genus Klebsiella
cccgccgctgcgttccaaatgtcgtttaacgcttgctacaaaatcgaactctttcccgtatccagccgacatactgtgatacgtgagtaggccaaatgcagaaacatagagatcattttctttatacagattcatttacaatacctttatggtagccaaaaatataacaatcaattgaaggacgttcaccagggaagtgaatgcattgcatgatgcgttcagccattagatcttctcccatgtataccgaagtagtttcttcgttgtaatgggtatcatacgacgttttaagcgtcatgcccggaagccctgcaatgtgcatgaatttagaattggtgcaaggttttcctacttcaccgttaatcatcaacactgcattagttttacgtgcttttctcatttgaatttcaccccgatttgcgatacgttccattcttttacttcatcaacaatatcataatggttgatgtatggtaaagcaatttttaaattactcgcgtcttgaatgttgcgtaagaaacgagtaggagaaagaagacacaaccgctcggatccgttgtttcctttagcggcaaatgatagggtttctcccccgtcaatcttcatatcaacagaaatcgttttgaattctggtgcgtatgacgtgattttgccgttgtctctcggcgtactatagaaacatacactttgtgggacattataacgatctgtttcaatgtacatgtaatcgccgtcagtcattccccacgcggtataaagggatccggtatagtcaccaaaggaatttttaaaatcttccttcgtggtatatcccagcgagcgcaattgcataagctggctatgctgttcgattgcgtcggctttttgttgttcctgtacttgcgcatcaatcgtttcttgccaggaattatacgcatagtaacccacaacagcgattacagccataacccctacagctttccagattttagcgtcttcgtttttgttactcatgctatattccttttaagaaaaagggccgaagcccctttgttaacgaagataaaccacataaccgctttggtcaatcgcgcggtctgcgtcattgaagatattaccacgaatgccttttgctggtgctttccagcttgcaggtttcaggatattaccatcattatcgatgaaagcggcaacagaacgctgattgaacatttcaccagtttctttgttgcgagtatcctgaacaacgcgatgatatttgcggcctttctccagaaagaaaacagtttcgaaaggagaatcttggaaacgagcgttacgcgctttgtacattgcttccatgaaaggggctgctttttctgcgaggatttcgaaagtgttcatggtatatctcctaaagtgtgtttcgtttcgatgtaagtactatatcaaagatggttattctatgcaaggcttttttcgttatccatcaaatattttaagtgttcttttaatgcagggagttcgttcaaatggcgttgcttaactttctcgtactctttgcgttcccagttttcaagattgcttgccagcgcttcatcacaataagcgatcccgcgttctgcatcctgaactttctgtttccattgtgcaactgcttgttgataaagagaaccgttaaccatcataataatttcctcccttgtttcgatggggtaactataccaaagctaccccagaatgttttaacaaaaagtgctattagtaggtatccagtttatacattttgcaccagttcatgaattcttcgaaagtctgagtattaacacgtttttccttcttcactttcttagtgattacaggacggttagtaaaacgtttttgcattttcacagtgattgctactttatcgcccaggtcttctaccttttcaaccagcgcccactgagaaccaatttcagcaccgaaagttaaaccaacaatctcacctgctttaacgtgtgctgcatattttactttaaccattttcgtattcctttctctgtttcgtttcgatgaatacaagataccaaaaagcctcccgcaatgcaagaggcttctttaacaaaaagtgctattttatttctttgagcaatttacggatcccgccgccctgtgtcttatcaaagattttctttgcatcaataacagaagtgattatgtggtagttgttcccttttccgtcaaactcaaactcgaccttgtagtcactacgaaatttcacaaaaacaaattcacctgcaaagtgcttacggaaatgtttttcgttaatgtccaaccattcctgtgtatcatctaactgatacatgcgacaaaacaggatcgaacccattacaacaaccacgacaaggatagctaacgcgaattctgacatcatttacccctgtttactgattgacggtgcaatgatttaggcacaaccggatttcggtatggtttgactttatggatcgtgggttcttccccaaccaaattaggaaattggttgttccattccatcgaaaatggatagggcgatgactttaactcttcgatcatacagtttactaaacggtcgccgattacacccaaagccgccccaataatcgctatacgcataaatcaccccttaattgtgtcaagtacagtaaaccagtcatgaagccatatcgttgttcttacagcgatatacgttaacaaactaatcaatgataccgctccgcaaaaagccagcgtaatcaacaaccggatttcaaatttagtgaaattcatatcaatctcctttctgagaacccaatataacaaaagccctcaaccgaagtcaagggctttgttttaaatttttaccagttttggcaatcgaagaactataccaggatggatcagacgtgcatccggaatagaatcacggttgattttggcgatatcaggccaaagttcaccaacaccatacagtttctttgctatagaatataggctatcacctggttgcacgacatagcgatcagattcaatcttaaccagatcctggttaatgatatcatcaaaggcttttgcttttgcttcgttaatcgtgttcccgtagtaatggcgatccataatagttaatgtgatcatcgtttctttcctatgctgttttcgtctgtctcttctaaggatggaggttcttccagccccagggcataacgtttagcatagattaacatcaatgcatctttagcgcaatcatgaatcgaatcatgctgaatgaatccatctaacatgcctttacgtagtggacacgtggtcactccgcgagtcagtaaacggttttcaatagctgtacgcacatcacgactattccagaacactgtcggcatatcttcgaacgtgtcaagtttccctgtcatagttcgtacaacatcggttagcatagaacgatcgaattcagggccgcgcgtataatcgtatgactgccaacgactcacaccgtcagccgctaaatcagcaaagaattgtcgatgaccttcgtacaaatccatgtcaatatcggaagggaacaaaaccctttgcgcttctttagattgctgtttccaccattcgatcgttttttcatctttgatgcgttctggttgtttccggatgtcaaatttgtactttcttcctttagcaatcagttcctgaaaggtaggcggatcataaggatcatcaacaaacggaacatagctaagttcagctagttttccttttggaaacgggccaatactttcataatcaaatacgaaatctacgggtaaatgactcattcgcgaccccgtttatatgattccatgaaataggccaatgatagcgcgacttccggagtaacatcaacggattcgatcatgcctggagttaccgccatcatcccgaactgacgaagcccacaacgagcaatcgatttttccagtcggatcatgttttctacagcctctgtaaaattgtccagatgttcccaatcgtggtaatcttccattgtagaacgatcacttttcaaaatcagatcggcaaccaattcagcataaaggcgcggaaggtgaatattcatttaaaacccctcaagcatgtttttgttttcacgaatgttacgacccattttcaaagtatcaatgatcactgcatactcttcaaaagtgaattcgatatcttgtgaaatgtttccccacgtgtaggtcggcccgttaggacagtataacccaacttctttgtttgcgttgacaacgcagcgcaattttgcaaacaacaaattgatatcgatagaattgaacccttcgagataatcaagcccctctctaccaatacggtcaacttctcgcaaaatcttttctacatctttgactttaacaataattttcataagaacctcaaagggccgaagcccttagacataatcaacagtgaatcgtgcgcgggtagttcctacataaagcaactgcttacacaattcataatcggcgtatgcgtatgcatcgcgcgtatacatgtatgaatgatcatacgtgcttccctgacctttgtgatacgtacaaaccggaagcgccttaactgtctggaacttttttttgatttgccagaacgaataccagggggctttgtatccagtttcctgtttcatcttcttatactgaaacgcgacgtagttcaaataatcgcctaaacgttcctgcataaccggatccgcgataacctgaatatccgctttcgtatcctcgaacatcgattctgttttcatcaagaaataatcgatttgtaccggatcgcatcggtcagctttgatagtatcagaacgcggtatgatttcaaggattttaatttgctcgttgttgttatagataacttcaacaaacgaaaccccattcacacggccttctgtcactaacggttcttgcatcacaaccacttcaccaacaatgaacggctgatcagttttgtacaagtgtttacggatcactgcgtttaacttgtctacgtttgcgttagtgtaagcaaacatacggttattgttcaggtcatccggagtcttaacacggctaaaataacgtctcaggaagtcaccagcgttttcgtgcttcattacccctagttcaccattcatgaggggcattaacggcttaccgtcgcgtatagcgcgtgatacctggatgattgggtttccttctgcctgacgcataatcttatccatgcgaatgacatcaaaaatttcctcatcaaagaacggtgaaagctcggtgatcccttcggtattaacaggacggatctgatccttatcacccaatcccaggatcaccgcacaactcggaatagtacgcttgatgatacggaatagttctttgtcaaccatcgatacttcttcaaccacaaacacacgacattcagacagatcagcggcttttttgcctttttgctgttcaaatactcgtaactcttcgttggttacggggctgattttcagtgctgagtgaatggtcgttgcatccatacccaccgcctcagagagaacgtttttagcctggtgcgtcggtgctgtcaaccagatcccactaatacccagttttttcaatgtttcaaacacaaattttaccagagtagttttaccaacacccggcccacctgtgatagtagtatggattttgtttctgatatttttaatcactcgatcatgtgcatttttctggtcttcgctcagatcgtcaaaagttaattcgctcatactttaatcaataccccttgaatacttgcgtgttcaataaaccaacgcatatctttctttttcttttcggttacggtttccacttcttcctttcgaaagaatcggctaagaccactttgtttaactggattcatcttatcatgatattctttgataatcgaatttttatactcgttagcatcgtccggagatagaaacaacaaaggtgttaactctccttccttaatgaagggaattttaaacccgtctttatccttactaacgacgatataatattttgtaatcattctcgcccctcataacaaacgtagaatattccaacaaaccaaaacactgatagtataatcagtaaaagttttctttcaacgccatttacgtgaaacacacaccaaccgaaaagatatgtgatcatcgcgcaaacaccataagaaagaaccccaacagctactagcatcaaaaagtgccattgatcgatactataaatataataaaggagattatacatgatatcgaccgtaagcacaatagttgttcatgctcattatacaacaactcccgtatttgaaggagatatctacacgttcaaatacacttttcctatcgaacagatagttcaattaatgaaaaatagacatcctatcggatggattaccccagcaacaaaacatctactaaggaacaccatcgatggactaccgtaaaatttacaccaatcttatagaaaaagcaagagatagaacactaaattgttacacagaaaagcatcatatcatcccccgatgtatgggaggttgtgacgatcatgataatttagtagaacttaccgcagaagaacattatgtagcccatcaacttcttgtcaagatgtatccacacaataataagttgatatatgctgctaatatgatgtgcgtcaacgcaacacagagaaataataaagcatatggatggatccgcagaaagtggatatctcagatatcaaaagacaggacagggacaaaggcaacagaagaacaacgcaaaaagatgtcagaatcccataggggagacaaaaactctatgtatgggttacgcggtgataatcatcctgcttatggtcaaaaaccctggagaaatcaaataacaatgaaaggaaagcatgaatggaggtatgctgggattttctatgattggtatattaacgatattaaagctggaatttataaaagacaaggacacaagagaatgctacaagaattgcaaattgcaacaatctcccgtgttcctagaacatcaatcgagctattcaaaaaggggtggaacccttacgaagataccgattgggttgagtgggctaataatcaatagctgttggcccaacgacgaagattttcggcttgtttaagagcgtacatcttataaattgtttctgcatccatacccaatgcaataaacttacatagtacaaagtggaattggtcgatcatttcaaacagaacttctaaacgatcctcttcactcagatccgcaaatttagtattgcgcaattcctggtgatttgctttccacggtttccaaacaccggatgcaggtttaacaccgcgagacattccacccagagcggtatacaattcgcgggtttcgtcggcgatcgcgtcgtcttgcagtttcagccaatcaaggatttctccgcaagtttccagattatcaggacgcggaacccaatgcagggtatcagacaggctttgttgcgcatggttttgtaaatccagcatggattgtaaaggatcgccattacgggccagaaccttttgatattcggaatctacaaattccagatcttccgggttaaccaggtgcgcacatgaattaaatacaggagttttatcagtagtcatatcaatctcattttttcggtgatttgtcccacgacttaaatcgaagttttgccgtgagtccagaaacagtattatctttcaaatactgcataatttcaagtttagttgcgccgtccgtttttatcatttcgttgatatctttggaaggccacgggcatttatcccacattacaaccttttctccagcctcaatcaatttaaagaggcggtgagtagtatccggatgacgtgcttcattgtcaagaacccagacacgcatatttttatacggaacctcagaaagtgcaagctgtccaccagtgatagcgccagcattatcaacaaacaggctatctaatggcccctcaagaagataaaccgtttttagcggatctatcgtatcctgtccgtaaatcttggttgattcttcacaggctttgattgtgatatatttcgactttgccccgtcgcgtaaagcacgaccctggaaagattcaattttccctttcttatcgaagatagggatcactaatctcggttctggttttgcgatcggataggtatccggattcaccgtattaaccagttgttgccattcgcgagtaaaccacaaccgatcccacttgtcacgggggatacaacgattctgcacatattttatgatcggatgttcatccggcaaggtatctaacctttcgcagaattgaagagtaggaataaatttcttctcttcctttggtggttctgtatgtgttggctttaacgaattgcgatccttaaacgattccatgagataatcacggtaatcgtctggataatattctttcaggaatacgctaaacggtacaccataaccacagttaaaacaaccacaattcatatgatcaccctttttagaagggtagatccaaaatcgttttttgtacttgtctttcattgagtcgccgcaaataggacaacgcgcattgatgcttaatgcccccgatttacgaacgatttcgctttgaggcagtgatcccatgattcgggttgcaaattctatatcaagatacatttcttacctcagttgactatctttagatcctcgtcgattataccccgcgctgatcatttcgtcatgttctttttggcattcaatacaataacggcaacccttcacgatagccctacgtttttcgggtatcggatccccacaatcaaaacaatgcgttaatgattctccgtttctgatttgagaacgtgcaaaatctatcgcattgtctattgttgcctgaatggtatcttgaacaccgtcagcagggccaaatccaaccgccattgtaaatcctcctaatcaaatgatttcaatatcatagactaagaggatttttctgtcaagaacttacttgcttttctgttccgtcaagcattaacttccaaccacgaaatgcctgtttaaacgaataatttattgcaatatcaattttatcagaaccttttcgacgattctgataaacggtcgcgttgtcactcatatacatgatacaaattggaaaccatgtataatcgttagcagtagcccagatagtgatattcagcggaggaattatcatttctttttccttttccctgcacgggtaacgcccaatactttcggcccgatgttagttactgctccagtagtcacaccagaagcaatcttttctgtatcgccgccagaatcacccgcgaccatatcctctaacatgcgccccttatcataatattctttgaggcgtggaacgttcaacatgatttcttcatgctcttgttctgtcagattgtagcgattgcgtagggtatcatatgaactggttaagttcataaacccactcatatacggaacagcattcattctacgcttgatatggcgtactgaacgatgaaaaggagaatacgcttctaactcttcttttgttttggggttgcgaattacttcgccttgtccatcaaggatccccagcttgtaagcagtccattcagtccagggctttttgagtagccggatcatccggacgctatatgttaaatccatatttttaactaattgatcactcatgattattactctattgtgaaagtgaataaatcagatttggtttcaggttcaaactccatacaaacaacctcgcatagtggtttaacccctttccaatcctccaggtaatacccagtatctataccgcatccaggattcataacgaggccagtttcatcaagaaactttttgcatttacttgatgtggtgctgtcatcttgtcggaaacagtgtgttttcgaataccggaaatttgcagacatttgagggattatgaaagttccctgacgcgcgatctgtgatgcacgttcgattactttatactcaaattccgcccctgtatacttacccttaaaatcagatgttttgattttaccaaaaggcggattactgatcgccatatcaaacacctgattaaattcagttgttaaggcgtctccatgcacccaggaggcttctggtacgatacgcttacctaactcatagtatgtgtgatttaactcaacacagacgatttcgcgcggcgtattgtacatcatgtaatgaaccatagcgaaagataacccaccgataccagcacacaggtcaataacacttccacctgtgcaagcatcgattgtgaaatcgcgagcaagtccaataggggtaaagaacgcccctaattcagaattgtttgtaaacgcgccttcatgaaagttttcaataatgaacaacttctcttcgtaagttagcgctttgtcagagtgaaccagatccattatctgattgtgtttcttggtttccgctttcgttaactttgccattgtcccagctatacaataatgttgatttatttggatagaattcccatccgtctacatatccggtttcccaatcagtagtttgttcaaaaccacagatccattcatatacacccggaggcatttcgacagaatcaggaagcccgatatcttccgcactgcgtccacattcaaagaatgcatcatgaatgaatggtcgagataataccgtaacataaccttcatcgtcaacagctacgatccagcgcgaactatgaggactatcgaacttcggttcttcttcgtccatatccgcttttatttcagccttacaaaaatcaatattcatttcaaaccctctttaacaccctctttcatagctttccaggtagaacccgcttcaccattcagggcggcgaatacaaatagtaagatagcaaggacaagattcacgccagcaatcaccatgattttgctatacacgaaaatgtaaggcattgccaccacccaccaactaaaagaattaccagttacgatgttgagtgctgcaagtaagaaagtgataacgaatgcgattttcataatgtcctcctttgttatgattaaggtatcatcttttgcgaaagaatgcaatacctacagatacaaaaaagcccctttcggggcttaatttttatgcgttattgatgagataccgaagaacgttttttgcttgttcctcattacaaccaactttgaaaccaggttcgatagggaggaagttccagaggaaatcaacacttccttcaacgtcatctttgcctttttccagcatcgctaacagtaaacctttgtttttgatgctgtttacgattgcgtcaaaataaccatcgctgaaatcaacattcgggttcagcatttcgttgtaagggttgttgaatacgttcattttgaatctcctttgtttaactcagtatcttgtctacgtgagttatattaccacaatggagattcaggtcaatacctttttacggttttttgaaaagtttttcgtatttggcttttacccagcgatacatatcttcggccttgtcactggcaatcagtgagaacagcagatagatcgcaacacccaccaacacaacgcctactacaatgtagacgggtaatagaactgggaagagaacccagaaccatgacatatgcgagaagccaaatactttagccgctgcaaaaatcagtgtcagtccagtcagaagtttgatagccggaatcggaatcgttatagtcttagtcatttcattaccttacattctttatggggctattcgccccagtcaattaaaattgaatgtcagattttgcaatctgcgccattttatcacgtcgggtggattcagcctgtttaatcatcgggccttgtgtctgttctactgttttaggcatagtgttgccgtggtagtcagatttaaacccgtattcgctgttgtcggtatccatccagcgctgattacccttgcgaacttccaacttgaacttgttgaaagtgttcttatcgccataacgggatttgatttgcttgaacagttgcataccctgatcagctaactcttccgtctcaatcacagctaacataaaatcagccgtagcaggtaaaccagcggattccgcaacatcacccatactcacatccgaactatcccatgcagaacgcccaacctgtgcgcctgtccacattacggtattagtttcaacagcaaggccgcgtagttcttcggcaattgctttaaccagaatataggtattctcagcacctttaacacgggttgaagtacagatccccaggtaatcgacaatgatcacatccggaacaaactgtttcttcaatttaagctctttcacaagcgctctaaagtggtttgcacctgcacccgatgtagggtactgcttgaccaccaaacgcccaaccttacctgctttaaggcgctccattttgttcttatagtctgcgtatgtaatgttcccttcgtcgatgtcatccatagtcacatcaagaaggttagcatcgatacgcttagagcaaacatgctctgccatttccatagaaatgtaaagaacgtttttaccctgttgcagataatcagccgcaagagaacataaacccagtgatttaccaacgttaacaccagccatgatgatattcagtgtaccacgttccgcgccgcctttggtgattgcgttcaggatcgggataccaaacggaattttcatcgcttttgattggtaaagcatccaccgtttttcataatcttcgaaatagtcatgacctactgaactatcgaatgaaattgctaatgcttcctccatgatttcagggatagccccaacaccaggaagtttcttgttctgttctgccagtggtttttctgcgttcgcctggatttcgattgcacgagaaagagcacgatacattgctttatctttgcaatatgtttccgtttccttcattagccaatctaaatcttctggcgcatttttcagcgactgaatcgcctttttcgtgtcttcgtagactacatcacttagatttcgtttgtcaagcgcaacctctaaagcagtttttgacggaatgccgttgaattcctgtacatgtttatcaatgaggtcaaacaaaacttgcgcattgccttcgaaatattcctttttcagatgaggccatgcttggacaaaatatgtcccgttataaatcaggttagaaaatattgtatcaacgatcattgtattgccttataccaggttgctgaacatcatgaaaaagttgtaaaccttttgtttgaatacatcccataatgtcagtttaggctttgggacaactgaacccttttcaagctctttaatctgtgcataaattgcatcatgcaccagtgggatcaatgcttctttgtcttcgtctggggtactgaattctactttcagaccatgatcccaaaacaccttatgaatataaaccagatgcgcaacacctttttcatcgttaatcagaagttcctgaataacatctttcatcgcttcatcaatataattctttgctttgctctcgatatccatacattgcctcggttatggggccgaagccccatagtttttataaaatttcgttgtcttcttcgatatcatcaaatgattctgggatatcgtcatcatccagatcaggatctgggatgctatcagtgctgtataaatcttccagcgcggaaccatcactgatttcacgatcagggatcttatacttttcttcgatagctttcaagaatggttgatgagtaaacagaggacgccagaattcaacgctatttgtttctgactcacgccatttcttttcttcaacttcgagttcgccagtctcggtattcaggaaagcacggttgcgccagcctttagttacggtctgtacaaagttcatttccattgccagatccaaaaggccagaatacatactaataccgccttcataggtaacatgcagcgggaattttgatttctctttcacgaatcgagatttttcgatgttcatgatgaaatcataacccactacctcagtaccttctttcacctgttgtttacccaggatgatcgcagtatcagcggaatacattaaaccagtaccaccggaaataactttcttgctgtacatttcttgtgtgtcataggtatgacagatacaaaccatcgggatatccaggtcagccagataaggcgtaaccatacggaacataccttttaatgcttttgctcgcgtcatatcctgtttatcgttatcagaaagcgcgtcagcaagttcttttttacttgcagtgttgcctactgagtcaacgaatacaatcaccttatcaccgcgttcaagcgcgttaagctggcttacaacgtcattacgcaactgctcgaccgtcgtgatacgagtatacacaacacgatccggatcaacacccattgatttcagataggatttagtaacacctttttctgaatcgtagaacaggcacacagcatcttcatacgttttgagataagccgctacagtcagcaaacctaagttggatttgaagtgtttggacgggccagcgaaaagggtaagaccagaagttaggccaccgttaaacgcaccggacaacgccagattcagaatcggcacacgggttcgcgtgatggtaatattgttgaatacgtcgctttcagaaagtacagatgcagtttggctattcgagtttttgatcagtttttttagtagtgctttgtttgacatttaatttttccgatttattcattctcattctatatatctcactagttaatgaaaggggccgaagcccctagagtttaccagtcaccgaacagatcgtttaaactggcacgtttttcataatcaattttacatacttccgtgatattagtcaatggactaataacatgtttttcaaacataccaggataatctacccatgccagaatatcactttcgatctctgacggtagtttatttccggattgccacgcgatgcaatcggcttgccacgggtttttatcccttagtggtagaaccattaccttttcaccttccatgattggcgtaacaccatcaataccagcagtgaaacggttaaagaaaagcacccctttaatatggtttggtgttcccttgattggatagccagccccatcacgatatttcgaaatgttgttggcagatgatacaccagcaatttccctgtagtcaagttccttatattcttcttcgaactttttataatgttcgtgtaaagataattcaccttcttgcaggatacggcggatcgcttctttcaggaatactttcacagaggtcggagtactcgatcgctgtgtttccatacccatgattttcagtttcggtttttcatagcgggttccttcggagtcccacacgttagccgcatatcgttttttagcagtccagaaacttcccaacccttcggaacccaacggaggcccagaaatgatttcacgatccataaacatcaggtgttccacgttgttcatgtattcgcaaagttcacgataccctttatcgatcatcggttccattctttctttagcaaagcgatccaggaagtcaacccaatggttattatccttaaatttagcctcaccaccaacttttgcaatcacgttatccatgcaaacataaatggagtcagtgtcacagtaccgaacatatgcatgatccgtagtaccgcacaggtcgttaaggtattcgtttaccttacgttcaatccactggatagccaactgcccgaacatggtgatcgcgctggcgtttcgtagatcgaagtatcggaagtgttcgttacccaacgcaccataaagggagttgatagaaatcttacggttaagctgtgctgtgttcgcttgtgcgatcttcttctcacacacgcgcttaactgctttaagcatttgttttgtaagagttttcagaactgctttcgattcatcactgaaatctgtatagaaatcaaagtcaggatcaaccatttggttatgtgcgtctgttaagtgttcgagttcgtgcttgatgagttcaagatttcgctcacccgccatcattcgttttttccacatcttacgctgatcaaatactttcttgatctctacggggatcacgcctttgatatcacggcggaacatccacccgttaggagaacagctaaattcatcgctagggcgcggcgcggtcttattaatatactcttcaagagcacgtaccgcaaaacttcccataatcgtttcagggcttatattcacctgtcggatgatggaagggtacaggcttgttaagtcaaacgataccatgtatttgtaaggcccaggaactggatccttcacaaatgccccagggtaaggggttttagtatggcgtctgttttccggaataacaaccttatcttcacgcagagagttataaatgatcgcgtcccacgttttcagcggagacataacccctgggaagttaatttttgcatagtacgctacagacagaaccagttcaataaagtttcgtttaccgtcaatatcaagtacgcggataacgtcaacaatgttgtacgtgatgtacagttggtgatctcgctggcgtagttcagacagtgaaccttcatactcaactttatttttaccagtttcgtattccgcgatcgcgtccagacggtaagatggttgtggggtaaaactgaatttcttatacagcgccataccatccatttgagcaacgccggaaatgtcatatcctaattgttcgttgccgtaagcgtcggtagtggttctggcggttactttaccaaatgggctaaaatgccttaccacgttttgaccgaaaatgttcaggtatcgcgtgatgatatatgcaatatcgaatttgtcagagttccatccggttacaataacaggggttcgctctttccaatctttgatatacgcagacaataacgacttctcggtctggaaagaccgataaacaattttgtttaaatcttcttcgctaatgtcttttcgatcaacgtttgccgcgcaccattccgcaatgccaccctcaaccagatcgtatacatagaatttatcttcaatgctatcgtaatgggtaatcgcatcgattggatattttgcttcacgcggatccggaaattctggggcggtcacctcgatatcgatagaagcaatgcgaatgtgttcgcggttgtattcgatttcattccggtacatgtcagaaatgtaagccagtcgataatcgtccatacctagcgcttccatcccaacatcgcgcatacgctgcatccagtttttagcttctttgatgctgtcaaactgttttttgaggcaaggcttgccataaatgtctttgtatggggtttctacgccattcatagcgtgttgatacattacgggcgcatatttcgtcttacgtacctgttcggtgccgttagagtcaacgaagcgctcataaatggtatctcccatttgttcaactgataggtaaaattcattcattggatcttgtcttctccattaatataatgttccattgtaacaccacctacagcaaattcaagtttactcgatgttctaaaaccaacaaaccttctgctaacaagtcacggatctttctcagttgaacaagctggcgttcaagtttaaacccgtcgaataacatgctgaaaatactggaattgacactatgatattttgcttctgcaattccctggttaaccatcatgatagctttgttaaccattagtttcctttccgttactgtatgttcatccagttgacaggttgcaagggaaaccaaatcatcataagcacgttggtcaataacgttatccatacgggccgcgaaaatcttattcatgtaagtgcggatcattgcgcgtcctccattcttttcataaagacttcttttgcttgttggatcaagcccagagattttttaatacgctcatagaaatgagtggtttcaacttgattgcataacaatgtgtactctgaaatgttacgatcgtaaaatccaggaaagtagtgttgtgcatagctgtaagtgcgggtatctgacagattgcaagttaacgataacaagatgtcatcttttacaatcgggatgatcaaagtttcgttggatttgattgaatccatgatttcgttaatagtcataatatatccctctcaatggtgtacaccaaatataacaaagcccctgcacgaatgcaagggctttttgattagtgaccgatccggtacttgtacttgaggatccaatctgctttttgcgagtgagtcagtacgcggaagttgttttcttctgcaaacttcaacccagtggttacgatcttaaccatgccccactcttcgagaagtcgcgcaatgttgttccggcgtagttcgtcttcttccgtcatatcgacttgacgaccatcaagtttcaacagttctttaaaatgcacgataaaatacttaccttgctttttcagaatgtggcacgattgccagagcattttctttttgttgttcgcaataccaatacgggttagcgtttcacggatctttaaaaaagaatcgtcgctgattagttgaatttctaacatacatcaccattgtttaatcaatttttccaatttcttttgttcagctttgtttttcacaatacccaacaaagacagagcgacctttgcgtgttttcttttccaatcctcgaacattccgaggtctttaagttcctgcaaatattccatcgctgtacgtgtatttacactgtatttttcgcgaaggatttcgataataattttctcttcaaaatcttccgatagtttagcccatgcaccgaagcgtttagccttcctaacagagttgagataatagttatagtgcatttggtcagagatactaccgcctaccagattcatcacataagcgttatatatcgtgtctatgtgctggctcattgcgttgtctacaaagtacttatcatacacatcatcgataaccaacggagttttaccgttgttgatttcgtctatgatgttaaacaaggtgttttctttatccttgccgtactctttgaccagttcttcaaccttatcccaatctttagaaagccaagcggattcatgcggggataactcttcttcatccagaaattccgccaggctcatgattacgcctcccagaccatagaaagcatcaggttcatcaacagatattgcagatgaatttctttattcatcgccagcccgtattgcgcgttgttttcgcctacaatctggatcagtgcgattttcgaatcctgattcacgatagggtaaatcgtatcagtcaattttccgataaaggtatcgtattctgacgcatatttaataacctcagagcgcaaccctttatagttcttttctttcaacagggtaatgatatgagacacatcagaaccaacgatctcatttaggatccccgcatcaatttcaccacgtttcgagtagaacccgatcgctttgataatagaacgcgcatccggataatgctctttaacaaacgctgcaatgactttaggatcatacttgatattctcgatttcaaggataccgaaacaacgcttgattaactgtttcatcagttcgatacgttcagcatcagacggaacaccgaatttaacaggaggacaacgagaaagcagagcactatgcacaccgttaatgttgttcgccgttacaataacagaaacgtttttactgtatgcttcgataaagctacgtaagtgtttctgtgcttccgccataccagaacgatcgaattcatcaatgatgataatctttccgcctggtttctgcgtcattgatgaagcaaaacgatccagttcattacgaatgaagtttacaccacagttcgaaccgttgacaaagaacacctcagcatcaacctcacgggccaacacaagcgcgagggtcgttttaccagtgccaggggaatcagatacaagggtcatgttctcaacacgcccagatttgattatgccccgcatagcggctttgtcaccagaaggtaaaatacactcttcaatcgttgttgggcgatagcgctgatcccatgcaaattcatcaggagatcgggagattttaccgtatttggtttcgatgatttcaatattttcactaagttccataatataccttcaaaataaatggtgtaaaagaaaggggccgtagccccttaaaactatcttacttgaatgtgctacttgcttcaagtacgacgacgtaagcaacgccgttatcagaagagaattttgcggcccctttggaggaaatctctactttgtaatcgctgttgatgaactgcatgttatcaatcttcatatcgaaattgaaaacattgtcgccttcatactcaccgacttcaacggagaaagttgattgactttctttgcttttcgcggtgatgaccagtttaccatcaatcggttcaacggacaggtcggtcagtttcatcatgcgagacgctttgatcagtttttcgaaatcgttagcggtaatctggaaaatcagatctgctactggcatcaccaaacgttttttcggtttcgggatcgttgttgcgtctgctgaacgttcgatgatcttcatcttgtcgccgcgaatcacgatttcaccagtggaaatatcatgagtgatttccgcgtcagtgccgacgatgttcagcatgttcaggaatgagttgagatcgtagataccaacatcttcatcaatcacatcagcaatttcagcttctgcgtatacaacgctgttgattgatttcgtcatgatgaatgaacctttggtcagcatgatcgaagagttgatttgagaaaagtttttcaggatatcaatagtttgtttagagaatttcatattcagcctttagttttcaataagtgttacttaataagtgattttacaacggtttccgctgctgtgtcaagcatatcagccatttctttaacggttgtacgcttaggatcttcgcggcgttcgctggtaagtttacgatgttccgcaaccactttttcatcaatgtcacgataatgtttaaaacgttcctcttgaggcatagctttaaacagttcttttgtttcgtccgagagtttagcaacccaggatttacggacgcggttcatgtagtcaacaaaaacattactttcattcatatatttcttctctaacttagaattctttgagtgggggccgaagcccccgcttgtattacatgtctaacagtttatccaggtcgtcatcaccggagctaacagaatcatccagatcgaacggtacgccgtcatcttcgcctaccggaaccgatgcaacaccaccagatgatttcacatcagatgtctgattgtcaaacttagccatttcgttatcgaagttgctcagttcgctatcaaggtcagcggaagcgctggaaccagcagaaccgatcgaactacccataactttattgaagcgagtggtcaggtcagccagcggtttaaattcgctttcagcggtaatcgggcggagatcgctcataccttcgaaaattgctttctgaacttcttcatcgtcgatgtttttgatcttagccggaacaccaaacgagctatcgtcatagttaggccaatcaccaacttttttcgctttcagggtgaagttagcaccatcaaacggacaggttacagcaatacccggttcatcaagttctggattaccgttaattgcggcggtgatcttgtccatgattttcttaccgaagcggtatttgaacaccttaccttcgttttccggagcgcctgggtctttgacgatcaggacgttagcccagaaactttgtttacgaccgatctggctcagtagcttatcttctggcccgtttttgttggctttagccttctcatacagatcgttttcggaaatgtacttacatgcaggacagccgtcataatcgccgtgggtagaggaacagttctcaatgtaccactggttgtttttcttgaaagagtggctcacgatacggacgaacgccagttcatcatcggaacgtgctgggaggaatcgaataacggcggaaccgtttttctgtgcgtccagggtcagtttccattctttctcatctttctggaagccggaaccacctttcagatttgctacctgtgcctggagtttagcgggatcttgacgtttaaaaatgctgctcatattctgttttctcgtttagtttagtttgattaacgtttgtttcattaagtttcgatattttatgatatctttttcagtaaggtcaaatatttttctgtatgcctttaacttaatgctaaagtcagaccaaataatatcatcagctacttgatcgtgtttatttatgatacctaaaaatgagtcaaaaatcaaaaacgattcgtaagatatcacatttgacaggacaagtttgcttatgtaggacgttgatgatttttcgctgtacttgaacaccagagacacggggatctctttcattttggcgaattcgtacacgtttttaacgtcatccacaaacacgttatctagtctttgtaactttcctatgtactgcctgtaaaagacaatactatcttcatcaacatcgcctacccagaaatccggattggctacgaagttggagaggaatataaaatagatttctttgaatgtaaagcgttgagctaattttacaaagaaatatctatcctttcgcttgttaaaggcgttttcactaactttgatctgccagttgtattgaaggacatcaaaacgcccctggaaatgagttttcatcgccagatataacttgtatacagacaaaggcacaagccgtgaattcgcctcgctatcagcaaacggagctttgaatctcacatgaagccgtccagagtggttgatgaactatgttcaagcgcaaccgatgggcgaagcatgtttcctttgatcgcttcgtcgctaatcttatcaaggatcgcgcgaggaaccgttttattcagcatcgcataatcaatagaattttcatccatccattgtagcgttgcttccatgtaggttgccccctcagaggcaaccagattttcgatatacaaaccgacttcggtcttatttccgatcatgctttacgccttatcgatcatatcatacagttcgatcagttcgttgttttcttcttcgaaagcggtacgggcctgttcgtgatacagtttgaacagtttcccgaaggtttttccatcgataccgaaatcggttttcgctttggatttgatatccttgaacgtgccgttgaagatctcaacttgagttttcacgttggatgcttctttgatcagttcttttacctgttttgctacatcagggtttgtttgtaaaaattctacactcattttgttacctcaaaaatcactcagtttttcgaacatacgggaaagtttgttatccatgaagtaacgttccattttggctttacttccggattttggagtattatacgcttcaataatcgaattttcaatatcttttggtataaattcgaaatcgcgtagttcctcattttctttgtaacgtgcggcccattcaggggtcatcaatgttgtcggatcgtctgcctccagccatgcctctaactcagaggattttaccgctggggcgcgttcaccttcaaccttcgtcacaatataatcatttctaattttaatgcaagcgatactatcttttttatcgcctttgatatttttgtatcgcagatcgttacgtggcgaaccgtacttaggcgttacccattttttctggggaggcgaccattgacgaacaccgttatatttctgtagttgtgtaaagtcgctatcagcagaaaccactaatactcgtctaccttcaccaacagcttttttcgtaacaacagcaattatatcatcagcttccgcgaattcaacctttaatccgagataaggcatattctgacggatttcttcgaacacaggattaaggaagttgttcagacgatcccaatcccattctgattcttcgtgttcgatctgacgacgttttttgtagtaccaggctttttgcctacgccagtaatttctgtcatcgaaggcaatcacgatttctggatactcacctttaaattttacaacgttaaaccgtaaagtgtcaagcaccagatgacgaatcatttcgatcgtgatggatgcttgttcctttggtttgaagttgttcatcagtgtagcgatggaaatgttagagatatcgatgaccatagtatcatcgggttccccttcatcttgcatcagcttgttcaagttaaacatgcttgcaaaactgctcatacatacctcaatttttcaaagaacggggttattgtagtaacttacgaaatgaagtcaatacaaaagaccataaaaattttgatcaataatacttgatctgatcaaatttatgatctataatttattaattaataattattttactacaatgatcattgtaggtcaagtactaaaatcaataaattttatataatttagatctgatctatagatcattagatctactttaaccttaaataatatagaatgaaatttgattttgtctacagttattatataatattcttaacttcaaagaggaaatatgaatactatgactaaagaaacaaccaatatctacgcagacaatgaaaaattataccctatcctctgtgcatggaaaaagcaaatcgccgaaacaggtgatcgcaaaatgcctaatgagttgggggctgctattatggatattgcaaacgggctatcacgtcgttacaacttcaaccgttattccgaagattggaaaatggatatgatcgatgacggaatttccgctgcaatctcaggactgcataacttcgatgaaactcgttataccaacgtttacggttacattaacaaagcatgttggcaagcattcgtaacacgtattctgtacgagaaaaaagagaacgcgaagaaatataaattcttccttgagcacgtttacgactgtgaagattcagatatggttagtattgcagacgaaggtttcattcaagatctacatgacaaactatctcagtacgaggcttccgccaccaaaaccaaagacaaggaagcggaagtattcccaacattggaagattttctatgaaagcaataattgacttaaacaaaatattaactgatatcgattacgaaattgacttgctaccctacttcgtaaaattagagttgcaaaacgtgggaatcccggttatcatcgatccaactgacgtaagaaaccccgatttcgaagtagaagaaggggttttgtcttatatgataaacgccgaaactatgatcatggagatcacttatgattgatgaagagaaagaagtactaaccagtgtggaagaagtggatccagaagaggaaattcgacaaaagatccaggcacgtgtagaagccgacgcattgaagcgagcacaaaaattcattaagaagaaccggactgagatcaaacgcctccgtagacacgcagaggaagccctattcaggggtaataaggttcagtatgtgtatgcggttaagaaacttcgtgatatgctcaaacagccgtatacagaggatttcattgatacgatgtggaacacttcactagcatcaattcgaaatatcgtagcttcacaacagaagcactaacaaacaagtagccccgaaaggggctatgagggtcttatgagaaagtacttaatgatcggggatactcacgctggcttgcgtcaggacaacccctggaatgaagaaaacctatacaatgtattcgtacaaatcgtagaacactgcaaagcaaacggcattaccgaggctttccatgctggtgatttctttgatgtgcgcaaggccaccacacaaaccacgatgaaattcattcgtgaacgtattgtgccactactggaagaagccggattacatatctatgttctggttgggaaccacgattgccagtttaaagacaagatccgccctaactcaccgcgagagattcttgatcagtatgattgcttcacggttgttgatgaaccgatgacagtaaatcttgatacttctccgctgcaatcaatcgatttgatcccgtggatttgtcaagaaaacacacagcagatttttgatttcatcaaaaagtcaaaatctcaatactgcttaggacactttgaactgtccggatactatttctataagaacagtaaagcggatcatgggcttgaacctgatttcttaaagaaatatgatatcgtgtattcaggccactatcatcacgctaacgaaggcgctaacgttttctatatcggtacacctcttaccatgagcgcgaacgatgaggacgaaaccaggggcttctatgagctatcttatggcgacggtaaacgtgaattaactttcattgctaacccagtatgccaccatcgccggatcacctatccggatcaaaaagatgttgatgttgcagattacaaaaattgctctgttcgcttgattgtacgcgaagttgataacgatttgcctaagtttcaaacaaaactggaagaaacagtttatgagttgaacattgtcgatcgcgtgatcactgattcagaagtcgatactgattttgaaatcaaaagtgtatctggattgattagtgagtacatcaacaacatgcagatcactccagaagaaaagaccgaagtatctgcaataatgagtgcattgtatgcagaggttacgagcaatggaaatagttgattacgttaatattttaaacgaagaagggcgatataaagccctttataaaatgtttggatttgatgtgattgttgcagtacagcaggattcctataatgagtatgtgtcattggggttcactctgattaaagacaactatcacgaaacaaaggtttggacatttactgtcctgaatagcatggatgaagattccgtgatatactgctttgatagcacgattacaaacatgattagtgatatatcccaaaggataattgatgaaactcaaatttaaaacattgacttatcaaaatatcttgtcggtcggtaacgtaccgatcgtcattgattttgattcagcaaagaaaaccctcattacgggtaaaaacggcggtggtaaatccaccatgatcgaagcgcttacatatgctctctttggtaagtcatttcgcgatctgaaagtcgggcaactggtgaacagtatcaacaagaaaaaatgtctggttgaactgttgatcgaatacggcaatgatgaatataaaatcatccgtggacaaaagccgaaagtatttgagatctggaagaatggcgaaaaactgccggaagattcagccgctggtgattatcagtcacagcttgaatcaatgttgaatattaacctggtgggctttaaacaggttatcgttctgggtactgctggttatgtacctttcatggaactgaaaacaccagatcgccgtaaattggttgaagatttgctttctctgtctattatcagtgaaatggacaaactaaacaaatcatacatccgtggtgttaaccgtgaactggatacgctttcaatgcagattggacacgtacaacagcagatcgcaacacatcaaaagttcattgacgaacaacgggcaaaagcaaatcagaatacggcgcgttaccaggatatctacgattcccacgtagaaacagcaaaacaaatcaaagcacaattggtcgaactacaaacccagatcgcagaatgtgtgatcaatggtgaagaccaaacagcaaatattcaaaaactgcgtgatggctatacacgcctctcaatgaacgtagaacagttgcagcgtcttgaggtgatgtatcgcaagggtggtgaatgtccggcctgtaaacagccaattagccccactcctgaacgcatggaagaaattgccgagaacattaaaaacggtactcagaaacttacgctgattaagaacaagcaagatcagctacagaaaatcatggatgatttactaacacaacaacgtacactaaatgggctgaaatccaaatacgaatcactacgcggtacacttcaaaatgaagttgcagcggctaaacgtgttcgggctgtcatggataaagcacaggaagacgtggtgatcgacgaatccccagttgaaaaactccgtgaagatgaaaaggaacttgattctaaacgttctggatttgtcaaggaaaaatattttagaggtattgttacggatctgctgaaagattccggcgttaaagcgagcatcgttaaacgttatattccttacttcaataaacagattgcgtactatctggatctgttgggtgctgattatcagttcactctggatgacgaatttaacgaatcgattaaatcgctgggtcgtaatgattttagttacgcatcgttcagtcaaggcgaaagagcacgtattaaccttgctttattgttcacctggcgcgatgtaaccagtaaaatttctggtgttgatttatcccttctgatcctggatgaagtgtacgatggtgcaattgatcgtgatggtagttttgccgtaaaagcactattggatgggataaatggtaacgtaattgttatcagtcatcaggatctggatccgcaagatttcgatcgacatatcaccatgcagaaagttggacggttcacaaagtgtactatcaatgatcgaggtgcataatgttagaaagagaatttgaattagaaaccgctccggaaatagagcggttttatctccacaacaattttcttgaagaaaaacatatagttactatgaaagatgttgaggaagcattcaaagataaccctatagagttgacgcgaatcaagaacaacaaaagttctgtttggttcctcgaaaaaatctattgaccgaaatccataaatacagtaaagtagcccatgtaacgaaacgtgggctttgtttttatttgaggaacaataaatgatcactgaatccaaaatgacttatcaggaagcactgaaagttttgggcgcaactggtagcgaaaccagcgctgaaatgtccagactcttcaaacgtgcatccttacgcaatcaccccgaccgtggtggtagcaatgaattaatgcagaaaattaaccaggcttacgacgtagttacaaaaactgggcctagtggcgcacgttctgagactgctggtgatgttcgcgcacgttatgcacgtcaaaagaaagaatgggaagaaaaagttgatgcttactttgtagtggcgaaaaactatttcagcaccaaatttaacgcacaggaatttgcggaatacttcaccaaatacactggattgcctaccactttcaaacaggaagtaacaaaaggtagtcacggtgtttatgcttcgttccgtttcacttctggtgatgcttactttgatttcggtttcaactgcacccctccgaatggacaagggttagccgctccggattcatctgcactgggtaacgtttctgttagtacctttgtactggttggaactaaaaaacataaaatggcaagccgtgattatcaatggggcaaaaacccagacaagatcactccggaaagcctgttcccgtctaaaaaactggaaagcattttcagccctgtacagaaaaatatcaaatacaaacgtgctgactacctggcgtcattccgtaagctgttaggcgctgacgttagcggaaacgatatctttgttgaagttggtacactgaaagttcgtttctatcgtcacgtattcatgcgcaaaggtgcttatgtgtttagcgcggtgtatgatcctgctgtatctaagtatcgtccggctgcacaacttcgcggaaccatgttcgaagatgaggacggcgcttgcctggatatgatcgttgatacgttcaaagagttgcagaaactgaaaccgagtgttcaaggcgttgtgaacgcgatcgataagatgaacgcagagtttgcagcgggacatcgttcagcatcttttgttaaacgtgtagctgctcaggaagccgcaccaaaaccagaagagaagccgaagcgcacagttaaccgtattggtaaagaggaatacttcgcagcactcaaagatattggtgctcgtgtaatgcctaccagcggttatgttgaatttgataacggcgctggtgttactatcaacttcaagcgtattgttgtaaaccgtaaagcatactactcattcagtagctttgatttcatgtactctggtcagaaacacattgagtggttgaaaggaatcgatatcgcagaagataccaaaggcgcaagcattagcctactcactgatactctgaaatctttacgtgggatctctgactggaacactgttaagagcgctttagatcaaatgaattctaacttcaaggcgggtaaattctccgcacctcatgtgaagaaggaagcagagcaaaaagcaccgaaacagaaagacgaaatcggcgcacagcctaccaaaccacaggcggctaagaaagatacaccggaagtggaaaaatcacaggctgttcatgcagcacgtgagaaagcgaatatgaacaacactattcgtaaaatgatgactatgttagtcaaagcacagcgcaaagacactccggaagatatcaagaaggaagttgatgcagcaattcaattgtggcgcttgacttattaatcaaatgaactataatgggaactgttaacgcagttccctttttatttgaggaaaatattatgagttgtccaacatggttacgtttggaaaatctgaaagaaggtacacaaaaacggatttatattaatcttggttgggttcctcctaccgattttcaaatggctgagattttaatcaatgctgttaaagaagtaagcgacacttacgaatgggaaaggctctattttcctttgattggtttgtatatgacgcgaaataaatttgaagaaatgaaacttgctgttattcgcgctacgattattaattcccaacaaagatttactttgaaaaatgcatggagttctgaatgattattcaagtatctgtacagggtgacactctgactgtcaccgaatccatcaataccgctcttgctgtatgtcgtgaccatatctcacaaaatcctccagtgactgagatcctggaaattgatgtttgggatcagattggtatgatcgacgcatcatatggatttaccccgcgagatgaagaactatctcgtatcgaatcatggctgaatgaacaggaaacggaatgaaactccctaagaacacaacactactaacccgcgaaaaacttcactctgttgattggtgtcctctggatatcatgatttttgatattgaatctcgcgtgatcaatgcaaaatatcaggggtgtagtattttctctgttgaattcgagaagattcgcgggtatgatgagaagtacaaagaaaaactgaaagttatgattgaagcattgggctatattgtaactgttgaagacaataaaatgtggatcgcaatatgagcatagtaaaagcggtgtttgcattggggcacgatatctaccacgatgatttcgcttttggatatcagcaaggcttgccgtggggccactgtaaagaagatttacagaacttcaaagaagaaaccgccgatagcgttctgattatgggtgcaaatacgtttacctctcttccgggtaaattgcctggtagaattcattgcgttctgtctggttccggtagttttttgaaaaccaaaaaaggcgaggttgctgattacgtgatccacggtggcgggttgtctgctgctattggtacaatgcaagcaacacacccagataaaaatgtgtgtgtcattggtggtaaggggttgcttttagattcaatcaataataaaatggttgatgaagtagttttgacacacatttacggacatcatgtatataatgcccccgcatttaaacgcgatgtttcgtttactgcttctgaattgggtgatgcattgttaaaatatgaattttctgatttcgaaactcagtacatcaaagaacatgaacgcattgaaaaaatcatagtcgatcgatataaaaaggtataaaatgaaacaatatctggatattattaaacttgtacttgataacggtgttgaatcaactgatcgcactggtgtaggtactattcgtattttcggcgcacaagcccgatgggatctaaacagaggtttccccgcaactacctgtaaaaaactattcttcaaaccgtgcaagcatgaattgcaatggttcctgtccggttcaaccaacgttgaagaacttcgccggatgacctggggtgaaaatagcgataagcgcacaatctgggatgataactatgaaaaacaagctattgatttaggatatgattctggttatctggggccaatctacggtcatcaatggcgttcgtttggttctctttatggggatgatgatagttattatggcggttgtggtgttgatcagattgcaaaagtcatcgaacaactgaaatcaactccagacgatcgcgggatcatcgtttctgcctggaaccctgttgatcttgatgatatggctctgcgtccgtgtcactgtttcttccagttcgttgtaatcaacggtaaactgtctctacagtggtatcagcgttcagttgatgtcttcttagggttgccgttcaatatcgcctcctatgctctcctgacgcatattatcgctgatatttgcgggtacgaagtgggcgatctggtttggactggtggtgatgtccatatctataaaaatgcggttgaacaggcaaaagaacttttacagcctaaccgttcaccaatgccattaccgattctaaaaatgccgaaggtaaatagcttacttgatttagatcaagaattctttgactcgataaccttagaagggtatcataatcacggctctctaaaagctgaaatggcagtatgaaaaatggggcttcggcccctttcttaacaaggtaagagaatgaatgacattaaagtagtagtaaaatcctctggtgtacgccagccgtttgacaaagaaaaaatatacaaagtgctcaagtgggcctgtgatggtcataatatcgatgttcgtgcattccttgaaaatgtattagaactgatccgcgatggtatgactaccaaacaaattcaacgtatcgctatcaagtatgcagcagatcatatttctgttaaagaaccggattggcaatacgtagcatcgaatcttgaaatgtttgcattgcgtaaagacgtttacggtcagttcgatcctatcccgttctacgatcacatcgttaaaatggttgaagcggggaaatacgataaagagatcctggaaaaatacagcaagcaagatattcaagttttcgaacgtgcaattgatcatgataaggattttgaattttcgtatgctggttcccaacagttaatcgggaaatatctggttcaggatcgcgatactggcgaaatctttgaaacccctcagtatgcgtttatgcttattgcgatgtgtctgcatcaggaagaaactgggttagcacaggttacgcatatcattgatttttataacgcaatttccgatcgcaaactgtctctaccaactccaattatggcgggtgtacgtactcctacgcgccagttctccagttgtgtagtaattgaatcgggtgattctcttggttctcttaacgctgtaacctctgcgatcgtgaagtatatttcacaacgtgctggtattggggttaacgcgggacatattcgcgcaatgggttctaaaatccgtggtggtgaagctgttcatactggtgtgattcctttctggaaacatattcaaaccgctgttaaatcctgttcacagggtggcgttcgtggtggtgctgcaacactgtattatcctttctggcatctggaagttgaaaaccttctggtgttgaagaacaacaaaggcgtagaagaaaaccgcgttcgtcatcttgattatggtgtacagcttaaccagttgatgtataaacgcttaatgaatcgtgattacattacgctgtttagtccggatgttgctaacgatcgtctgtatgatctgttctatgaagctgatcagactgcatttgaagaactgtatgaaagcctggaaaaagatccaactgttcgtaagaaacgcatcaaagcggttgacctgttccaacttttagcacaggaacgcgcacagacaggacgcaaatacattttcaacactcatcacgtcaaccaacagggtagttttacggttcctgtccgtatgtctaacctgtgttgtgagattgcgatcccaacgtcgccgctggatgacgatgataaaatggctggtgaaatcggattgtgtacgctaatggctatcgttctggataacgctgatatcagcgaattcccgaaactcacgcgtattgcagtacgtgcgcttgataacctgttggattaccagaactaccctgtaaaagccgctctgaaagctaaacagcgccgttctctgggtgttggtatcaccaactatgcatcatggttagcgagcaactattgcgactactcagaagcgtatacagacaaagttcatgagctaatggaagcgtttcagtttaaccttctcgttgcttctatggaactggcgaaagaacgtggtgcatgtggattgtacaacgataccaaatacgctcgcgggttactgcctatcgattggtattgcaaaaccgttgatgaactggtagcacctgtttataattgcgattgggaatggttacgtagccagattaagaaatacggcttgcgcaactctactctttctgctttaatgccttgtgaaagtagttcacaggttagtaactctaccaacgggatcgaacctccgcgcggtttagtgagtatcaaatcttcgaaagaaggacactataaccaggttgtgcctaaccagaataaccagattgatttctatgatctgctctgggatatggctaaacgcggtaacaaagggtatctgtctcatgtagcagttatgcagaagtttgtcgatcagtctatttctgcaaacaccaactatgacccggcaaactatgaagacgggaaagttaaaacagaagacatcattgatgatctgctgtatgctaactactacggtgttaaaactctgtactatcataatacgcgtgatggtgctggtgatgaagaagaagccgccgaagattgcgcgggttgtaagatttgattaatgccccttcgggggctttttaaaggtaaagacatgttaacagtaatgaatacaaacccagatcataaccacttagaacaacctatgttttttggtgaagatactggtgttgcacgttatgaatcgcagaaacacaaagttttcgaaagcctgacgcaaaaacagctttctttcttctggcgtccggaagaagtcgatctgtctactgaccgtatgcagtatgcaaaacttcctgaacatgaaaaaatcattttcgattctaacctacagtatcaaaccctgttagataccattcagggacgtgggcctaacctcgcatttttgccgattgcatccgatgtgagcatggaaacctggatcgaaacgtgggcgtttagtgaaaccatccacagccgtagttacacgcatattcaacgtaacttgcacattgatccttctgtacagttcgaccaaatccttcgcaatgaagcgattatgaaacgttccgcatcaatgacacggtattatgatactctgattgatgaatgtcataagctgaaaaccatcatgatgctacaggaacaggttagcggctataaaccaaatgatccggctgtcgtgtattataacgagcaatacactaaacaggccactaagtgcaaagaagcgctgtacctttgtatgcacgctgtgaacgctctggaagcgatccgtttctatgtgtcgtttagtttcacctttaactttgccgaacaaggcaagatggaaggcaacgcgaaaattatgcgcttgattgcgcgtgatgaagcattgcatcagaaaggtactcagagtaaaatccgtttgtggcaaatgggtaaagatgatccagaaatggttgaaatctcccgtaggctgaaaaaagaagcaacggctatcttcctggaagtatatgaacaggaaaaagaatgggctgaacatttattctctgttggtgatgtagaaggtgtatcgctgaaaagcactatcgcttatattgaacaccttacagatcagcgtatgcgagcggtagggcttgattcaccattcaccccgatccctaacccgtatccgtggatgaataaatggctcaaaagtgataacgtacaggttgccccgcaagaggttgaagtaagttcttacctcgtcggaaacctgaatactgaaatcagtgatgaagcgtatgcaaaatgggccagcaaatacgcgtgattgtcgggtagtaaacaagtacaaaactgattgggatgtcgatattcaaagaggtacgaagttcggcaacccttatcacacaggaaccaggggagaaaacattttagcgtttatcccctggttccagaatcaggttcgtactggggcgatcacgattgaagaattgaaagaacttgatggaaagaggcttggttgtacctgtgcgcctcttccctgtcacggtgattacatcgcgcatgtggttaatgttttgtgtggtaagaaaagatcacttgactttttggatatataatgtatgaaatctgaattcaacttaacccttgataaatgtggtcgcatcgatcgaagttttgttaagtgtggtgaacttaggcattgtgtttattttattgcaattaacgatgaaatagtatatgttggtaagtgtagggatatgtggaagcgtttagacacatatcgcaatgcaaagtattggagagaagccaaccccagtaacatcttaaaaacgtgtcgattggaaatggctatcaaaaaacgaaaaactgtgaaacttatcgtgactactcacgatgaaaatacatatcatgattatgaaatcaacatgatacgaaaatacaaccctgaatggaataaacagcactatgacaaaggcacaaactaaaattatcaataccctttacaaacaactcatgcagttgtgtggtgaatccgaaacatttttcttcgttgatcaagtaaccgtgatgggtacacctgttcgaatctttaactatcgcatggcctcatatacagactggctaaagcctggtgctctggaatgtcgcggtatcatgtttgaaatggatggagatacccccgtatcaatcatcagccgccctatggagaagttttttaactatgccgaggtaaaggcatgggaagcgcttaacgagtctcctattgaattaggcgaagttttagacgtgatgattaaagaagatggttccttgatctcaactttccttgacggtggatttctggcggtcaagtctaaaggttcggttaaatcagaacaagctatggatgcgcacagcgtgttaatggcaaatcgtgaattgctgacccgcttaactgagattgctaaagaaaactatacggtgaacatggaatacgtttccccgaaaaaccgtattgtcgttggttatgattctcctgatctgcgtatcctgaacgttcgtcacaacatcacgggtgaatacatcccttatgatgaactctttgctgacgcgctgttacgtgcgtatctggttaagcgtgagaatatcgaagtactggatctggatgcattcgcaaaagaagcatatcagaatgaaggattcgaaggctatgttgttctgacaacgaaagggtttgtaaaaatcaaaacaaactggtatgtcaacctgcatcgcacaaaagatagcatcaccaacaataaggatcttttcctaaatattgttgagaatacggtcgatgacctgaaacagctattcagttcggatctggtctctctgaaaaagattgacgatttcgaaaaacttttccttgatagtctcaatcgtttgagtgcaaaagcattcaaagctattgaagataataaagggaaatcgcgtaaagattttgctatcagtctaagcgcggatttgtcaaacgacggtcggatcatcttcgggcctcttatgaagtacttcgaagaaaccgatccgcaaaaactggtcgaccgcatcattgaaatgatggttaaaaattacgaccagttcattcctggagagtacaagtgaaatcatttggcgcatatagccgaacgatagaacaagaaaaagcagggattgattccctgctttctttcgttgatgttttccccgaaactggaaaaatttactggaatgataaagcatatcataaaagtaagagaggaaaagaagcgggttctattgtttgtgaagaatacccttatacgaaaataaagtatgctgggaaaaattacatgaggcatagaataatattttactatgttcatggttacttaccaatcatagttgatcataaaaatggtcttgattttggtgattgtattgataatcttcaagaatccgatcccgttcataatatattgaagaaaaacaaaaccagaaaatctaaaactaccacatcaaaaggggttgactatcgttcttctcgtggaaaatatagagcacaaatacggattaatggtaaaacgaaacatataggatattatgatacagaagaacaggcgtctatcgcatatgaggaaactttgaatgaatatcaaaagcatcttgggtatgattaatataaaatcgtggatatggcctattattgttgcttgctccctaatagcccttttttacattgcagttgataccaaaatagaaaacaggcaattgtctaaggatatcaaagcgttacaagctgatatcaagaaagtaaaagagacaaacaacagtaatacagtgatatacgtcgaacagaaaggcaaggatcagcagttagtgaaagatgccggacgtaaagatctgttgttcaaaaaaccaggactgatcgaaatcaagatcaacaagtcctttgaagagtatatgaaggattacgaaaaatgaaaatcgctacactagcgctcgttctgggcgttctgttggtcgggtgtgctgagaagccaccagaaaagattttgcctacgctacccgctaaggtgaatccggtcaatgtgaaatggaaagtggttgcagaagtaagggaaatcgacgggaagaaatatctggtcatgccttatgatggtaatccatacgttgccctttcatacccagattcgttaatcttccgtagctggatgaatgacgttaagcgtcagaaagaccagacggataacattctatgcaccgtgggataccccgaaaaatgcaagtcaaaataattgatacattctttgatgacttgacggtcggaaaggtgtatgatgctgtagaatccaaaaatgaactatggattgatagcgattgggggattgcagtcaatctgcataccgaagccagtcaagaactaattgaatatgagatagtgaaatgaatctgtttatgactattggcgttccgggtagtggaaaaactacctgggcgcatgagaaagcccgtgaattgggtaatactgttacgatctctcgcgatgatctgcgtagctctttgtataatgcgggtaaaggtgctggcggatacaaatacaccaaagcgaaagaagacatgattgcagaaatgcaggatcacgttgttatctccactctgaaagatggtaaaaacgtgatcatacacaacacacatctgaaagaaagtgataaaaatcactggcgtgaaattgcgttggaacacaaagctgattttcatattgaatattttgatgtgtctattgttgaactgcttcgccgtaaccacaaacgcggtcgtgatgcattacccgtttcgcgtctttgggaaatgtttaaccagtatcgtaagatccgtgggttcgtaccagcaatggaaattgtcaatccccacaatcagaaatgcgtgatctttgatgttgacggtacgctaacaaaagtagggcaacgtagcccgtatgactttaccaaagtgatcaatgatccgccaaacatcccgatccagcaactgtttcacctgtacaaaaatgcagggtataagtgtgttgttgtgtctgggcgtgaaggtaatccgcaatgcgcacatgatacatgggttagcctgttgagttatggcgttgaaccggatgaaatttttatgcgtcaagaaggtgataccaggacagattttgaagtaaaagaagaaattttgtttgacaagattttagataagtattatcctgttattgcagtggacgatagagacactccggtcggaatgtggcgagcaaacgggattccgtgcttacaagtcgattatggtgatttctgattgacatataatgtgggtatgttaaagtacccacacaaaagaggattatattatgaacgttattcgtgaagataaacacatcatggttgaacttggcgatcgcattcgcgtagaaaatctgggcgattttaaccaaaaagttcgtttgttgtgccaaaaaattgctaacaaaattcaggaacagggtaaagctccgggcgggtttgaagttagcgccactccggtttctcagtactcctatattgtgtatattcatgacgtggatactaacagcacccaatctttcgggctggtgttaaatcctattactggctacgttacatgggcggctgtattatgaaagtaaaagtaattgatagagcgatgatcacggatgaatctgtatacccagatcctcgttattatggcggtgttttcggatacatcaaaggaactgatattgatgtagtaacaagtccgatcgccgaatacgatatcaacaaagatcagacagaagttcgcgttactacaatcaacggttcagaatatatcgttgaagcgactcctgattttatcaaacagttactaaaggtgatgaaagatgcttgatcatcctggctctatgagcatggtgcttctggaagcattaaaagcatatgatattccttgtcatttcggtgaagtaactgttaatactatcattgacgaaatcgacaacccaaatactttcattgcttgtcttgttcgaaaattcacaagttgttttcgaccgagtccagaaaaagtagtaatcagttctgtttctgcacatcatcgagtgttagatgatggaaagattcaactttactggaaagttctttatcacgtggtgtatcatgaagattgatgatattatgtttatgcttagagcaataagtgcttctaagttctctcaatgtgtctctgttaatgttggtgctgcattgagaaatggtaacgggcgtgtgtttgtaggcgcaaataatacggttgatcctagtcatcgttgtacagatcagtgcaatcacttattagatgataatgggaaactgagtgaagaaaagcgccctgaacattcacaatggtcagatcgcaacgaagtacacgcagaaatgcgcgttattatgctggcggcgtctcatgaacaaatcaaagacgcaactttgtatacaactcattccccttgctcacaatgtgcgaaaaatatcgaattttgtgttgcaacaggtatgattaagcgtgtagtatatctacataaatacgatcgtggtggcatcgagtggatatggcgtctacagcaatacggtgccgaagtagtacaacttgaccccgaagaaatgaataaacatttccggatcaaataacaaatgagtaaatgtatgtctgaactgagtgtaaaagcatcctttgaatatgttctgattgaaaccaacgctaaagcggctggaactgaaattgtatcaccttctggtattgtgactggtgttcgtcaacacggcgaggaaccgatctacggcacagtgttatcatgtgggccggatgtaccggaagaatataaaaccctgcttatgggtaagcgcgtaccgcttcctcatgcacaaatggcaaacgtgccggatcctgaactgattgcaggaaaggcaacaaaagaagaagctcgcaagtatccggttaaatatgtaaccgcacactataaagcgattcaagcaatttacgaataagagatccaacatggctaaacaaattcaagcaatcatcgccgataccgtcgcaaaatccaaaaaacttttcgacaaaggcgacatcctcgaagcaccgacccgcatcgatgtaatgacttcaatgatcattgatgctcaccagggaaaactaaattcccgtgcttcggaagtaatggaatacatcgtacagttcgaggatgtatgcaaatacgccaaagctgttgatccggctgttcgcgaaatctaccgcaaacagttctaaaaatatcggccccttagctcaataggtagagctaatcactcataatggttaggttcccggttcaagtcacgggaggggccaccaaacaaggcaaggcacttagagaagcgggaggaacagaatctgattctgttggttgtaggtgcaaatcctacccttgccaccaaattagggtgcgtagcgcaatgccgttaaatggttcggaatatgcaacctttctcacggagaaggctctgttggtatccggtaataggttccccggaatgcggggtgaagtaaagaaactcccagcccactaattttaatgaggtttatatgaaatttcgtgaaactgtgaaataccataacgcggtcgaatatacacagatttttgttgatatgtctcccgcaaaattcaaagaacgttatggcatgacatttaatgaatggaaagatggattgcccgatggggactaccgaaaaaacttcaaattcagtgaatgttatgtagatgacgatccttacgatcaggatattttcggtaaaacaacacctctcattgagaattcaccagaacagctttacgaatcttgtattgattccgcatacgaaatttaaagagatatcatgaaaaatttacaaaaactgtttgaaatgtctccggcaattagaaaaatcatcggagaaaatagcaatccaacgaatcgcaataaaaaattgatggaactttttgtaaaagagttcgatgattttgattctgaacttcataaagcgcttgaggcatattccaaacaagggttctttgcatcgccgcaagtaaatagcaagaaagagtatagcgaacgattctttgattgggagattgtcaatctcgttcgtagaacaaatatatctccgagcaatcaccaattgatttctcttgatacttcggtattctttatccagtatcttatcagtggtggtttcaaaaatcctgaaattccgtttacaaatgaagcggttagcagtgaatttgatgaatcatttgtatacatcaacacaaacaaataatcaaatggctatcttcggatagccttatttttggggtgtctatgcgctttttaaagtatgcaagttggatcgtactcgtccctcttgacattattactggagtattagcaattctgtttgccccgtttgttgtaccgttctacaacgagaaaacagggcatcttcctaaaggcttccggtggatggaaaccttcgataaccctattgatggtgatggtggacatatccgccgttgggcgtctatacgctatcatctggggggttttggggtatacatgcagcgtgttggctggttgtggagaaacaaggcttataacttcgcatatcacgttttaggacgtgaagcgacaagcaaattcaactggaaaggcaacccaaaaacagaaggtgggccaaaccccgtaaatcatggctatctgctcatgtggaatgaatcagcatggggtttgtacgtttacaaaccgtggctacagatccacaaagtgcaattctgtttgcgcgtttatgctggatggaagctgaaacaagaagttagcgacccagttaacctggatcgtgcaatgctggcgtttcatttcaacccgttcaggtattatgtaatcaagtaaaggtaatacaatgaaagcatttcaaattttagaaggtttgcatactggtacgatctatctggaagaaggtaacgacgttcggatcgtagtatcaaaaacattaactatggattctgtgatcggtaaagctcgcgttactccgtttgcaaagcgagagattgagatcgaatatcagccaactgttaaggtggaaggtggacaacatttaaacgtaaacgtgttgcgccgtgaaactctcctggatgcggttgaacatcctgaaaaatacccacagttaacgatccgtgtttctggttatgcagtacgttttaactcactgacccctgaacagcaacgcgacgttatcgcccgaacctttacagagagtctataatggcaattgatgatatcaagggttataaaccccatactgataaaaaagtagaaacggtaaaccgtatcaaagatgctgaaaatgcattaggtgcaatcctggaagatatcgaacagcgactatcaaattcagatattgattcactgatagaggaagaattagatgaggtgcttgaacgtatccatcaaattcaactagcgaaagaccgactgaaagaagcctctatgtgggcgtgtcgtgcggtgtttcagcctgacgaaaaatattaaaaatcaagccgttgccgaaaggtagcggctttttcttttttggtgtaaaaagttgttgactcccttctcacattcccttatagttaatcccgtagacaagaaaacacttttatgaggatgacattatgaaacgctcttacaacatgaatgaactggttttcttcaaaactcgtcgtgaagcacgtgcttacgttctggcggctggtaaaaatacttctgctgctatcgatatgggtactgataaagctgttggtgctcgttgggccgctgttatcgttatcgctgctccggttactccggttaaaactctggtacttggtgcgcgtcacgccgaaactcttaacactgctgcaagcggtaggggccacgaagttaaagtgttcaagaagcgttcttatctttcatgtgcaaggggttaactatggcacgattcatatataaagtggaatatgaaaataccgagttatctgatacctttttgaagatgattcgtgatcacgggcaacgtctggaaagagtaacgattgatactgcgtttgattgtcctgttgggttggttctaacattatcttgcagccctgcaaaagaatcagcccgtgtcgaaatgttacataaactaaatgcattttatgaaggtggtagtgtatggcgagtattgtaaaatttttcaccgactcagtgaaagaaattaaaagcgctctggaacaatggaacactcgttgtgatgtatccattaaatcagagtacgaaacaacttatgatcgttatgatccggcccgtggtttgcacaataacccccatgaggtggaagtgtgattgatatcgaaacaaataacgtgattcttgtcatagtatcttttatgttgggatactgggccgcatcatgaaatactacggattcaaaacgagtcattttggtaaagcgtatcgcacagaaaacatcgatcgcaaacgtccgtactatgattcgttagtacgagcgggacgtaaacgcgctcgccaggaagggaagaaagagggtgaagatcgtggataactggaaaacatggatatcaattatcgttggtgttatcatcggacgcggtttgtatgatttaatcttttcaataggggttaactatggacattggttcgggtagtcagtacccatcatgcgcgttaagcaacttcgctccgcatccgtttacgtttgacggggtagaatgtgcatcaatggagggctttttgcaaagcctgaaatttagcaacccagatatgcaagcccatgtatgtactctggtaggcaaggccgccaagttcaaaggcaaaaagaaaaaatggtggactaaccagaccttatactggaaaggtatccctattcatcgttcctctgaggcgtatcaaatcctgattgaaaacgcatataatgcattattccttaatgaagggtttcgccgtgcgttggcagcaaccggaaaaagtaccttgacacattcaatggggaaatctcgtatgaacgaaactattctgacagaacgagaatttattagaaatttgaacaggttgagaaatttgttatgaaaagcgctgataacataaaaaaagaaattgaaggaatcaagaaattattgcattatatcgatgttgatatagagactggaatatgtacttggaaaagacccagaaaatctataaatgttggtgatgttgctggatgtaagaaagaaaaatatcatgttatttgtttcgattataggttgtatagacgacacaggattgtgttctattttgctaaaggttacttacctcaagtagtagaccacattcatggtgttgaacatggcgacggtattgataatttacaagaggcatcgcaaagacaaaacgttattaaaaagaaaggacagaaaaacaacaaaagtggttatcgaggggtgtgttggtcgtctcgtgctgaaaagtatcgagcaactataggtattgatggaaaacaaatacatttaggatatttcgatactccagaagaagcaagtaaagcatatcatcaaaaagcgaaagaaacttttggtgatttttataatccattggttaaatgagatctgttatgagtgaaaaagaaagagtagaatgcgtgttcctgttcaaaggcgcgattaatccattagcgttactgtatgcgcaacatgcattacgttcaacgttgattcagagtgttatctataaagcaggtgtgtattatgttaccatcggcgcaaataacatggttgttattgaatcctacgttaaggaatgtgcatcaaacggcgttgtctttgataaagtcgattttgatgctggggtagatgctgtttatatgtataagggttgatatgagttacgtagtttattttgattgttcggatctcgatccgttcgtgcttcaacaggcaaagaaatatcatcaagatgtcgttggcattggtgtaacaaatgatgatatgttgtgcatcgaatttgaatattatcggacatttgagcgtgaacaattcctgggtgaattgaatgcattcaaaagtacccttttctttgatcgttatgaggttatatcttgaaacctgttattcttaccgatattgacgggatcgccgtaaaatggcaaagcggcctcccgttctttttgtctaagcacaacatgcctactgatattgcattagaaatggttacggatgaaaaatttcgtgatatgactgaaatcttcggatgtgatcagcagttggctaaaatccttatggaagaatacaataacagttctttcattcgttatctgaacgcgtatgatgatgcattgattgtgatcaaccgtctgaaaacgcaatatgatttcgttgccgttaccgctctgggaacaacaccaacggcaagccttaaccgaattgctaacctgaatactcttttcccgtctgcgtttaaagaggtgatggtcgtgggccacggtgaaacaaaaactcatcgttacctggaagcaaaagcaaagtatggtaatcgtctggtttgctttgttgatgatctcgcgataaacttaaacgaatgtcataacgtcattagtcagttgccgttattccatatgttacgtggtgaacgtgaagaaacaaatgcacctcaccagttagtaaaatcgtggtttgaaattgaagagaaactaaatgatcttgtcaatccttaatgaacttgcgtctactctgaaaaccaaagagaaagaagcaattttaaaacgtaatgccgataatgaattattgaaagaagttttccgcattacgtatacaaaacagattatgttttatgtgcgtcaatttcctctggtagaagggaaaccaggcacaacaccgctttccgatgcaatcaaagcattactggaagatttagcaagccggaagtatacaggcaatgcagcgcgtgatcgtttactggatattgtatcatcagtgaacattaacgatcgtgaagtgctacgccgtatcattaaccgcgatctggaatgtggtgctggtacaaccttaccaaacagggtatggaagaaactcattcctgaacagcctcaatgcctcgctacgccgtttagtgaaaaggctttacgtcgcatcattttccctgcttactcgcagcttaaagccgatggtgcgcgttgcatggctgatttgctggaagcattaaaccgtaaggtatcgagagcgggtaacgagtacgaagggttaactcagcttgatatcgatctgaaaaagattcgcgattatctgggatatgatgtagttctggatggagaattgatttatgttccttccggaaccgtaccaacattacctgaacctgaaacagacatgcctttttctttatctgctttcatggacgatgatgataacgacattgcgttatttgcggaagaagttcgcaaagtatcgaccccagaagaagaacaggccgaagcaaaacgcgaagaagggaacgggatcgtaaacaaatctctgaaagggacgatcaccgaagaagaacagcgaaacattgtttatgttgtttgggatattattccatatgaggtgtattacggcgaagctgaaagtgttcagacttatgatgagcggtttagcctgttgcgtgatatcctcctggatctttctctgccttctgttcgtttgattcagtctaagctggttaataacattgcagaagcgaagcaggactataacaattaccgcaatgacggtaaagaaggttctattctcaaaaacagaaacttcaaatggaaagattcgcgagtagccgatcaggttaagctgaaaaacaaaaccccgattgaactacggatcattgatatctacgcgcacactaaagaagaccataaggtcggcgggtttgtggtggaagatttatccggaatggctcgaacgaataccggatctgggttaactgataccgattatcgttacgatgatgatggtattacccgtgtatacattccattagatgaacgtggtgaactggatcgcgaatacatcatggcgcataaagatgaatacattggggccattgtagaaatggaagttgacggcctccagaagtcgaaaacgcgtaagaaaggggaaccggaatacagtttcttccttcctattatcaagaagataagacgcgataagaccgaaccagacgatattcatgttgtctttgcagatctattttaataaaaagcccttgactccggtcgggggctttgttatattgggcctatcgaaacgtaaatcactaagagaatatattatgactagtagttatcagaaacacaaaacccttatggcaaacctgtccggtaaacatatcgacgaagtaaaatctctgctgacagtgaccgaaggttcccgattcgaaacaaatcacattatcaaaccttctgtgaagaaagtactgaaagtgatttaccgacatccggtgtatcagtgcgttcatatcatgaacagcaacgcatttattttcgtatataacgaatccgatgataagtgtgttggtattttccgaaaacctaactttgaatgcatgagcgaagcggctgttgcaaccccgatcgttgaagaatatccggattatgttcaacgcaacatgcgttatgtgcaatcccgacttgattatgcatacgatttcaattctgacgcggtagaagcgctggcggatatcctttgcaaaaaccagaaagatcgtcaaatgacaaaatatctgactgatccaacaccgccaacaattcgaatttctgttgaagttccgtttgaaaatcatttcatggcagttgaagcgcttgctaaacttggtttagaagtgaaaacagaagccgtttaatagcactttttgttaaagaagcctcttgcaatgcagggggcttttttgtatagtgtgttcattgaaacgaaacacggagataaacaaaatggctcacatgatgaagaaagcagaattccttaacctggttaaagattgcggattcgctcacttgaaaacttttcgtggtagtgtttacctctatgaccgcgaaatccaggttgccgaagtctattgcgcttctaacatgcaagaatctggcattatctctgcaatgaaccaatcaatcaaataccgtaaatggatgggctgattatgaaagttaacgtttcttatgaatctcgcgttaatggcgcacagtggcggaagctggataacggacaagtggaaaggcgcttacctggttccgatgagtggacacttgcggcagtgttggaaaccgaaatcgatctggcaacaaaagacggtattttgtttgaggtgaagaaatgatcacactcagtgattatcttctgtttactgctctttgggcggcttcgatattcataactgctttgatttacaataaacgtgatgattttgggttgtgggtattcattcacgggtttcctctgtctatgtggatcgtgatgactgctgaaattctccattaatagcactttttgctaaaactatcttgttcttgtttggtatattgtgttcatcgaaacgaaacagacaaaaggaacatcacatgaacttcatcgatatcaacaaagatttagaaggtaaaaacatcaaactcgttaaccgtgaaatgttagagagtcttggtaatggcggcgaaaaattcagtgaagaattctataacaatttatcgttgatgactgttaaacgcgttgatgttcagggtggttctggttgggtttctgcaattccggtttccctggtagatcaagcaacatatgacccagttgccgattcatgggatctagaaatgccgttggtattcgaagaagtcatgaagtgctacgaaatcgcataagggtattattatgaatagcggaaaattacaaatgaaagttagcgaagaagaagttaaagagcggttatcggtagcaagaagattccttgaatctatcgaccctgataaacttggaaaatgccctgatacgatttgccttaattgtgggcgttctgttcttgttggtaagtgttgcgataatccaaatatagttgtgatggaaaaggaacaagtatcccccgaaacatgggatcagatccaggaaatcattaaaaaccctccagcgccaaccaagaaattacgtgaattgatgacaaggaaaatgaaatatgagcaaatttaaattgagtgcaaccgttcgccttattcgttggaatggtgaagagatccgttatgatgaccctgaattcgcccatgaaattctttcacatcgtctgggattgaaaaacgcgtcattggttcaaactgttaaaacatcagcagagccggaaatttggcgttgtgttatcctggatctcgataacaacattgactatgatgatcctaagaactatcctcttctggaagcacaagttgagaatgctccagaagacagacagtgttttttggttgagttaccacgcgaacattacgaaaacatcataaaggcccgtaaaaaggtcaataacaatgttttcgatctccacctcggattgtttgaggattaagtactgctagttgtgttcgtagtagcggcgctggtaggttcccccacctgtatacattcaagtgtttgcaggtggaaatcttttgatacgtctcgaacacattcaacgatcagatattttcctgcatactcttccccaaatacctcaatgattgcccctaccttaacatctaaacgaccctgctttatatcgaatcggatccggcgttcatagctggataacaattgcattttagacgcctggaaaggtttaccttctgaatctgggttctgaaagttggtatcatagattgcattacggtttgtgaagatccatgtattttctgtgtctgtatcagccagtatgtcaccgtacatctttttatcagtcaatgacagactaaagaaactggcatctttaaacagcgttgtgttatccttatgggtaatatactgggcttctgtgaatactacattgtcaccaatgaatatattatcaacgttaaatttgtatgctgggatcggtatctgggccagaatgtcagttgaacttttaaggaaaataccggaaccatcttcccacagataacagaagtcagaagaaactacactttgcccgttgtccctgatataatcaaatatatcctgatatgtaccatttagacatccaggagggatacgtatgttaccgccgtcaacttcgggggtaagtagtttcattttgctatacagtgccgtcatacactctgtaatcgtctgtacggcgttgttactaaatgaacgagcaaacttacgtctgaacgttttatgcagcggagagaggttcatacgcagcacagagcggtttttatcgtcagtatctacgttagagtaaagcaatccgtaataatgttgttcctgtgtaccgttgtactggaaagatacctgtatgattggttggtttagtttttgatagaccaactgtgcatcgtatatctgcatcagcgtttcagatgtaccgttaatcatcgtcttttcactaaacgagacaagagcgggtagcaattcagtgtatgcattgtctacgtatttttcgtatgacgcatataatttaatcgatagtattcgattgacgattttttcagccataaaaatccctcctaatatatcctatttactaaatagtaaataatgacccaggttcaatttgaggcaataatgaaaaataaaactcttgataaatttatgactacacggcttgaaatcaagaagacaaacgttaaaaccgttcatcttccggatggaacagccattgagatccctaagatgtcgtatcgtcattttgtaaagattaagactctgaaagatgatccagttgcgatcatgcgattcatcattgatgacatcaaaccgcgtgaactaacagcagcggaaattgaatttgtgttgatccatatgtatgcacacaataacgctgattatgccaatacgcttaaagaaattgggctaaatcttgatgacctcaaaatctccgaaccttgctatgattttacgtttgacaatgtgcggttagtctttgacaaacccagcctgttaaatgctcaccttccgttcctcatcaaagaggcatatgttgacggtaagccagtagaattaactaaggataaacgagacgaattaattaattgcctgtaccgattcgaatatgatcaggtatcgcgtggtgtcctccaggaagtatacattatccatgaggggaaaaccatcaaagggcttaacatcattggtgaatgataatggctaactcttatttcaacgaagaacaaaagaaaaagtttctgaacagaaacagcaacaaacaaccagcggtcaccaaagtaacagcctcccttgatgctgaaagcgcccgtgacctaaaggaaatcaacgataatacccttgaaagtgcaatcaatactcttgatatcaaagaagggttgaaatcgtttgaagaaaaattccgtgacaaattcgcgggattcaaagaacaatacgaagaggataaaaaggaatcattagccgaacaactacctgatttcgtcggcccgatacgtcctatatccttaaccgatgataactcaaaaactgttgacaatacagtaaacgttaaccaaaatggtcagttcggtaagctggaagaaaacactgaatctatttttcatgctatcaacaaacttgttgatttatatgaaaatactgataaacataagcctcttcctgaaccagtggaagaacctgatccatatgtagacaataaaaagaaaaaaatcaatgatgatgagaagaagagaagcaaaactctggatagtattgctaaaagtctggtttctatcaaaggatttacatcgcagatcctgagtcgtatcattggttactctttggaagctcttgctaagtttgcaaaatggacactcattattggtggtcttgtatttgctattgatgttattagggatataatcaaaaactggatggaagatatcctgaaagaaggagcgtcatcaaaaaaattatttggttcgtatcttggtaatgtcaaggctatagttgaaaaaatacgagacggtataaaaacatttggcgaagaaaataaatcgcttggcgaatcgttaaaagatcttttggtagaacctatgaaattattaggacaaactatacaaactgctattacagagggtattgggcgtcttattcaatcattaggagaagcaacgggtagtgataaaatcacatcagttggtcgcagtatgcagatcagcgcgttgcgtgataaacaggaatttggtctggaattgtctaaagaagacattatcatgatcaagaaacaagatctcgccgatcaaaaagaagcctacgaaaaagccagcaccgaagaggcagcaagacaagccctaaccataggggcaacacaagttccaaacggttccatatataatgttcctcttacagattatcaagaacagaataaaaaagttactgatatgcgtaaagaagaacttgaaaatatgaagaaaaaattagaagcaacacaaaaagaagtagaaactattgaaaataattcagaggaagcacagaaattagccgacaaagaaaacgaaatcaatcgtaaacgtgttgccgaagaaacgaaacgtttagcacaagctcgtaaggaaggcaaacaaccgccagaaggatctgaaaaaaaaggtgatgatcttctgggtaaagcaaccaattacgccaatgctgaaaatattgatgccgatgacatcaaagatattaacggtatgttagaagaacttgaaaagcgtcgtaatgaaggaaatctggacgatgtacagaaggataggatctctgaccttatcgaacaattgcaaaacaaaattgcagcccgtacagaatccagcgccccgatcgacgcaccgccaccgttagcagcaaacaaaccggatgctgataagtcaagcaacatccaggttaacaacaaaactgttaacaacaacgtaactcattcagtacaacgcacagagcataaaccgcttgtgacgctggcataaggaacatataatgaagttttctattattgatgacagtataaacactctcaaaaatattaaaaatcgcggtatcccctctgggggtgccgcaataaccgaagatgcgttaaaacaaccaatagttactgccgagtttccggcccaacgtgccgcaggtattgataacgcatataacgcttctagtttgtataacaacggaatgttgttcaccgcgtatgatatatctagtcatggtactaaagacgactatcgttcgttgagacaagccgcccagaacgcacaacaagtattagcaaatggaactggtaatgtcaagtacaaacaaattataaatgggaaaggtataggaacactatcaccagtttgtcaaatattgttgcctagaagcgttaacgataacgaggttaacagccatcgatatcaagatgcaaacgatagttggttgactaaaggattaagcagagttgcatctaactttgtatggggggttgtggaatctgttactggtggtatattagcagatcgaagagaagcccttgatgttggtacaagaggggcatttcagggttctgataaacgtacacgaatgtactataatacgtttgttatcgaaaaccgtaatgacttgcttgaactggttaaaatttattacttgttcaccgtgcttggatatggttccacttctgctgggggtactgttaaagaagttgctaacgaagtaaaaaatgttttcaacaaaggcggggcgtttttatcaaatctaggaagtcctgatacaactgctagtactccagggaggtttagtgatggtagttatattaacatggggattgatcttttatcgaatacggaagttatcaaatcacctcctgtctggtttattcgtgatttccagtctggtgattctttgcgtttacctcattcgacctttgggccagcaggtattaccagtgttcgctttgggcgttctattgataatattgtaaatacattaagagaatcaccaaataccccgatctcacttgagatcgaaattcaatttatggaactgatcgatatgcgtcaggattctatttttgatacaaattactaaggagatatgatgttttacaacgtagatgaatttttatcaggtatggctaatcgcgattttcagcgtagcaacctgtttagcgttgtatttgcaaccagtcccgcatcacgtatccttgacaacacgtttggtagtattcgagatactttgattgatggatctattagttctatcaacgcgaacaacccgaacgaattcattaatgctatcactggcggtgtgagtaaattgtttagttacaccgttgataaggcgattatgtcgctgaacaaaacaggatttagcaaaatcatcggggcaattagcccccgcttgattacttccctgtttggtgatagcatgtatggacagttgttagctgaattccgtgataaaatgatgtataatatgggtttaagcatcatgggagttaacctccccggtaaatccattgggtacgaatacgtttataatggtggcgtacctcaaatcagattcactcgccctgagaatggggaattgtcgctgacgttccgcaccgattcagaagcccgtaacctgaaaatctttaacgaatggatttccgctattcgcgatgatgtaacagggcaatacgccttcattgatgaagtgacaagtactattcaggttaacttacacgatcgtgatggttcaccgcatacaacatacgtatttcagaagtgcttgcccgtcaaaatcagtaacagtgaattgagctatgagaacaacaacgaaatctggacatttactgttgattttgcctataaaacatcatgggttgtcgaggctgataaagaaggctgggaagggttcaaacaatccgtagaggaaggtttagccattgcagcacgtaccgcaattacaggacaataaaggggctacggccccttttgaggatcttatgtttgatattattcgagtaacattaccatcagggatcaaacgattccctatgtttacagttaaagaccagtttaaactaatgctgacccgtattgatatggaaggtcggccccttaaagagcaacaggaaatactggatgaagtgttggatctgctttatcctgggtattccaaaacagaacaggaatacattttcagtcgggtgtattgtgcttctttcggtaaaaacgtcattaaaatttctattggcggtaaaggtggacacaccgaatcattcatggtgattaatgatatcacactgaaaaatgagtacaagttgaatgacgatatcacattggggtttgatttcccacgcacaagaaatattacagaagagttatttcttgaatgcattagctatgtgttgtacaaagaaaaacgttatgaatggacatcgttaatagacgaaactaaagaaaatattctcgatatcgttgagttggacgatatcgagaaaatcgttattatgttaacaaagtctatagatgtaacggtgaaaggtaaatcatttagtggtatgttaaccctgttcaagatcctgtttagtcgtggggatctggatgaatttgtgaagaccaactatctgctaaataaaaatggcctgaacctggaacctatcatgaatagtagcccgatggaaaggcaaatttatactgcattgcttgcagaagacttgaaaaaacaaggtgctgttaaatgagaaagcatgaatataaacacgttgagaaatataatgttgattatcgtcctctgacacatacagagtttacccccgacgcagattttatcaaaggggatgtttacctgtatcaaagagaatatcttttcattctggcacttctggaaagtaaaaatattgatacccgtcaactgttcatcaactgtgaagaatgtcaggaaagaattgaattccagcttaaacgcaatcaaataatggttgaagatttcgacgataaactatacgggaatgacgggatcgcgttatctgttcaccctcgtaagactggcgatgaagagatccccgatcttatcgattacgtaatgatagacggcgaacagatcatgtggagtgattgcagcgacaaagataaagaaatggtgttggatgcaatcgactatgcaacctataaatcgatttctaccgccctggataagccagcagtggtcgcaaacattccggtaaggtgttcgtgtggacatagccatatcgtctctctgagaggcttacagcaatttttaaaggtggtctaaatgggtgtaaatctgaggttgctatatagcgatatagaacctaacatgcaacgagattggaataatgacgtagcggcctcaaaaggggccgcagcagtgagaaatagtttgattggtatcgtaaccacgatcaagggtacacgtccatttgatagtaactttggttgtgctattagtgatatgctgtttgagaacatgaaccctctgacagcggaatcaattagaacttctatcgtatctgcgatccggacatatgagcctagagtatataatctttctgttgaagttattccacagtatgatgataactcagtaacagtaaccatctattacagcatcattgatgacccggatgacgtagagcaaatcaaactacagctttccgcatcataacaaaaagccccttcctttcggttggggctttctcttagaattcaatgaatcccattagtgtttgatatcgcaattcaaacggggagatataactttgcatctggttttgatcggatacgatgtaataatacacctcatcattatcatcatatagcgcttctttgatgatgcaataacgatcggtttccacgttcacataaagagtatccatgtactttgtaactttggaaccctgtgaactgatttcacgaatagcgttatctatgaaaagcgacaatgcttgcatgaagttatcaaactcaccatattcacagcccataatagaaattgcagtgtattggtgccagcctttgattgtgtctccacggcggatccatccaatttgtctacccccgatagatacacaccacactttaccaacgggactatagaaccgcacaacttcttttaataacagggacatgatcccacattttgtataaggattcatttcaacctcatttcatatcaagtagccaggaagggctagtttcaagcgaaattgcagtatattcgtattttacagtataacctttgaaaccgaaaggaatgactgcattttcattgagatattttactttatgctttgcttcttcttcattcagagcagcacagactgttgtttgttcaacgttaccagcaggagaagtaaatttttcaatgataatgtatacgcagttcatcctattgccctctttccattttttcaagtttcagtgtatccacttgtagttgaagtttaagaatacaacctttcgatatgttatacaagtagtcactaacgatttttgactttacctgatcgtaatcagaagataacgtaatccaatcatacatcgtttggtatgatggaagatacgtacattgttcttcttttgataacgctttaaatgattggtaatcggttggaggttccgaagcaattgcggttgtggtcataagactaagtgcaagtagtagatatttcataatgtattcctcattgttttcgatagaaccaatatagcaaaagccccgaccgaagtcaagggctttttcatcaatgcaagaaagatttcacgtactgttcgatcttttcacgacatgtatcaactgaggtgctttccgcaattacggcatgacataacgcctcgcctccgacccagaaactcatcatgtactgaatatcacgaccttccatttctttttgatgcgctttgattcgatcgaaagcgttttcgattgtttcagtagcagtaagcatttcggattccccgtcaacctccgccagttccccatcgatcatttcgctttcgacttcttcccagtatactatcgttatcatgcattaccccagtggttaaccgtcgtaatccccgccacaattcacatcgccttcaatgaacagttcgcggttatcacgtaataaattatactttctttcgagttcaggcccgaacgcgtcggcgtcttcataccagctataattgtatcttccgcattcatcatcatattctggttcatcgccgcgttcattgaagtgaacaattttgatatcgtccatccccagttctttcaacttatcccagatatacgaaatctcaacactatgagaaccgaacgcttccagtgagatcgtaccgtcgctatcgacttgaggaataccccatttcgaacgagtatcatcagtgatcatatctattaatgactcgatattattctcaccgtagatatcagcaacttccttttctttaccagggcgaacaagtccaatcccgataataaagctactgcttgagctattgctcacaaacccagaacgaattttcatcgcatcaccatattaccaatcatgaatagagggattaacgcgaatacgataccccatagaatgaccttatcttcacgacggtcacacccatgatagataacacctccagcgaaaatcaatacaacaactgaaacgaacgcgaataaagaaatcatttgcgggtatccattctcatagaaacttctttcaggatcttattcagatcgtgaagcgcatcttttacgttaccttcattataggtaagcatatcctggtacagccctttcaaacaacgattgataacatatgctttttcggaaggtaacattgtcccagaacgattataatctctgaaaatgtccatcatcgtgccgttgttaccaggtaatgacgggttgaagttaaccataccggacatcaaactatcaacatacacaactgttgtgttatcagaacgacacgcgccaccaactttaaaccagttgctgaacacatacggagattcccgcacttcgctcaaatcggttccgatttcatcgatgtttacacgaatgttgttaaaatacaccgattcatcaatagaaccatgacgccataagatagcaccattgttatttttgaatccgactacatcaacctgccagccgttatctgttaaccggacatcatcaacgacgatgaaatcaggtagctgtgaatgaaagccgatgttttcaggacgggaattacgaaacccatcacgattggagaaataaaggatgtcgccttgattcagttcgcatatattcataagatttttaaagtccaattcaagtaattccacaagtcacctcaaagccccctttcgggggcaaattcattagagtttgacttctttttcttccagaacgattgtgcaatcaaatttcacatctttccagaattccgctgcaacgatatctgttgcggtaacgcttacgctggtttcttcgaaatccagatccgcaaaccatgcgtgtccgacgacaataccgtacattacacgactcaggcgattattaagggcgcgaacctctttaatagtttcctttgtctgcttatcaagatactcgatcaggtcattcttgtcaagcgcttcgatctctttagatacggtatcgtaagcccacagaatgatcaggtcgccattgttgagtttcttcttaccttcggcgcgttttgcaacggtagccgcaacagccggaagtgatgaaacgcctttgattttcacgttcagttctttcgacatgtaaacatcagtcgattctgtgcgctcaaccttcggagagaagccgtaatcacggatcccttgctcagacaaccattcaccagccgcctcaccaaagcgctgtttaagcccttctgcgttgcgtaaaccaatcgcgttatcacggaagaacttcattaccttctgacggcctttcaggatttccagacggacgttatcagcaacaaattccttaccagaaataccgcgagtcatcgaacggttaaccagaggcagagaggtaaagtcaaccagtacagacatacggtcttcaccaattttagccagcggtttgatagtcagaccagaagcacgtaagtttttcagagtcggaatatcggtttccagcggaagtaccttaacgttcacgataccatctttaacaatggtaaagttacgcacttgtttggtttctactttttccggcaatccaaactctttttgtttgctttccggaatggttacataaccttgcagatccgtattgatggaaatgttcggacgggaactgttacccaccaggtgtttcactgcaactttcgttgtggtttgggtaaattccggtttccatacttcatgcgctaccagttgcgccgccagtgctttacgttcttccggagtagaagcgtttgcaatctgttctgacagtttatccagagtatcatcatctttctggacagtctgacggcctgtacgattgtacgcccagtgttcagaagacaggtcgatcacggtgtcggtttctgccaacagttcgagagcatcaaccaaagtaaacgcgttttcatcaggaaccatgttgtagtcaacaccatccatcagacgtttagccggatcaacaaccgcttcggagatcatatctttagcgttggaataatcctgtttggtaaagcagttatcgtatgctttaatcagacgcacatcacccagttttttcagaactttccatgccagatctggattcatggtatgaagcgcatgatacagaaccacatacagaacctgttcgccttctgctgttgccggatcgaagccgtcaacgtcattgatcgcgttttcacccagcgcccaaatgtttttgatatgttccggaaccagaacaacaccatttgcagcattcaggacatacacacggccttcatccaggtagatcgcatgggttgcatcgccaactttgacttcaacacgtgcggaggtttgcgcggtaatgatttcatcaaatgcaggtacatacgcatcaaacccttcaacgaatttgtgtaatgcgttggttgcttccgccattttttccagcagaggacggtttacataataaccatattccaggaaagcaatgttgttaaacgtcaacggcagagtagaacacgctttcaggatatcatcagtacgccagcagttatcataaccatcagtcaggaagatcagactgttcagattgccattatccgcttgcagatcggtagcgacttcaaccgccagttgcagaggttcaacgaagccagtacatccggtcggacgcagataacgatcgatagcatcattgattttgctcaggtcggatacagagctaaccttttcgccaacgaatacagaaccgaactgaccacggctggagaaatacagaatagatacggtatcatcctgtttaaccagcgttgccaggttgtttttcaggtgctgacgaatgcgcgggagttcgttatacatcgatccggatacgtcacaaacaaaaacgtggttagtcggggttggtttggctacggcgtttttgaattcaatgttagtgatcataattttctcatttataggtaaatttgattaaaatttcgtttacttttttgctaattatatctaatgcatcatcgcatccaaacttactactcaacaatgaaacaaaatcatccatcgttgttgtttgagactcgccaacgtcaaaagacagagcgtaggcaacaggatttttaatccttacgatttgaatagtatactcattcaggtcaaaccgttcaagatattttcgcaaagaaaataaatcaatcggtactggtagagtttgactaaacgttatttcttcccccagttgataggggggcatttttacacagatttcgtattccatcagtgatgactcttcatagtgtgttccagattacggaaaatttgcccgtgttcaagctgggattggaattctccgcattcatcagagtaagtaaattcataaatgaatacaccgtcctgattgccaaatttagagttgtactcttcatacaaccacatcttgatcagagcgtctttctcttctgtttccagatcataccagtcacgcccatcataagcaagcgcaatttgaggattagaccgatatcgagtttcggcgctatcttcggtttcccattcataacgcttatcatcatagtatgattcgaagctatttcccatatgaccgcccaggtcgcggtgtacctgctgtacaacttcttccgctgtcgggcaagtcatccagctataaccacagttaggaacacagtcacccatcatttcgcggagattgttgatatcagtcggatccttcgggaaccgtacaataaagctacttgatgaactattgctcacaaaaccagaacggattttcattataatttctcccactcaaacgttgtgaaatgttttctttcgtcatacccaacagtacaacaatgtgttggctttcctgtgaatccatcaaacacagttatacaatagtaatgcaaagatggaagcggtgtatgcttaatgtagttgatcgcgacgttcaggtcaacagtagaacatacacaatcagacgtttgatcaaaacggccatcaaaaatcaactcaatgctatagatgttcatctttcacttccttcatatttttcataacttcttcaaaagttacggggatttcgttgtactgtagtgattcatcatcccatacatcgcgatgcccgaatgttgaactttttgcaatgagtttttcattttcccatacatcaatagtaacatgatcaccaagataagggaaattaggaactttgttcagcacatcaacacagttttgtaatgattcagaaacatgaacaatttcagtgaattcataatcagcactataagaagctacgtaaatcatcaccaccccctaacgatgctaatcaacagtaaacccaggatccagaacacagcaaccgcacaaatacgggccattactacatttccgcgactagtccactccgcactaaggaacaagagaacaaacgttaacgcgtataaaaccatttcaataacttcggtaatcatataaacctcactgaacataacgattgtagttgatgtgccacatgagactagacacaacatcggaaacaatcaaaaggaacaaaccagcaatcattatcaaaaggataactaaccaagtggttccgatattttgttttaacgacaatagcaaacacataatactgacaaaagcaaggaaagaaataacaagcatcacgattgaaggggccataatataaacctcacgaaaaagccccaaaaggggcttgattaatcaatgtccgaacacaccacgaatagactctgcgaatgcatacagttcaggatttttagcttttactgtttcgatttgctccagaatgtaatctggcttgtatttcgcaccgaaccagcagtaagagaaagagcgatcccacatgaacacgttatagtattcaccgttacgaacttcaaccatcacataaccaggattagaacccagcggataatctttcagaagattgaatttcgcgccagcaccagtacatccgttaaacaggtcattaaaagtcatggtatgttccttttgtcagtttcgtttcaacaaggtcactatactattcttcgttagcctatgcaagcgcttttttgatttgttttgcaattgcttcgatcaccggaacagatacagagttaccagcttgtttgtacgcctgtgttttgctcttatgcatcttgaatgaatccggaaatccttgcaaccggaaacactcgcgaggtgataacattcgagggttcttaccttcctgcaataccagacattgaacaccatccttatagtattgggctgttatcgtcccagtacacacagaatccaccataacggcctgataaccaaaccccttgccgtttgccttgtttcgttctttacgctctctaaagcccttccaggcacgatctgatatggtgtattgatcattatccggttcgagaatgtcaccgacccttgttggggtacgtggaggaacaggaaaactaaagaacactggatcgcgaaagcagacaataaacacacgctctcttcgttgaggcaatccaaaatcttttgtattcattacctgataatggatatcgtatccttcgtcctgtaacagcctgtagatggttttaaacgtgtttcccttgtcatgggttaatagctggggaacattctcaaagaacagcacagagggctttttagcccgtataatgcggagtatttcaaagatgatagtaccgcgaggatctaacatgccctgttttaaacctgctttactgaacgcctgacaaggaaacccagctaacaggatatcatgatcaggcacatcattttcatcaatggcgaatatatcaccctgaatattttcatcgccccagttatcagcatatgtttgttgtgcatgtttatcgatttcagacgttaaaaggcattcgaccccgccgaatgccttatcgaaaccgagcctcacgccaccaacaccagcgcaaaggtcaattattttcatacgtcgaaatcaacctcatcgattttgtatgattcttcgccaatatcagcccatagctgaatattcacgcttttcgcatcacgataaagagattgaccacaaagcccacctgtataacaagtttctgtaatctcgttaacttccaggcggaggctattgcgcataattttaacaacagccttttccattgcagaatccagggttttagtatcacccaatactacatctttaacgttcaaaataacatcactcattatcgccactccgtttcaattccgtgtttgtatgcgtcaacgcccagaggggtgatcactaaacacatatcagtatttttcgttggcgaactaaacgccattgatgcgtaacctttttgaatcagggaatcacgccctgatttactgggaacatcgttgaaatccaaatccaacatttttgacgagtatccgtaaagtttacacagaacatcaatttcagcgccagataatttcggatatgtcatttatagtacctcacaacatgttcagaatacacacgttcaatgaaatcattccagaaatcgcgatcaacttctttcggataaccagatacagccgccagcttttcaacttcacacatcgttgattctagcgcctcttgcacggttgcgaaaggaacaccgccagctttaaccattttcaaaaatgcgctatccggaagaggatacacaatatcaccttctttgaaaatctggatcaattgcataccaccgcgcaacgcatgagaaagagctttccagtcgatcccgttgttggcttctgcttgccgtgcgcgttccccgtattcatcccagagtttatacacggattttttcatttccgctacggtgatcgtagactggaatttacgccccagaacttcgtaaaattcctgacaacctgatttcagtgttttgtctgtaacgaatcgacaaaactcgttggtcgggaatcggttagaaatctcaccaactttgatgcgcttgccgtagttagattcatctacgttacccagcaatgatgtgccataccaggaatcaggaatcgtctgtaacacatcgacaacttcacgcagtgcagccaggcgagaacctttaacgccatacttcgccgcttgcttacgaacataaccaaacaggccagttagttccgtagtgtagaagcgtgaacggttagcgcggagatattgccagatatcagagttagcgatcagtttgctatcatctgcatgaagcatatcaatcgccacggtgtcaccatcacatgcgaggctgataaacttttgcagactgtaaatctgacggtctacgtcattaacaccgttctttgagtttttatcgccagttgatgtatcgatagacttcttcgcagtgcctaacaggatttcgcgaggatgagggagatagatccctttgtagtctttatcgcttgttggtgtttccagtccgtacaggtgagaaccgaatacggtttccataatcattttcatcagaattcaacctttaatgtttttgcgatcccgcgcaattcagcggtagtaatatccggaatgtttgttccgtagctattcccaaatacttttttaatcttatcacacaaatcgcggcgatacaccatttctttgtattcttcttcgctacgatacagttgataacccatccacccctcagcccacccggaattgcgcttgattttaatattagtacaacaatcagacccatcttccggtcggaaagatgcatacaggtactgacgcgcaactttttgtacgtaaagggttttggggttgcgattttgtcgctggtcactacggatcccagcatcatacaacgtatcaccaactttcacatcacttaaatcaatcatttacgtctccaacaattagttttttcacagtagtgaacgggaacagacacgcccaacgtttctttactgcttctgttgtatgttatcacaatgaatcgattttcgccacccctaacacactccagatccaaaatctcgcgggttcctttcgtgttcatgtctgcaacatagtattcttcgttgttgacaatcactatatccgacataatcaagcgaggtttcatgcagcatacacctctgattcatcaatccattccagatcctgattgagtgattcaatcagctttttatcgcgtctggaaataacaacggtagaacctttttctgccttcgcgatgatatcaccagaagaagtgatgtattcaacctcataatcacggcgagggcttccgagtttatcaccagggactacattccgtttaacagattcatgggatttttcggtgaataccaattcattctctacatgggtaacaataccatcaacagcagaacgagaattaatataaattttgctaatttccgccatgaaaacactatctctcagatatcgagcagtcactttatctaaacactgagaagacactttatctccgccaggatataccgagataatcattacatgaccctgaacacgggcggttcctactttatgcagaatgtaaaccgttgaaccatcagaatctttagatatcaagatcacactgaatgattctttcttttccttccgagtttcaccacaggtaaaactcacatccagaaaatcaccaactttaacggcacggggttttgctacttgttcacgaacactaataacagggatcataatcatttcctcacagtttcaaattcttcatcagatttccaatacacgttaaaattacgacaatcatgatcggatgtcaacgtgtatttttcatttgttttttcgtcagtgataaccatagtttcattctcgatcgagttaacaccgtaaacgaaaacattctcaccacgtttgtttaaaaacgcatcacccttttcaatcaactgccaacaggtaacaggcaaaccacccggactaaccgggcgggtaacaagacaatagggatgtttaatcatttaaattcttccattgcataggaagtaagatctttgaaataccttgcggtgttgccttctgggttgtttgtaatctccatcaggataacagcactatcaactcctgctttcttagccatgaatgaaagggcttcggtagcaataatcgttgctttcataacatcagctttagaaacgttgattgtattcattttttcttccttttcattaatcacttggtatgtgtgtataatacaaaagccctcacgagaacgcaagggctttttattaaatttcgtataaatctggattcacaataaccgcacataaaagatcatctatatgtgcggcttcttgttctaaggtttgcttagatgaatgtgctttcaagcaacccccgtaaaggcgtttactatctggaaatgatcatcaaagaattccccttgtcgttgcacgacctcatgcataggtagccagaacgcgtctgctgcatcatcagcaccgcccatgatacgaggcaatgaaccatcgttattaggttcgagcttgatatactgtgctacagtcggttttgagaagtacaccgaacgtttcggatgatcgaacagcatcgaattacggatagaaccacgaataaccttttcaggtactttaattcgtacttcttccagcaattcacggatcgcgcaatcaaggaacgtttcattaccgtttttgtgtccacccggaagcgccaacgcatctttaccaggcgcaaacttacgacgaattactaacacgttgttattacatacgaccactgaatcagccgtgcaacagttcagagaatccggatacggatattttttgaacttgtcaatctctcgttgccagtgtgtatcttcatgggacaaacgttggaattcttttgtttgtgtccattcatcgataaaggaaaccgtagtgctaggcgcatattttaacaaatcttcgtcccagccttcatggtgttcccagataattttgcgtaaattggtcgaggacagatcctgatctccaaccttcacaggttcaaccggaatatgattccatccgaatgctttaagccagtaagaatctttgtctttttcgtacccgacgatcgcaattcgatcatttcgagtttcatcgattgccatacgaacacgggatttccatttttcctcgttatagaggtaatccggaatgtacgcgaatttgattctggctgcatcttcaacatcaagtttgcagatagaccagcgagtgatcattgcttgacgctgtttagcggtcaatgggtttaatgtgttcggatatgcataagcagaaccgatcagaatgtaaaccgtatcagcaacagcaagggcttcccttaccattttctcatgaccatagtgaaaaggttgaaaacgtccaattactacagctttatcatatttgtgtttcataacgtgctccacgtttaaaggttaatcataaaacagacgcaattatcaacacaccaaacaatccaccaacgaaaccaaagaatagtgaaatgagtatagtcagtacgatctgttttatgttcattatagtattctcgttttagatgtcaagcccccaaagagggggctttaaaacattatttacgagaatcgaaaatcactttaccagcataatccgaacccattacagtttgaggtacgccacctttatagcgggtagagtagttcatctgtacatccagttctttccagcggatcatttccggtgtaatggtgcgttgcagggcggcgttggcttctgcttctttcttcgctgcatacagacgggcatcagcatcacgttcgttagcgattgcagcgttttcacgcgcctggcgatcggcttccgcttgttttactgcttgtaatgaagtctgttctactttttgcagttcagctttagcagcgttaacctgttcttcgcggatcttcgtgttagttacctgttccatgataacttccggcagggtgatatcctgcaagaatacctgtttcacagtgtaaccgtaaggccgtgcataatcttctacttcctgctgaattgcgatttgcagttggttttggatcttcgcatcaaacaggtcttgcgcttttggtacggatttaccaaattcgcgaacagtggaaagcagtttttcagttacatacttatccagtgcctgatcctgattacccgcgttgatacggttgatcggtgctttgctaccgtcgaattgcagcattacggtcatatccacagtggatttaaatttatcctgggacggaacctgtaatttgtcgaacttcatcgcgatgtctttggtgctgaacgtatcaaacgttgccagcgggtttacaatgtggaaaccaggcagtacgggtttcggtgatactttacccatgaaggtttcagttttaaccgtaccgtcttgcacaatggtatacatgttaggcactaaccacagtgctgcgactacgcccagagcgatcagagaggttttcttcgggttgttcacgatagtgtttaagttcatcataatttccataagttgttgttcaattcgatagttattctatcatcacatttcacgctgtcaaactatttttaagaaagttttgtcagcttgtagattgtttgatagcacaagcccttaatctcgtccaggatgttcttcaaagaactatctactgattcgtagatctcgtttgcttcgttggctattttacggagatacgccaccgtgtcaagcacattttcggtttttagcacaggtttgtatcttcccgtgattcctatgtggatttcggtgaatttatcaaccaaatcctgcatatcttcgtaaaaaccctcatatgctttatgttgtgagtatgaacctgttgcaaaatgtgcgctatgcatatacgtaacggacataaggcacatgccaataaaggcatctatcttgcttgagttctcagattctgtaatttgtttaaatgattgcatgatgatccctttatgaacgatggatacttgcaaactcatacgcgaccctaatccctagctttgcgcattcggattcagatcggcattgtttttggcgccattttcgttccatgtagttgtagaatagttcgcttgtatttacgctgggagggatcgttgtgatgtatacttgaagggccgcattgatataatcgtcaaattctttctgaaccggacgatcggcggcgtgtgttgtgggtgtcatcatcaacaatccaaacaacacagccattgatatgcgtttaatgttcataacaattactcttttactcatagacccactataggtctactcctgtatatatttatagcaaaaacgaggccgaagcctcgttataatatttttgttgtaaagtcaatcaagtaatgtcataccaacacaaacttctttcgaaagcgcgtattttgttcacgttttctacattttcatcccaaccgatcacaccagctttcatacgtttcagttcctgacgtaaacgggtacgtacttttgaatcaattttctttactgcaatagaaagcattgcgttcagatcgccatgagctttgttaccgtcgcgacacaaattattatcaaatcgaatgtatgcacatcctgatttgtgtttccagttggttgagtaccaacgtaacccatccggatcaatgccatgttgagcataataacgagaatactcttttacttcttcgatattttcgttagatgaacggtcacgaagaggattgtatttcttacggtaagtgcgactcataatgatctccttttgtttatgcttccactgtatcagggttgttctttagttgcaagtaatgttttcgacaaagtgaaacatatttgtcttcggccccgatctcaatctggtcgccgttagcaacaaatttgccatttgcatcaatacgggcaacggtagttgctttctttccacaatgacaaaccccccgcaactccctgatctcatcagcaagtgccagcaacatataagaaccttcaaacaagttcaactgaaaatcggttcttagtccatatgtcattacgggtatatctaattcgtcaacaacccgacacagatccatgacatttttcttggaaaggaattgtgcttcatcaacaaacacgcaagaaaccagattctcgctatcactgtaaaaatgattgttgtgaacatcataatacaagtccatatcaggcgtgatcatggtgcatgttgcttccaacccaatacgcgaagagatactctgtttaccttctcgcgtatcaattgctggtttgtacatcaggatccgcataccgcgttcctggtagttgtatgcatcggtgagtaaacgagcactcttgccagcattcattgatgcataatgaaaatatagtttagccatgcgtataaccgctcatttcgctatcttgtgcttgatggatatcaagataccacatattgattttgcttttcagttcgtccatttccttactcagacaattgtcaacgatacatagaacattaacagtttctttacgctgcataatgttgatgttattcgctttcatcgcttgcgccaatgcattacaggttttaaccagtgcggcgcgttgtcctttgattacggcgatccgtttgttcgctttcttaatctcccgacctgctttgataggatccatcatgattaattcgccttacgaggatcgaaatgaacgacaatgatcgggtaatcaccagtcacctcattaataatgcgcttaatgagttcccagtcgcccccagcgaggccagcaccgattaaaggtgtgatgataggctttccagtcttaacggcgtcagcaagccctacagcctgtttaaaagcattgccgattgcgtcataatcgacacgcggcccaggtgtccagaaatcatattgagtatatgcattgaaaacaatgttgcctttttcgccaatgtaaacagaacaagttccgagcttatcacgggaaccttttaacgtattggcatcaacttgaaatgcaccaggaatacgatcgcggatttcgcgagcaataccagcgcccatattgcaatagcagttgcatccgtggatcaaatggccttcaccattcagatacatattgacagcattacctttcacttctttaatgatcatttttattattcctatataattcgcgttcgattagcatatcgatgaaatcagtaatatcatcaaaccaatccttagtttcttgagcatgagccaaatcaccatcatctaaaaacttttcgcgagcatcagcaaaattatctagtttgttatagagttttgctttgtctatatcattcataaattaaccttaattattaaaagaacgtaagaaaaatacgtaatgtcacacctgtttacctttccgttcacggcggcgatcttcttgatgacacatatataaaacaccaccaaaaattataaacccgataacaacgcctataaagtatccagcactaaacatagtcatcatccccgcaatagtaacaaggcccagtgctctcatgcttaccagcattgtacgccaagaacaccacaaccgccgccataataataaaaatccagatagccattagtaaagccctatgccagcattaaattcgtcaaccaaataagtacggaacttttcgcaccgttccttatttggcgcttgtttgcatagattcatcattggttcggactgcaaaaactctttttgtttcagcaacttaccgcgtttatacaggtgagcgttttcctctccccacatataagcaacatctaactgttctgcgatcacttgcttacatactgcgacatctttgatatcacgattgttgcataactcatccaggcgagcatcacccgcgtgagcaaatccagcaaccagagttaaaagcagtgctaactttttcatgatgattccttattcatcctcttcgataggggtataataatgcgcattgcagatatacgcaagaacttttttcagagacatatcagagaatgtcggatcctgatttcgtctcatcccactaccagtttcaacagcccaacgtttgttagctggattgtatgtcagccagtagcaatcccattcagacagagtatgttcgaacagatcgaaacgcttacgcccatttgcttgcggccttacaaaaggttcaaccatttctaaagcggttaacactcgattaatgttcgaaccgtcttcatccatcgcaatccgcaaacagtattggttaatgtccggatccataccatcgatacccaggccgatagattcgaaaaattttgtcgccgcgtgataagacacactagaagaacgatattccaacatcacagggatcttttccccgtccttgacgttgttaatgatatcctgatcgataagttcaatcaggtctcttttctccttgatcaaggtagaaatttcttcttgcagcggggctatcttcgcatgaagttcttttatccgttgatcaattacggacacttcgaaagctaaatttctcattgcacccattccccgtttttgtcgatgtacatgatccaatcagcaaccgcccaatgggaagtattgcctttcggagtcgctacgatgtaggaaccagctttaaacagtacgcgtttagtttcgttcaggatcaggtcgctcataatgtattcctctcaattagatgcatccataataaaaaagcccccgaccgaagtcaagggctttttgtcaaatgatttgtttttcttctaacagcttcgcggttgtattaaccatacgagcataatcacgggcttctttctttgtatacttgaaaccagcgttatagctcgccagcgcctttttcaagtcgcctttgtggtaatcaagccagtactccagttcatagatcgcatacttcgatccaccttgaagagtttcgagctttttgattactacgcgtttaggatatgacttatccattcgtgcgctggcgctacttgcggtaacttgccagcatccataagcgtgatggccttttttacctttaccgacattctcacatgcgcgagactcgatccaggcaatagccgctaaatgatagcctaaacgtttagccttatctttttctacaggttttgcagtcttcaaatcatagttgtgtccaactcgataagcatactccaaaacctctttctgcttcggtgtaatgttatccaaatccttgatgtaggatggggaatttttgtttgccggaggctttacagtagccttttgtaaaggcaattgatgagtaggcaaatccgcaatgaaatcccctagcggatccgttgcagcgttgccagaaaaagagcacaagaaaatgctggcagcaattataattttcttcattttaatacctatgttgcaaaaagaggggcaataatacaccccactttatatttatgcaactattttatatagttttcgcgtcgcgtagtttatcggtgataaattcagcaatgttataatttgaaatagccttgttaggatcgtatagtgcaacgatttcatctattgataccataacggcatgtttaaagtagacgctccagctagtagtaaagatttctctgttgtcaaatccacaatcagggctgaacaaagcgcggtatttgtatccactgtatttcgtcagacgattcgtgctgtgcgcatcactggtgatcagaaaagtcccctggtgagtttcaacaacgaaaaagtatccgaggcgttctttgttgtccagcatcttttcaaacttgcgatcggtttcttcgcgaacaatacgagaagtcagcatttccaacactttatcgtattcgggccaatcattctcgatcacgattgcatcaaacgggttcttaccattaatcccgcgcccgatttcgattttcgtgcaaatttcgttgaacgttttcaaatcttctggcgtcagttctttaagatcgctcaattttgctacataataacgtttttctagtttcattttacggaaacctcaattcaaaaatagtttcactgagttaccacatttaggacatatgataaattttttcacaacataatcagcagcagagaaaaatccattgtaaatcgcttctctcttttgctgtatatcagatagttcatattctaacccacttttacagcaactgcaaacagtaattagttttgggctatggatgacagtaatcatatacacctcacaaaaaagggggctttcgcccccatcattagaaattgtcttcgacaaacgccgcgagacgggaacgatacactgtatcaagaatgatatggcttgagtgttcgtattctttcagcttttcaacagcccatacaaacccgttgttaacggcagtgtttcgagggttgtcgatctgcttaatgttcccgcatagtatcagaagtgtgttctctccgcaacgagaaatgatagatttaatttcgtggttgctaaggttttgacattcatcaacaatcagcacagaacctttgcccggatccggatgtccgatactgcgaccacggaagtaatacaggctagggaattgaaccacccctttttcaatcaaaccttcaatgtatttttccgattccggattatccttaaacagaatattcaggctagtaatacaaggttcgatagaaggccggagtttttcgcccaatgtaccaggaaggaagccaatttcacttgataacgggctatctgacttcacatacatcaagttagcgtaatgtccactattaaccaggtgcatagcaccggaaacagcaagcattgttttaccagaaccagcgccgcccataatggtagcaacatcgatttcattgctcataattgattcaacgaaagccgcttgcagagaatcacggggttggatagctttcatgagtttgcgtttcatagcctgttcatgcttaacaggtaagacattcaagcaaatctcatcagcagtcaccacacgcccgactaactcaccgtttgaggtaatgtactggttaggataaaaatcttcgtcaggaagcgaactgtaagtgatttgggctacattatccgtatatcccaacacttctacggtatcccagaaatcagggatctctacataaccggaatacaacacatcgctatcttttaacgtatcgtcgccagtatactgttctaccttacacccacgggacattgcgatcagcaacatcataatatcgcgagtaactaaggttgcatcctgttgcatacaagtttcaatgattcgttcgtcttgcttgtcaagagcaaacgttttgtttccgacataatcaaccactttaagggtgatagtgtcagacagtgctgggtttgtcaggtttaaaggaatacctgatttcgtaatcgcatcatatgactgaccgaaaataacttttgacagaagccggatcgccaatcgtgcttcgtgcgctgttcgttctttcgttttcaggtgatctaattcacccatagtagcagaggtaataatgatttctgtaccaggttgagtgaatgaatagattgaataggggttactaatcaaaacattggtgtctaatacgtattttgacatacattaaccttatgtggtttcgttaaaaaatgcaccgaaaacctcttttgctttccggttataaacggattttgcttccggcttcacttccaggagacatagggccgcgctgaactttccaatacactttacctgtagatgtatcaacatctacaaaattcagaagagattcgatcccttgaatctcttcatgtatggttcttgatgaatagccatgacttttcattacatacccagcgaaattacgtgaatatatgctaatggatgtttcttttgtacacaatgcatgagtgtattatacacaatgtccatgcgttcattgcgcgtaagatcacactcatcaaaaataaggtttattgcctggtgctctattcgacgtccacggaaatgattaagaattgcccctttactggtcaatacatcacatccggtagcaccatttagctgtttggcgtcttgtgctgcatttaacgtatgcgctacgtaaatgttaagggaactatgggaacgtttcataaaatcaaacgcgcctttagtcttttgcgtttctctgcccagatccagcctggtttcgaataccataaaatcgttagggccgtaattatgcgttggttcttccaactctcgcataagatgcatcttacgacattcttcaattgtctttacataaaattcactattcatgttttacctttaaggggccaaagcccctttgttacgctaattccacatgcggggcatcaatgaattttgtttcgatcggaaggttcggatcatttttccagttgataccaaaacgcagtttaacacccagttcatcacctgcttgtttaacagcattcaggacaggcaaccacactttagggtttgtttgccagccttgaggcaacacgctaggatacagatccaccgcatcacccgtgatgtgttttgagttcattgtttgagatacacccttacggacattctcgcgctgttgttctacagtacgcagaccttcacgtacaccaaaatcaacaggagacagttgcagagcacgttctacgactttcaccagttgaggtttaacgcctttaaggttgttaaggcttttttgactgaatttaaacataaaatcacctcttgtaaaaataccctgtttgggtacacagggtatttatggtttaagaggttcgataattaataatcgtaaagatcaccgaagcattcttcaaattcacgtttacgttcaatttgctcgtttctacgctctttcatatcaggaggaagacggttttcattgacttcatcaatgtaagcctgtgcatcctcttttgttagaaagaatgcatggaaattgtatccgttgtacccgttcatactacgatcttcaagagagaattctgtgtgacagtcccagtctttgtacagggtaatacatttagcaaacagcccaataccgcgatgaatgtatgggaatccagtaacaatcatcttgctacccatttccgcattttctccgttcacacagaatacttcatacatgatcgcacctggtttaacatctttcttaacagcacgtttttcaaaagcacttttcataatatattcctctcaattggtgtaactaaagactactagtttattttctggatgtcaacaagggttatcgtttttagacggaaaagttagagtgaacaaacgatcgtgaaggttatctatccgttcacaagcctgtttcagtatagttttatcaccatcatttgttgtttcaatgcatccaagttcatcggtgtcaatgttcactacatcgctcatcaatgaagcaaacacgttaacatcaggatgtaacagttcttcgatttcggccttcatgccgtcgtgttcagaaaggatatcaataatatcacgggttaaatctccctggtacgggaaccctgtttctaaatgattaatgatcctttgtgctttcgtaatcatatttttacctacaaaaaagcccctttcggggctagttaattagagttcacagcaacggcacacaccgtattttgtaaatggagcatcaccgctaacgtaggcccagaaatcacatgcttcttcggcagtatcgaagattgcagcatcatagaacccgtgggcttcgttaccgttctcatcgatgaaaaccggagtccagatattaggattgaagcaatcgtcaacaacaacccaaccttctttagctttcattgcttctttgttggcttcgatgtgagctaagatttcgttcatgatgtccatttttctctcctaaagtgtgtttcgtttcgacagggctatagtctcataaccccgtatctacgtcaacacttatttgaagcgaattgtgctatttttgaaaaatagtccagagcacacagcaccttcaattttcacccctgtagggcttttagcaacgaaccctgttgcgtaggtgtctttctcatcacatgcgaaccaggcgtggcctgtgtacgtgatatcgctaaacccgttagcagtcagaatacgttcggcttctttctcatcggtgcatccggattgtgctaaaacgacaataacgactaacaccaaagcaataatatatttcatgttaaactctttttaagttggttttactggcttcaatccagtacacgggatcagaatagttaccacacatacccagtaacacagttgtacatcctaaatgatcggaaggtctcaatccatcaggatgaaaaggcaattcgttaacaccgatactggtagcaaaaagagcacctccagtactgtaaaatgttttgatatgatcgtatgcatcatcaggccactgaaaacgataagttttattgtcaatggttactgtatacatatcatattccgtaaacaacggatcttttccttgtgttgccccatacagagcgccgcgccattcaaccagatttgcttcaatgtcgcttacacaaatttcgttacccatacgcaaatcatgaaggatcccttcaatggtacgaatagccccactaagttcattagttaacatagagtttcctttaaatcggtttaatggttttcaggtgtagtttagcataagaagaaccaaatgagttaccattatgatcaaacttatgttcttcactcttccagtatttccccgatttcatcaagggtatacgcttcttacctgctgttatcgtttcaaccattccggtatgagtgaatgtcatgatataccctcttctttcagcacttcccagatcagcttatccatgtgcatgagattccacataacggaatcatgagaacccagagatcgagagtagatcactccccatgaacgatacgccttttggaattctgctgcattggttgcatcatacggcatatcatcaccagaagcaatcaacagtttaagaatcattaaactgttcagcaattttgcactgggatcttgtgcctgtattttcgagcagtaattttcaatgattgcttttaggtaatacgagctttttcgcaacgttctctgtacacgtacatcagttcatcgattatttcttgcatataacgcctcccgttctactgctgataacccgcgaatgtagttctgtgattctctatgcgcatctgctacagcgcgtcctgctcgttccgacgccagtatataagtaacaacttcattacgaatgtgccataggtaatccatcattacaagatcttcttctgtatgaaaacctttaatgtcacactcgcagcaaatagcgtctctttccgatagtgccagttgcgcggattgcgcgttgattggcatcatactgtacttgtcgatcaaactatccaacgttcgcggtttcacaataccaactgttacaggaacaggacgaagagtaggtttatccgaataaatcatagtattcctcttcatcaagtctagatgtcagtttagcgataaagtcgaaaatgtgttgtgaaccatcttcaacataatgacggtatgcaagcaaagttgatacgtgacacatatcgaccgattcaactttgatgcttgatgcgatcattgtatcatcatttccgtatccgtcaatatcacggagtaccatttcttcagtcgggaaacgctgaaggagtgacgcttcccgatccgataccagagcaactaagcgattatgtcgcgtgttgtacgataatattttcatttcaattccaccgcgtaaacatcaggttcaggggctttgtgtacgcgcatatctttaccgcataccgcataagccggacagttacgacaaccgttatgatccttattaccgatcagttcattacggaactgtttggttttcggatgttcccagatatccttaatgaaatcgttcgcttccaggacattcaaaccttcttcccaaccaccttcaacccagcgttcggtaaacgaacaagggaagaactcgcctttctcgttaatgtacgagctaaacatagttgcttcgcaatcttcggcatattgcttgtactgttcgaagtttgggtgtccttccatcgcttcaacaaaagcaggggctgaacagctatcgaaaccaaatcctacaccagaatcgaggcaatattcaacaagttttttatattgttcgcgggtaactgtgtcccagttcttgcctcgtcccttttgtttcagacccaggaatacgatcgcgttaacttgtttcaagcgcggatcattctttacagcatcaaccacgttaaacgcgtcatcataggttttagagctaaccatgaaatgaaggttgatttgctgttgtccggcttctgcaagattagccactgaattaaacgctacatcgaatccagcatgtttgtatactgataccgcaacagccccagcaacagccgctaaacgcgctgcaacgtcttttgatacatcagcaatggtaaggtttggtacaatgcctttagaacgcgcataggccatcatatcaaacatatcagggtttgtttgtccctgtgcatcagcaccgagggcgcattgtgttaaccagggcattttatcaatgatagatttgaatgtatcaagatccatattgaagccgttagggttattggacttgtagcagaacccgcagagtttacccgctggcccgttgcatttggtagtgatctcgatatcgagaataaaaggaaaatgactataaataggatcgtcagcaggagtttttccccaagtcatcatatgacctgttttcatatcaaaattaaaattaacctcttcggaacgatagattttctttcctttcgcttccagtagaagtccaacaggcgttttgatatgtttggcgtttactttaacgtgtctcataggaacctcataatgtattacgtttacagaatcacaaacgttatagagaacaagcactattatggatcaagaaaacctaaaaagtcaatgcttgcttccgacgatttagggaaacactatttcagtagttcccgtgatagtcatttcatccaagatcagaaggaaaatccaggacactacaaatataaagtaatcgtatctgggttgtcaagggaaaaggcgatgaaacttgagaaaaggttacacgaaatctataaggtggacaagaacccacatttttataacaaacacatacacaacagtgttgatttttcatgtacaccagaaacaggaaagaagatttcgcaaacacaccagaaatatgcagcaaagaaaatttcagaatcacataaaaggcgattcaaggaaggtatagcatcacataaaggagagaacaacccacgatacaacgatcatcggtcttataaagagatacacggagaagaaaaagcggatactatacgcaaagcacaatctgaatcaagaagaggaaaaggtaattcccgcgcggttacgtggaaatttacttcccctaatggagaagaatttttagttgaaggagaatgtaaaaagttttgcaaagacagaaatatttccatgcgtaaactgaaaacctatctgggtgaagtcatcacaacatgcgataaaccctacgatatctctaagaataccgtaggatggaaattagaaaagattagttgaatcttcttttacgttcgtcagccagttcttttttgtacagtttaatgtacttcccgttaaggatgcgaagctgttggaaaactttgttgcacaaagcacgtttcgctttgtattccggtgtattgcggattgattcgatcgtcatccccatttcatttttagggtacgcgctcaactccctgccgatctctctgtgccagttgcttaactgatcacgctgtgctttgtactcttcaaaagttaacataacaatctccggtttcgtttctatgtgtgtaaggtatcattaccctacacacaacgcaagcgattttattttccgtaaagaacacaatattctttatatttttcacgggctttttcttcattactaaaggaaactcccgttccaaaatcagaaccttcgaacgtaacatcccacgattcatacccatcttccgaataataggaaagtgttattttacgatcttcaagaacaagttgttcaacaacaatatcaatttcagtagtcatagttcatttccataatcttttgctgcatcttcgggggttgcattcagtctgtaaagctcaacagctaacggactgggttttatttcgcggttcaggatctcactgataccgcgaaggaattctatataaggacggaatctcatttgatacgtaccgcgttaaaagcctggttgcgcagttcataagcctgttcaagctgttcagtagtgaacagaggactatcagtgttagtggtgaaactgcaaatggttttgttgtcggcgttgacttcttcgacaacgatttcataaccccagatcccgctatactcacatttcacgttccggtacttgatgtaaaccgcagcaacatcttcttttttgtagttccggcttttgtagatgatttccatgatatcctccttcgtttcgatgtgtgtaatataacagaacagggttatcgagttttagcaattcgtgctaattataccattttcttagcgattttccaggaggctttgaacgccggaacatcttcaatatcaacccagaaaccagatccgaaaccatcactatagcaagggcaaccgtcgcagtagttttcccaggtcatcacttcaccaccaacagaagcaccagtttccatagctcgtaacgcatcttcaactttttccagtttttctgcgttgttgtcataaatgatgaagtaccattttccgttgtattcgttacccagtttgattgcttcgcgaacaagtttcatgatgatttcctttttgtctgtttcgtttctatgtgtgtaatataacaaaacccctaaccataggcaaggggtttttgcaaaaattatcgtttgatcggggtattatctataacccgttgaatttccgaacgcatcgtagaatactggcacaattcggtaagcgcccgatccaggtgcatcatagcgtaagaaaactcttttccgcatttgtcgcatcgagcgtataaatgtaaatggatgcgcccgatcccatctacctgactatatttctggaatatgtaaggatctgcacctcgatagccagttgcttgatgcttacactctcgtttgaaccatgacattaataatatccttgtacgttgaagcgatcacataacaattttcttgtttggttagtatcgctttggatagaatgcaacatagcgctgatcatgtttaggttattttgcatcatttccgcgctcatgagaacttccatacgcgcacgtaagcgtttattttcttcttccaactcaaccatacggtcatatgctttgatgcgctctaagggcatatcaggacgctctttgagtacgcgagcacgttcaacctcacaagcatgatttgctttccagtggttcgattccgcttcaaatttattaaggcggcggatctcttcaaccagctttttgatcatgtgtggatccatcatgtcgatgaatttcatcaagcaattggattttgtttggttgtcagcaacagaccaagacgaattatacgtaaccgtaaacgtgcggcccatttcatcaacaaccccgatcttgttatcatcggtgattgtagccgcccatttatcccgcatggctgtacaggttccactggcgacactatgcaacttgtttaatgttgcgtcatcaaacacaatttcatcactcatgtatgcctcacatagatttcaaaatacgcagaagtgcgttagtaaagatatcaggaacacaaccaccaaacaacttatgattcatcagcgctaatttcatgctgtgattttcagtatatcgcccgttatggatcccccaggcaacgacattaccaggttcatgaataactaagttagtgagagtaacggtcatgcgctctttatcattgatagagaatgaatagcagtaaccggatccgatgtcgccgtaaaggttaaggtctttcaatttcccttgctcatgcaagcgtttcatatgaactgcacatgcatgattaatagtcatttcgtcatccctagcccagtcatcaataccagaggtataacgaatattgaaatagttagtcagttcatttgatacgctcattagaaacctcacttttataaaattctttaccagacccattacagctactgcatttgggggaacggttgttatcataccgccctgatccattacatgcaacacatttccgtaatttccagccatacacgaaccgcatgtaataatcggttcgtgcggccttgcgttcgtggaaattcatactttgtaaacctgaaccaaccacatttcgatgttcggcgcgtaagtaacgtttaccatcggcatagtgcggtatttgtaagcggctttgtacgcatcgagttcagtcggaacacagaaagagaaaccgttgtcataacgttctgcgttagaaacttcacaaccaactacagcggcaatgtttttgttcatgttcatgatgttttcctttctctgtttcgtttcgatgtgtgtaatataacaaagcccctgcatttctgcaagggcttttttcaagttattcgaaatttgttggcaactgatctacaattacctgagtttgatggatttcttcactcaatttatcgcggtaatgaaccagttcacgggttcttgatgcggaatagctaatgattttatcagcggtagcggtgtaaccgtaaccagcacatgcgatttccagttttgcgttatcgccattcggtacgcggatatgagcatacgtcagcaagtttttaaccgcttgtaacagttcatgatcttctttaccgatgataaactgatttggttctactgaatcaatgttcagttcttcgtctttgttcattttgcagccttatacatttcaaggacgcggttcatatgctcttgtgattgaggcacacccgcgaagttcagtttgatgaagaattccagacgatcctttttggtgcattcatccagccccagtgcaggtaatgacatattttcaaaggttcgctgttcgtgtcggggtagttcatgccagaataaacgggaaccgtccggcataggaagaccaatttcaccttcgtaaaatttgataatcgtcgtcaggcgttgtttaccgtcgatgacttctacccagtgagtttcattgaactggctatcaaccgcgatcgcgatgacaccacaagggaaccccgtcattaaggtagtcagaaacgcatcttgttctttctgcgtccacacgtaggggcgctgataagatggattcagatccagatcattatgcttccaccagttgagataactcccaaccatgatcgcatgatcgcgactacgaaaagttcggagttcccgaagtcggttatgaaccggaatatcatctttagacatgattcaccacccaacccaacaaaccagtattgatagccgcaacggtaaggcaaatcaccgcatacacccgcgcgttgtgaactttggttttcagttctgcgatctcctgatccttttcactttcgaactcttcgcgggttccatagtaaccaggatcagcagcggttgcgggacgaactgcatctttttcaacgatggttgcataaccactcgttacttgcgttgcgccgtaccagtcaccgcgatcggtgttgatgatcaagtgatcacccttcgcgttagctttatgcttcgacttgccaatgacaattacacgttcaccattcataatataatcactctttcacgttttgttgtaagaactctaacagctttccttcggcctgtaaagcataaagtttattcaactttgcgatgttttcaaagtctgatttttcgctgaacgaccagacaccatcatcggaaaccagcgcaccgattgatacgccagtttcaggatcacgcgtcaacgccagccccaggggatgcaggatatctttattgattttccataccagccccaattgagataaggtgttgaaatcaacgtgactcatttaggcaatgccccgaaagacagcagccccatacgatgatcgttatctgattcaccagtgctaaattcaaattcttcaccgctgatactgatagcgcggaaaccgtctttcaggtatggcaacagatacagagggatcagcatcatgtttgaatcgtcgctccacttacggaagcccagatttttcatttcttccagcgtcaaatcattcggatcgacgggttcgaaatcaggggaagcgtaaaggcgtccaggcagatcgcgaatatttttcacggtgaatgaatcaccccatgactgatacgcgataggttcagcggcgcgggttgcggtagccagaaggatcatttgacagatttgaaaagttgttgctttcatgatgtatatcccacaagtttagatagaagatgtcccatagtcttacgcgcatgatcgcggatctggctatacggaacatatttgaaaccgtccatttctgtgatggttcgcccgttcttcacgaacgttgacgcacagaagcatttatcggcttcggggtaattattgcctttatacacgaataagtaaagctcttttttactggtataatccagtcttccgaggctttccagttcgtgcggttcaacaagaactccagtttcttcgaagcactcacggatcgcagcgtgaataggttcttcgcctttttcgatatgcccctttgggatgtcccaatgaggcgtttcggttgcgtgtcccattaaaacgctgccgttattcaggaagagaataccagcagaccgttccattactgtgctccgaacttacgatcgtatgctgccagcgctttatctgctgcatcaactgcctgagtgtgtttgttagcggatttctcgctgaacacttcgcggtaaatggcaacccagagggatcggcgggtctgttcgctttcttcattgacgcgagaagccgcaaaagcgttatgttctttgatcagttgtgcgaattcagcatcatgatcaatggtttgttgttgaatagctgtagaagtcataattcacctatttctttcagttcagttttgagtttttcgagagtcgattggtactgaatgccgttttctggatttggcagacgggcataatacagcgtaccagttttgttgatgtctgacaacacctcttgatcgagggtagccggatcgatgccaaaagccattttaaacatggtttccgcgtctggggcgaatccgtgagagaatgcaaaccccagctttttatcaaactgcatcagggatactttgttacccattgatatcttattccccataatgttcttcgtaatcctcgcattctgggagataggtttcgcagaacatacacagcgtgaagaatgtaggctggcgaattccgatattatcgggtaagtacatccagaacgtgttagcaaacacgatgaacgttttcaggttttcaacggttacggtactgataccgtcataaccggattgagtaattgcgcgttccaggggaacagggtattgctcgcagtagttggcgtaatgttcgcttgtcaccagcgcattagccgcttttacgagatcggtaattttcattcaatatatccccaacgaatttttacgttatcttctgacgccggacttgtaggagttgggtatggataactttgcgcttcccacagataaacaatggcgtgttttgtcaattcttcgataacttcatcgaaagtaccgacactggtttgtaaaggcaacgagaaaggtttatcgttggtttctacttgagcgattggcccatctaccaagataacacgaaccgttgtgtgctcagacatatgagcatagattttgtttttcatgcgggtacatattccactttgacaggttttgcgataaggcgttctttagtgaagccttgcccgttacagatatcacaagtaacattgaagtcttccatctgatcaacccagccagaatccggtaagccagaaggatacgtgttaacacgtttgacttcgaaccctttaccctcgcatttcgggcatttgtgtgggtactgggatttaaccatactcagcagttgccccagcgttgttgaacgatcgaagcgttcgaccagtgccattacatcagcaatacgaatcgaaccagcatcaataacggtatacaggtttttcggtacatttgagcgcatagtatatttctcacttaaaaaattttttgatgaaagagaggaacaagccaccaccgaacatgatccagtatcccgcgccgtcaccgttaaacaggacatacacagcgacaccatagcaaaagatttccgcgatattcagtaagtttctcataactccctcctttgtctacaccaggtattttaccagaaagtagattactgtcaacaacaaagttttatcaacccacttatcaccagtcattagtaatcccctacaggttgagaagatgcaacgctcaggatacggaaagagcattcattccatttgcaataagttttcgcacagtgaacagtgcctttcattacaaacccgtttgagaacaccagccagtaaagtttcatgattgcctcctttgtttcgacacccctaatataacaaaagcccctgcacgaatgcaagggcttttttcaaatatttttcaacatgtgtagttgaggcggacaatcttttgaagcaatcaggcgatccaggcgtgacataacgcgtctgtagccgtcatactcgaacttgattttgggtgcgatgtaatttacatgtatcgcgtttcgcgtgttcaggctcaacgtgtactcagggataacggttcggaatcgtaaagcaatcactggcttttcgtgagcaaccgaatcatccatgttttcgaacatctggacggtgaacgcacaggcaaacactttgccattaatccggcgatatgcaatgacttcctgcataccttcgtttttcgctttcaccgcgtaatacagaacgttacacgaataatgtttagcgagactattaagaatttcactgtagatctcaaagtcttttttgactgacgcggaacgatccaggaatcggtctgcgatgtgatctgtagtcattgaaacctttgtcacataccaatcacttaacgctttactgaaattttggttaacttctctgcgtaagttattgataacatacatcaatcgtgctctgttcataaatcacccattatgtttaaagtattcgatttgacgcaaacgcttttcagcggcggctttcgaatcgtattcaccaagttcttttgtgcgatcgtgattcaaaacaacccacttatcgccacgctgttcaatgtgttctgtaatatcttttaacgacttatccagatccagtgattcagcctcttcacagataatagtcaaatccacgggcagtgtcaacaaccttttcactccgctgatatcatcaagcatcgaatcgtatgcaagggttacgtgcggtttgtaatccggataatcgtatgttgcgccagcatcaatagaatctttgaaacggctatgcaggtattcagattccaggatccctacgatagtgctaccgtattttgtgtcccacttttcaacatcaaccagtttagcaggttctgtgatgtcctgttgcgggaacaaatcaaccgttttccggctgtatacgatcgttgtatgcatcttttcggctgaaacagcattctttgtgatacctaatgtcttttgaacatttttcaaagcctcacatgaagcctgatcgaatttagcacacatgtagataccaggatctacaacaggttttgtgatttcaagaaatgatttcataaaacaccccaataaaaaaggggccgaagcccctttgtaataaatttgtttttacgcttcttcgccaaaggcggcttcatcttccgcgcctttttcgacttcaacggaagggatcagagcggataccgcgccaatcactgcttctggggttactggctggcttgcgtcaatacccagtaccgaacacaggtcggacagaagttgacgatgaaccgacagttcactttctttttgcgcgataacttcgttaagatcgaatgcgcggcctttcagtaccagtacttcattttgcagtttttgaatatcagacattttattacccattgttaaaatttaaaagtatcgagcactttgctctttagttgtttcaaagtaccttcgttagtgatgatactatctccaggttgaggtgtcaaacctttttccgtggaatgttcatcaacaattccggtatcctttacaataaacacaaacttagcacccaagcgtttcaggtatttatattcgtgttcctgacgacagtcagttaccagaagatgattgtattcgtcaccagcatatttattgacgaatctttccagtgtgtaacgaacccaaaccgtgttatcatacttgcatacgatatcagttccaaacacttgcatcaagcgtctgatactccagggagtatcgttactcataatcagattatcaatatcatcaggactataaacaatattgtatccacgttctttgaggatttcaagcccgattttgaaaatatttagaacatcttcattagacatcacaagaggtttctctcgatcaccttcgtaaaaaatagcatccggatcagaatattttccttcaaccagactacgaatgtatggtttagcgtaaccatatcgctgcattgctactcttagcgttcttttgataccaaatgccagtgcttcacactgaacatcattgtacgcctcttgaataaatttagcaaccgtatctttaccagttcgcttttttccactaatcacataaatcattagctcattctcttttgagaagtgactacttttccgtcaatttcaacttccatatgaaggaagccaaaagttgccatacacgtaaccgcttcatcactatcgttagtataacccaattcaacctcacccaagtttgttgggaaggcaccataaaatctaaatgtggcgatcgttttcatctgggagttatccaggatatgcacagcgaatgattgcttaggatcatcccacgcaacagagttaaactcgttgtaatcgtttgtgctcaacatccatatgtaaatcccaagatacgatctcatttcctcatcgactacaaagcggatcatcaaaggatcaaactcaaaagccgaaccaggtactttacctcgaaccatcatatttgcaggaatatcaactgctgggaggttcattgatggtagtgtaaccccttgaacttgtaaagtcaaacctttcatgtaactgttatcaggaatatcaacccgaaagtttgtaggtgagatttggtttaaaatcatttctgtagacataggatctcctttcctctatttagcggggaacgggatcaaagcggcctgacggggtaatataaaaatttgaagaaaatgcttgaccttttaaaatctttgatctataataattattaattaaaattttatcaaaaagatctaacaagatcaagtaaaatttaataaataatttattaaaaaattttagatctgatcttgaattcataaattttatgatctataatatattaatattttattttatcataaatttttatgaagatcaatacttagatctaataaattttatgctttttctgaaaacttttcctttaccccgtcactaaatactggtactatgttcccatattggaaatcaggaaaaacaaaatgactcacttgaaaaaattcaaagaatttctgaccgaaggtaaaaccctcgctcgtaccgtagcacgtggtcaacgcgctaaaacttccgataaacattcaatcggttttcttcacttcaaacatggttctgatttcgaagttttagcaccggattctcacgatctggcatacttcggtaaaaacattgtacgtttgaaaggtatgactactggtaaagttcaagcggcttatgtcgattgggctaaaggtactgtttctttctacagtggcaatccggatgatgatctggatttcgacaaaccagaaaaattcaaagctgctactctgtatgaagaggcggaagaaaatctggatctgtataaccagttagcagaagatttcgaaatcgagatccctatggatgaagctctggtgaaaggtaaagtttacaaactcccaagcaacgatatgcgtcttctgtacactgggcgttctaaaactaaagcaagcggtgaatatgcagtgtttaccgtagttgatgcttccggcaaacctcgcctagtatctggtaaaaaattcacccaggaatataaaggcgatatggtttctaaactggttctggctgaatccgaagatctgaatgaagcggctaaaggcattcgcgaaaaagttattgctgtgatggtgaaacgcgggtttaacgaaaaagatgcagaaaagatggttgacaaaaacctgaaagatgctatgaaagttagacctggtgcgacccctggcaaacttgcagaaatagttagcaccctgtaaaaataaagccccttccttccggttggggctttttgattagtatttgctccagacttttttcgcgccgtaaggtttccctttggacataaattgttgagtcggtagccaaacagctttcgcccaatctttaggggcaatctctgctaatggtgatttgaggtgtgatggtagatatgctttgatcatttctgttgcgcctcgcatacctttcacgttaccccagttaattttaagcacggtcttgttagagaggcgtttggtggatccgtacccacgcttcaataactcttctaaaaactcctgtcgtgctctgggtggcgcatagtgcaagttcaaaccatagaacactaagttacccgctttcgatcttccggatcctaagaaaataatcagtggaaatctatcccaatacggcagggtgtctttatattttgcatcatatgcaaacgtgtacaggcgacccgttgctggttttgccacacggtgtgttttgatactggttttgatgaaattaccaaaccattctgttgaatctttctgtcgctttgccgccgatacaccaacagtgatctttttcagactattacggaaatcgttgatgatctcgatcccgtgttttttacggtagtcattacgttttttacgggcttctgtctctgcggaacgtcgttcaatctcatcatcaatctgttttttgtaacgatgcattgactttgtgaacgttgcgtagtttaatccctcagaatcggcaaaacgtttagcagaaacacctttcgtttttgccttacggaatttgatccccagttcaacccaatcactcaatttgcgtttgggtggtgctttgggtttatcctcttccgcgatgatctcaaactcaaaaataaaactcatgtttccctccagggattactgacctcgccacccaaaaacttttttgagtgattcttctgttacgattttgaactgccagcctttttgacggcatagctcatttgcggctttccacttatcaatattaactgtataggtgtaaagagcatcaataaatttctttttattgtgtacgttgttgtttactggcttcggtggaggcatggtttctttaaggggcttaacctcccaaagatatgtagtaccattttccatttccacatagaaatccatgtaatagcgtcttctcttaccgtctgcattgcagaaatacgggatcactatacattcagaattccaacgttttacgtgtgggtttttatccagccacttcataacgtagcgctcccacgatgacctatacgtaatctttcgcggatcgcctttatacttctgtatgttttcgggtacaaacgaccctttatacgtctgtcttccagccattgcgtaaatcctaaatagaataatataacgtttagataggggaacttatcgtgctattttcatacttcccgcctgttgattacaaaggcacccagacaactgatattttccgagactatcgattttattttaatcgtgtgattggaaaatataaaacccgtagttaccagataacaggcacactacgacctgaacaacttgcagaatcattatatggaaaccagcaatactactggatcctgttgatgcttaactctgtttatgaccctttctatggttggatctccgatcaggaagccgcgtatcagtgcgctatacagcgttattctgaggttggcggtgaacaggttctgtatcatgtagatgaaaacaacaacaagtattataaccttgtcgaagaccccaataaccctggtcattggtatgacaaaggtgacaaaccaatgctgtatttacagtatcaaggtgtattagctcctgtagatatttatgaagatgcagtgttgcaaaatgaagcaaaacgaacaataaaaatcattagtccgtctgacatccaggcgtttctgaatgattttattaaagaaatggaaaaggctaactcatgaaattaggcggaaatttacactcccctttctttgatggggtggttgaaaacgttgatgatccgcgcgggttgggccgtgttcaagtccgtgtatttggacaacacccagcccaaaaacaaaaatccgatgcaatcggtgttcctgttgaagatttaccctggatgatgcctattcaggatattagaagcgctgcgatctctggtgtgggcttctctccaactggtatcactcgcggatcctttgttgttggttattggcgtgacaaatggcaccaagatggtatgataattggtactgtcgctggtgaatatgtcgaacaaccagacacacagaaaggtttttgcgatcctatgggtgaataccctcgctatgttggtaacgatgttaactcccttgctttaggtggtttgaaaggcaaaggatcatcaagtgtcatcattcgtgattcaaacacaagcatagcagtaaacccagacgatcgcccactggatgagataccagaagataaccgccctgatacgggtggatttacgattgaaaagatgctcaagcaggatgaagggatccgcacacgctggtatacagacagtgaaggatatccgacaatcgggatcgggcatttgcttatccgcgaaaagactcgcgacactgcaaaaattaacgctgcgatcagtaaagcggtaggtcgagaagtaacaaacgggacaatcacggcagaagaggtatcaaccttatttgctcaagatttagccaaagtaagatctgatattcagagaaccgctaacgtccgtgaagtgtatgtgaacctaaaccgtcctcgtcaaatggcgatcgaaaacatgtcgtttcaaatgggcgtcggtggtgttgctaaattcaccaataccctaaaagcgatgaaaaatgaagattggcaagcggcttataatggtcttcgcaattcactgtgggctagtcaaactccaggccgttcttctcgagtgtctaaaatcgtcctcacgggcaaccttgaatcatatggggtgcaagtaccagatccggaagggcgctctctgagtgctgcttacgctgcgtataacggtgctacattgtcggctactagtccggaagatccgtttactcctggtgatacccgtgtgatgtttgaagaaccagcatcatcttataatgcggaatatccgtataacatggtgtttgaatcgagatccggacacattcaggaattcgatgataccccaggatacgaacgatataaccgtgttcacccagcagggagttacgaagaaattcgcccggatggaacccgcattgttaaaatcgtaggggatgattatcaaattgtgatgcagggccggaaactcaatgttaaaggcaacttgcaggtagttattgaaggcgacgcattcatttacaacatgggtaacgttcaacaaacggttgatggtaacgtaactgagtttgttcgtggcaacgttcaacaaactgttgaaggtgagtacgttggcctgattaaaggtaacgctgaactaactgtaaacaaagatgcaacagttaacgttgatcagaatcttaccgcaaatgtgaaacagaatgcaaccgtagctgtaacagaagacgcaacgatcactgcaaaaaatgcgaaaatggagattgaagaaacgatggatatcggtgctaaagatatcaatatcaaagcaacgaataacacgtttattgattctggcgcattaacaaaaatcactggcggcaccgtccaagtggggtaattaaatgattatggattatgaatcaataattgatggaattatgcaaaattatcagcatccttgtgatgctgagatccccgctggctattatcggcgggttatctggcaagggcatacagaaaattatccggctgttggggttgagtgggataccgagataatcaaaatcggtactcatctttatactcaagaaccgttcggacatagaagcacggatctacctgttgtcaattcaccgggaacagatccaaataccggacaaccaacagggatccttgttccgaagattggctattatttcaacactcaagcagagattgatgcttacattacatccatcggtgcaactaaaatcaatggtggtaatgattggtacggcgcggatctgtcaaaatcaaacctatacaaaaaccctggcgaactggctatgtataaggttgaaaacagtggcgggtatctttccggaacaaaccctgtatgtgatgctcgcatacgtcaggcgtataatcaggacactggcgcattcaccaatattgattattattggaatggtaatcgtatagcatatatgaagcatgacgaaacaggggcgcaccagtgcaaatatacgggtatgcaggttaacaccaacgcagatacaagcattcctcctgttcctcctgcaatgccttccacttatggggcattaccgagtgaattaagccgtgctgatatttcgtgcattccggcaactgttggtttcgcatatacaaatatcagtgatgctatgttacaggcatggaacgaaacccgtaatacgttcaagctacagtttaacatgttaacgggtgctgtacagaatggattcgggatcgcgacgatgtttgatggtttatccgtatcgatggaagaagtaatggcgggggcgctcgcattgtcacagcaagcatggcaaactgctatgaaagttttcagacaagtgattagcgctgcatttaacattatcggtggtgcatggggattgattaatcagttcttgcctcaagtaaccatcttaggtgttgcgatcaacatttacgatctggtgtttggtgataattctgttcagactttgaaagatgcgtttaatgcaatcatcaaatccggacaacaaacatatgaaaccgtcataaacgcaatatacggggccataggaagcgcatacaattactctgtggaatatgtcaaagctggcgctcgcgaccttgtggatgcgtgtagcgcgttatttgattggtgtttaacgatgttccaaaacggttgcgttgcattaatcgacttatacggtcggatcatgcaaacatgggctatccctccggaagttccaaacccgttatggtctgcggtgctggctatccgtaacatcatgatgcaaatcaaaccacttgatataattctgggcggtaacttccctggatttactgcaatggatttatatcaacaagcacaggaaaaagtcaaggcttttgttgatgagtcatacgaacagatccgagggctttatgaacaagggcaggaactttacaaaacgttaaaaaatcagattttcgaacgtgatgcaattcagagaaaattcaaccagtacttaaactggatgtggggcgctgtaacagacgaagcaacagcggcttatcaatctgcattggatgttgcaaacgctgctgtagctgcaacacaggccgcgtatgacgctatacaggaacagattggatctctacaagatgcaatgaaagatacatacagtatggcgatggaagaattaaagaaattgcctttgatgagtacaataaacgagtttttaggcttctgtggtgtcgcatttgacgatcttctcaagtcatatgaaaatgcgattactggtgctcagtctctgtacaaaaatttcattgatagttcgcgctcgtttaaagatcactgcaaagtaatctacaaccaaatttgtacgctggcgttgagtaaagtcacacaatatgtgaataaattgctgtctctcataggattagcaatcaactttggttcgattagtgtatgtgttccagtactgaaatactaaatagtcgaatgatcaagaggaatttataataatggctactgctaagactaagactgtcaaaaaacagattaaccaaatccccgatatttttatcgggggtactttcgaagaaattaaaacagatctgatcgattggctgggtggacaagaagagtttaaggattacgatttttccggctcacgaatgaacgtactgatcgaccttctgtcgtatgctactctttatattcagcagatgggtaacacggctctatttgaatcgtttattcgcacggctgcattgcgtagttctgttgtacagtctgctcaagaactggggtatatgccagattcgcgcacggctgcaagcacagcagtaatgattacggctgctaacccactgaccccaacatcgatccgtatcccgcgcggtacaaaattcatcggtactgtaaagaatacagacagttattcttttgttgtatcggatgacgttgttatcgttcgtgatagtaataacaactatacatcaatgctgaacctggtgcaaggccgtttagttcgtactgaactaatttatgacggttcaagtatcctgatccgagatccaaacattgaccgtagtcaggtacgtttaactgtaaacggcgcacaatgggaagactggacaaacgaaagcattgtaaacgcaacaggcgcaagcacgatttactacatgcgtgaaactgttgatggacataccgaagtttatttcggtgaaggtgaagcaagtcaacaagtggcgggtggtgcattaaccgctgaatatatcgggggcttgaaacctgctaatggatcgactatcgttattgaatacctgtcaaccgatggggaagcggctaacggtgcaaaagattttatctatgtcgatacattaaccaatattagcatcactaacatcgaagaaaacccgactaaatcccctgattatgtcggtgctgatggtggtggtgatccagaagatatcgagcgtattcgagaactggcccctgttatgcgtgaaacacaacgccgttgtgtaactgcatcggattatgaatctttcctgtctcacagatttggttctatcatccaggcggtacagtgctttactgataacgaaaaacctggttatgctttcatttctgttaaaccaaagtcaggtttgcgcctaacatcggtacagaaagaagatatgcaaacgtatctttcgaaatataacctcgcgacgatcaccccgtcgattatggatcctaactatctgtatattgtgcaatctgtcaaagtaacgtatgatatcagtaagttgacggaatcagaggaatggttacgcggtcaggttatttcgtcgatcgactcttactatactgacaacgttgaaattttcaacaaatctttcagtgtatctaagatgttgacttatgtcgatcagtctgatacttctattattggttcggaagcaaatattaaattgctccgtgaaattgacaactattacagcgcccctatgtctgggatccatttcttgaaccaggtggaatctaaatcaatcatttccagtacgttcaagttcaccaacgaagatgacgaaagttatgatgttcgttatgcttctacggcaatggatcaggatggtaacgcaaaaattgtaataggcccgttcaaggatggggatatttcgatcgctgcttatacaggcgatgactttgaaaaattaacagatgcaggaacccgtaataaatattacgaagttggatcggtttctcattacaccgatttcattagctttgacctgggcgttctgaacgtatccgccgatagtttcagcgctgcttatatcgagctaactgcaaaacctctcgaagaaaccatttttactcgcgatggttcgttgatcgtgtttgaaaatgacctgcgtcctcaatataccacattgactatgaatcctatcagtcaataatctttaacccctgtcttcggataggggtttttctttttataaatacgtgatatacataaccgcaaatttggagaaatataatgattaaagcgccttcgattacgagtttgcgcgttgataaactggctgctaacttcgtttaccttaaatgggatgatgttggcatggatttctattatgtggttgaattggcccgtagccgtgatatggacggaactattattccagacgaagagttaatctggacgcagttgggttatagctacgaaaacgaatggtttagcgatcaggttgccccaaatacacgttataaattccgtattcaaacaactcatgaagggtttgaaccttctgattgggtgatcagcgatgaattatggacgtttgatgagaacgcctacgcatatacaaccatgcgtgaattcacccctgctgattcgtttatcaatgaaaaattcgccaaaaacaatcgtgattacgtcgattttaacgatgatgttattatggcttctctgatggttgaggattttgtatactctcccctgtattctgatgtaagccagatcagcgataagatcctgaaacaagaaagctaccatgaaattcaagatcacatcgaacacgtttgtaatgatatagatcgcacgttcctggtatactcaaacggattgctttacctgtttgaacgttttcagaatatggctaaagtgtcaaatgacaaaggccaaacgtggtattactacaaagcattaaacgatcgtgtaggcaatccggtttcccgtaccattgcttatcagagcactaacactacgtatgtgttaggatacgatcgcatattttacgggcgcacgtcaacagatattcgttggtcttctgatgaagttcgtttttcttctgatgatgtaacgtttgctaagctggggaaccagtcagggttagattttgatgttgattcatacaacacatatgcgcgtctaccgggaggagtgtcgaagtatgccgaagctatagcttgttctaatgaatggctctacgtggctgctaagaacgttatgcgccgtattgcgttacgtaacacaccaattgatactgatcctggttcgccgacctttggtgaacgtatttttgatgaagtttcatataccatcgtaccaggaaatgataaaattgttgttaaaaaaatggacgtgctgaatgatcgtctatacgttctggtaactggtgaagttaaaacggcgatgatggatccgactgtcaaggctaacgtgatcccatcaaacgatgctggcgtttatctgtgggatgagaatgcaaagacgtttacccgtgtttatggtaaaaccgaagatgaacgtttttatatcactcatgaatatacaaatatgtcaaccaatggcgatgaagtttacatttctgttggtaactacaaatatccaggcactttgccagatccagatctggttgaaaagtatccggaagatgtgcattcagcggtgaaatacgatcttgttcctggttatactgcgagcatttcgattaactttgctacagttcgagcaaatcagaacgatcctactgtttggaactttgggccgcaagagtactacaatgaagcaaactttagctggcatttccgcgataaggttagcacatggatcaccaatgataaccgtcctctggtggtttatccggaaaccctgtatactctggttactgatagcgcgtctcctgcgtcaacgattcgtgtaaaccatgaagtttgggacaaaggaacagttactatctacttgaataatatcaaatttactggttttacgaagtacacaaacggtgttctgttgtatcgctcaggtggtaggataattggattctatgaactgtcataccgcgcaagggatgaacttactattttctggaaacctgataacactttaatggtggcaagtctggttaatcaggaacgtgaaaacccatacacgccggatattgaacctggactaatagatcctgatctgagtcacatgattactcgttttgctccgcaaagctatctggacaaccaacagttcgaaaaatttggtgaatactatctgcaatatatttcgttgggtagcaacagttactataacaaattgctgaacctcatccggaacaaatatccgagagagaaaaacaacgttgaatatttgtggtctgaaattaaccgccgtaacatttacctggataaaaccaaacgtgaggcagtggttagattttttgaatcacgtgcaagcgatttctattcaacaaaagggattgaggcaagttatacgttcctgtttaaattactgtataacgaagatgtttccgttgagatcgaaagctccaacagtctcgaatatgatattttggttagttcaacaaatatcagtcaggatatcgtaggccggacgatctatacaccaactggacgcgctaacgttacatacatcgaacgtgaatatgaaaatggtcaattgcgttggtcaatgactctgcataatgctcaaggtaactttatcgaagggcaggttgtcaagtcagaaaaaaccaatttcaccggaatggtaattcgtggtgttcgtggtaaacaaatggctaacaactcgatcgactatataaaccgtggacgctcttactacgtgatgaaaattcgttcaaatctaccgacttcccgttataaggatgacgtattgaggtttgttcatccggtaggattcggcttcatgggtattacgatgttaacagtattcatcaactccggtttgtcaatgactcataacgagacaatcattgatattctgagaaactaccgtttcgatagtggttatcctaagttctggcctgatcgcattgcgagcatggacggtaacggaaaccaacaattcgacctggttactggtgaacctctgtacaccgcacacccgcgagcgggggaaccttttgatgtacctccggaatatgacgttgaagaaaaaccgcttaacggtgttcttccttctgcgcgacggttcgatcaaagtccgttgttcgattgctcaggcgttaaatattcacagttccgtaatttggtggatagacgactgaaagatgatgcaggaaacccacgtgatccaaatcctccatcacagattaaggtaggaaattaaatggcacaacaaaacttgtatcggtcggtaattactgcaaaattccgaaccgaaaacttgatgaacttcaaagatatgatcggcgatgccgccgatctaaacacgatttatatgtctattgggcgaactgaatcatgggcggataacgaatccgaccctaactttgccccgccatatccaaatgatagcaccgatggtgttagtgatatgtggacgcatatgatcggggctactaaagttcctggtgatatgatagatgcaattttaccacgtaaagactggggtgatactcgctatccaaacccgaaaatcttttactttaacgatattgttgttgtaaacaccgcgccttataaccgtactgatccgggtaaaggttggatggtttatcgtgtagttgatgttcctgatatcggttcttgctccatttcgagcattaccggaaaacttgaatgtatcaggatcggcggtatctggagtccgtctcatgaatctagtgaacctccacgaggagaagctaacgggatcgacatgggagacggttataaatgggaatacctctacacaatcccgccagatgtcgtgatcaaccgctgtacaaatgaacatatcgtagttcctttccctggcgaactggaagaggatccggtacgttggggttatgataacgtgattcaatggtatccaggacaatacgatctagtgtatcggttgaaggtgaattcaatgcgttttcgtgcatacatggattctcttttcttcccgcaatctacgcttcctggtaacaaagggttccgtcagataagtattattgtaaacccgttgattaaaaaggaaagcccgaccgaacctgaaaagaaagcaactggtgattactataatgctaacgcgcttgaacctgattccggacgtatgatttacatggaaaacagacaacctattattcgctcccttgatcagactgaggaagtgagtattgtattcgaattctaaggaaaaacaatggcttaccaaacagcaaaaaaactaattgatgtcggtgaaatcggcaacccatcaacaggcgatccgctttatgatggtggtgttaaactgaacgaaatgatcaccaacgtttataatgcgtttggtgatgtgcgtatgctgtctgcaaacgaaggtgtcggtaacatggtgatccatgctaccggatactatcagaaattaccacgcacttactattcaagtacaccgatcgaactgggttccctgcatgacatggatacttcaacaggttcgattaccgttgttcttccttctggtaaggttggcgaaggttgctacttcataaatagtacgggtagtgtctctgttgatcgtcctatcgcgtttcgtcctcaagttggcgatacaatcgcgggggttgcagaccagttgtacatcacgtcaccttacacctttgtaaaaatctggtgtaccaaaaaagaaggtgcgatcacaacatgggattattctgtagaatctatgttcggttctaaaacgatgcctgttgacactacggcgcttgtactgaaagcaaacccgactgctattcctatgttcggatatagcgaatttagcggggctaaggtgcttgtatacgcagaaaacttagctggtacagttaccaaaatggcagaagttttaatgaccgtggatcgtgtacacaaaacgatttattcaacggaatacgctattttgaaaaacagtgaagatgaaatgtttacattaaactttactgtcggtgctggtgatgttgtatacgctaacgtgcaagcgatcaaagaagatcgaattaaattcacgattaaagcaatagatacgattaaatcagggatcgcgtcatgaaacaagaaattttaataggtcagattgtagacgatggtacaggcgattacctgcgtcgaggtggtcaaaagactaacaacaactttacagaattgtataacatgctgggggatggtgagatcccccatccagcaggtgcctggaaaacttttgcgggtacgacgctatcaccaaaatttggtgaatcatgggcgttgaataccagtgcaaacaaaatcaccgtaaacctcccgaaaggcggcgtaggcgattataacaaggttattcgtctgcgtgatgtgtggtcgcgttgggctaccaacaacgttagactgatccccgcaactggtgatactatcaaaggttccccaactcctaaagatctgtttaaagattttatggatgtggaattggtgtattgttctccgggccgttgggaatacgtcgaaaacaaacagattgacaaaatcacaacttcggatctggcaacagtagcaaaagaaacgtatattgctactcagggacaaactgacttccctaacgtattcggtgttggtaatgaatacaacctgcaatcgttcgaagtttactatcgcggtaacttgcttttcatcgatgagaaagacggattcaatgctgataactcagactatggatcgattggttctgctcctggtgaactggttgcacttgatggtaattcagtacgtcttaaaaacccgtgtaacgctggtgacacgcttcaatttgttacctatctagatgggttagcaacatggcgttcgagctatgaagcgtatgtgatgcgcatgtatcagactggtgatacttctctggaaaccgttcctggtgaacagtgggtaggtgatctggcaaccaaaaaagagtttacacctgctgaatttggtgttaaccctcgcgtgttgattaaccctaactcgtttgaactgcttctcaacggtaaacaactggttaaaggcggtgacgctgactatccggcgttttcctgtgaaggtgcggaaggtgttgatgaaagtacgtgtgttggtaactctggtgtatgggttccgtcaggacaggattatagtttagtattcactgattctgtagtgacttcaatcaagtttgctcagaaactggaatccggcgacgttgtaacgatccgttggtttaacaatgatattggtactctgatggattgggaaggaactggcggtattaaagaaaaagctgataaggtttatctcaataacgaagaagaagttatattgacgaaccgtatcgaatataccgattataataacccttctcagaaaacaatgcgtaatacaggggaaacctatcagggacgtattctggatattcaggctatgtttgatattatccacccgatcggaaccatctatgaaaacgcacacaacccggcaaaccctgctgattatatgggatttggtggttggaaacgttacgcagaaggttatttcctggctggctggacatcaaatgcagcggatcctgatttcgcattaaacaataatgatttagatagtggtggtcaaccgagtcatacggcaggtggtacaggcggtgatcgtggtacagaaatcaaaatcatcaacgttcctgaacttgtatcaaaagataaagttctgattgctgatgaaaatggtgctgtgatcattggtggttgtcagttagatcctgatgcttctggccctggatacactaaataccgtgaggatacattgaaagtgaatcatggtaacacattacctgataaaatcaaaactattccaccgtatatgactgcacatcgctggataagggttgcataatggcttacaacaatatttcaaaaacaagggagggcgctcgcgtcctctctaaagaagcagattacttacagtatgatacttatggtaagttgcctctgatcggcggtaaacgttcgatcggcgaaccaaacattgaccaaacaaaacgcggtgttctgtatggaaacgtacaatccgcaattgatgacctgtatacgcttatcgagcaaatcccgattaacggcgttgttaccatgactgaggatgcccctccaatcgctgtacagcaggttgagagcgtttcttttgatggtattgtacagaacatcgattcagaccaagaacaggctgtggttcacgtgtacggctttcctttcatctttgataatgggactaacgccgcaactgtttgtgaaacggcatacaacaaatttactgaattcgttgcagcggaaaaatatttcgcagaagttaaccgtaaaggtgttgatggtacgatccttgaatgtcgatttattgatagtgttccgcacccggcaacaaatatctcagaaaacggtattcgtcaaatcggaactatcgacgtagccgcaaaaagtggctatggttcatgggttaagttgggttctggtttcttacctaatgttactccgcaagtaaccgtgtattacttcaaacgaattgcataaggataacacatgagtaacaatacaatcaaccacgtaagtgataaatccatttacgtgacatttgacccaacaggtactgattggcctgataccataaccaacgtacaagatgcgttggaaaaaataggtagttgggcgcgtactgatactgggcttcctatcgcaacaacttctgttcgtggtattgctcagatcgcaaccgaagctgatattgacgctggcacggataacaataagattgttactccgaaactgttagcatatcgtatgcagaaccctaaagcatcacaaaccgtatggggttatacgaagtattcgactgatgcggaatctacaaccgtaactaacgatgcatcgtctattactccgcgatctctgaactatgtgttcaataaccgtaaaggtacagaatcggtttggggttcttctaaaattgccaccactgcacaggcggttgctggtacagataacactgtaactatgactccgcttaaagtcaagcaagcgatcgcgtccctggttccggttcagtcaagcgcgaccgaaagctcgcaaggtttggtacaactggcaacagttgcacaggttcaggctggtacgatccgtgaagggtatgcaatttcaccttatacgtttattcgtttaactgcaactgaaagcaacctgggcgttattcgtatcgcatcacaggcagaagcaaacgcgggtactgatgacaccaaagcgattactgcgaaaaaattaatcaatacccgtgcaactggatctcagttcggtgttgtcaaattagcaacaactgttggttatgtggcaaacactgcactttcttcaaacgctgcggtattacctagtgatcgaaatgcggtaattaacggttctctttatgagaatagcgcaatatataacaacaaatatcagacgtggacagatcttgattggcatttcccagtaggtgctattgtcatgactggttttcagactgaccacggtagtttgtatatttgtgatggtcgctcactgaataaaaataactatccgttactttttgagcgtataggttatacatttggtggtggcggtgattggtttaaccttccagattgtcgaggcgttgcagtacgtggtcatgaccgtgggcgtggactaaaccctaatcgtgggtatggtacatatgaaggagatatgttgggatggcacgaacacccattacaacttatctaccagaacggcggcaacattccgaaatggcaagcagtttacgaactgaaaagcgccgagaagaatgaccaaagcgctcgcgtatttgatgcttctataactaaagctactggtgtgggcggtgaagaaacccgcatgaaaaacatcgcattaaactacgtaattcgtactcaatagaggttattaaatgatcatcgacaaattaaatccgttgccgaagatcccgtttgttgatggcgtcccagatgacgccacgactcaaacgaagattctttggatcaaaaacggtgaaactctggacggttcgccagataaagtgtcaaacactggtagtcttaaccgaactggtgtaaacatccagcagaacgcggttcagttagaacaaaataccatcacccataatgataaaatcaacgaagtaatcgatcaggttaacttgattactgaaaacattgatgctattggtgatgaaagcgtaatcaaaaaagttaaccagttggatcaggatgttcaggcattaactttatctaacacccaaacacagaacaaggtagcacagttaaccctttctgtaaatgctcaaaacgatgaaattggtgaatacaatccagaaaaggatcctaaacaccgcacaattcgtaatgatatcatttacattaagaaagaagttggttcatatcctggatttaacgttgatggtgatgttgacccctcttctactggtactggccttaaataccgcgtactgagtaaccaacgtgctatttctatgcaggaaactcgcataaccaaactggaagatgattgggcgctttccgaagtaggacaactgacagaagaggtaaaagaacttcgtgctgaaatgggtgattctggtcttgccacaacccgttcaatctatgcgcgaattaagatccttgaggatggttctgttgtaatgcaaaatgaacttgatgcgattaatagttatatcggtcgcacgtcaggttcaaccagttccattaacgatcgtgtgaacagtatggaaaactccgttagttctctggctacacaaatcaacgatccggtaactggtatctctgcacaaattgcaaccataaatggtcaaattggtacggtttctgttcagggtagtatccgttatgatattgcggaaaacaaacgcagattgatggatatggaaatgattctaggtgaatccggtgatgaaggattgcagggacaagttgcgatcttaactggcgacattggcgaagattcagatcctaccagtatcaaaggccgtttgagtgttgttgagggtgaattacgcaccaacactagcgcactatgggaactgcaaggcgttgtaggtaactcttctagtggcctcattgcaactagccagcaggttaacaaagaaatatatggtgatggtgttagtgccgaccccgttactcgtgctggtttgaaaacgacaacccgcaacctgttcactcaggtaggagataactccgaaggtaacgaaacgggcatttatgcactgattgccgaccttaataaacgtgttgaggatttagaagcgttgaacattgcacaggcacttgcagatcgcgtaactatcgaagatctgaatgctaaactggctatgtatatcaaagaagctgatgccgatctccgttatgagagcaaaaacccgcctctgtcattcggtactaacctaactggtgatactgaatacactactggcgatccattgtctctaagcgtaactatgaatggtggtgtttctccgctgtcttaccagtggacgaaaaacggcgtaaacgttggtactgatgctaacacatttaccatcgattcgctacagccttctgattccggaacttacaaagtaacggtaactgatgcaagccataaagtcatcgtttctgatgaactggcgatcactgtcgcttaacgattaacaaggggcttcggccccttttgaggatctttatgattacgaacaacccagcacaattaaaagatgaaattctgcgccgtttaggtgctccgatcgtcaaaatcgaagtgacaaccgaacaggtttatgactgcattcaacgagcattagacctatatgcagaatatcattacaatggatctaacaaagggtatatcattctcaccctggggccggataacccgaaaaatattttcgatctgagtaaagaacatattttcgcaattactaaagtgttgcgtactaacatgggttcccttgtatcgatggatggtactgcggtttatccgtggtttactgatttcctgatgggccttactggtggttctctgggcggtggtggttgtgcatcacgtacctacggaatgaacgcatacggcgcggatatgggctattttacccagatgatgagctatcagcggtcaatgcaagatctcctgtctccgcttccggattactggtataacgacgacacaggacagtttgcagtatacggaaccgttaaagatggtgatattgttgttatcgaagcaatgatcagatcctttgttgatgtacccagtatggtcggtaacgtctctggatacgctacagcgggttctgatggcgaagataagccaactatagcagatatatacaataacccctacaaagccgtctcaggcggtgtgaaggctggtcaaggtacaagcgttcagggttcatcctctgcgtataacaaccgttgggtgaaagattacgcaactgctcttgttaaagaggtaaacggtcaggtgctggctaagtttcagggtatgcaattacctggtggtgttgctccggatggaacccgactgattcaggaagctatgcaagaaaaagaaaacctccgtcaagaacttctgttactgtctgatgcacttccagtgttgatgatgtaagggggaaaaatgcaatttagattatatctagtagagtttaaaacttctacgggaataaaaatatatggaggtaaacgccattctccatttaatgatcctagacatgattgttattgcggatctggggtatacatcaaacgagcattaaaaaaatatggaagagaatgtattgttaatatacaatggtcaaaaccgtttccaaacaaggatttattagcggaagccgaagaattacttgttgatgagttgatagcatcttatgataattgtgttaatttagttcgtggcggtaaaggaggtgcttctttttataatccagcagataaccctaattttggttctaaacgatctattgaatctaaaataaagatgtcagaaaaggcaaaaaatagggtttatagcgaggaaggactaaaacgaagacaggaagccactagggtcatgattcaacacagaaagcctcgtgatgtttctggaagcaaaaacccagccgcacgaagggtaattgtggatggagtagaatactcaacattgaaagaatgtggagatcattacgggataactaaaaactccgtctttagtcgaataaaatctaagaaatgggagggatggaattatgcgtgattgggatgataatttattcgcacagttggaatctggcgaaggtgttgataatagtttaaaaacggaagttactaacaaatacgttaactggtacaagtataaccctactcaacagttacatgattcactaacagccgaagcaattcaaatgaaatctccggatatgtattacgtccgtcgagaatttgttaatattgataaaattttgggtgaagaccgtgaatcgaagtttacaaaatcgtggaaaattgcagcatacatcgattcgtatgcaaactacgaagggcagagagatttttacagtaaattcggtatgatgtcaaacgatgaaatgacacttgtgatcaatcctcgtttatttgcacatcaaactgatggcgggatccctgttctgggagatttgatttatttccctatggataacagcctgtttgaaattacatggattgagtttgacccgttcttccagttcggcgatcgtcctcaacgtaaaatcaacctcgttaaatttatctatactggcgaagaattggatcctaaactgcaacgaaatgaagggattaaccttgctcccgatgctgatttggatctcgaacctattcgaaatcttgatgggttggcggataccaatattgaacaatacgaagaagatcaagcctttgaagatgaaggtgatgaattcattgaatcgtttgatgttgttaacgggcgcggatcaccgttcgcacagttcccataaatataaccaggggaaaccctatacatgtagggtataggagaaatcttatacccgctttaacccatacaggaaaaagaaaatgtttggctactggtataatagttcgctgcgaaattatattgtcttgatgggttgtcttttcaatcacgtgcaagttaaacgcattcgcggcgaacaagaaaaatttatcaaggttccgattacctacgcatcaaaagaaaaattcctggcatccatgaacaagctgaactatgcatacagtcaggaaaatgttgctaaaacggaaacaattttaccgcgtatgaatctatccctcgttgatttgcagtataacgcaattcgtaaaactgggatcgcggtaaaccaaaaaatgacgcagttacgcgcacctggaaaaacagtaacgcagtttaaccctgctccgtatcgtctcatgttcgaactgggagtgtatacccgttacgaagatgatgtgtttcagattatcgaacaaatactgccatatttccagccgcatttcaactgtcgtattacagaattacataaaaacgacattaaaatagaccgagatattaaaatatctctgcaatctgtttcccctgatacatcgtttgaaggcgatgcaacgacacggcgacacattgaatggtctttaatgtttgaattacagggctacctgtatccgcctgttaacgagattaaaggcgagatcagaacagtatacacggatttcttttccaatatgaacccgttggacaaagacaatttcgaatccgttgatgctcaggtggatccggctgatatgcctatacaggattacacgggagaagaatacattcaaacgtatgctaatgatatcccaattcctagcggtgatcaacctcctaaaccgaggggccaataatggaagaatttagcgtaaaacaactacttgatcttgaaaatctccctggtgctgaaactggggaagaaatggttgtatatgaaaaactcgaactcgttgatgtcgagtcacacccagcagatcgaaaacctgatttagaggaagactatgcacttgcgcgtaaaaccgcgcattacatgaatcagatgatcatggatatggcacaaattgccttgcataacgctaaaaactctgaatctccgagacacgttgaagtttttacaaccctgatgaatcagttaaacaattctaaccagggattgatgaaaattcataaagaaatgcgagaaattaccgaagaaacaacaaaaccaggatctgaaaaaggtaatggcggcggtaatgaaatgaacatagagaatgcaactgtatttgttggttcccctacggaattaatgcagaaatatggtagtgcatacgaaccaaaagaaggcttcattaatggtgaagcggtagaggtaaaccctgatggaaatggaaccgacgatcgatccgagtaaggaatcagatcacccaatcggattaatgcatcccgattatctgaaaaagaaaattgatgaatttgggatggagtggacgcaaagcgaacatgataaaaaatggtatccgacaaagtttagcgattacctaaaaattaacggtatccataaagttgatattcaagcaaaagacagttcaaactttgcgacgtataaaaacaaaggaaacaagaaaactcgatataacggaaacccaaacctgaaacgcgcgtacatccaaacgaaatggacgcaacagatgttgatggagtgggttaaatgtcgtgatgatattgtttattttgctgaaacatattgcgcgatcacccacattgactatggtacaattaaggttcagttgcgtgactatcagcgcgaaatgctgatcgaaatgcataaaaaccgtatggttgcctgtaacctgtctcgccagttgggtaaaacaaccgttgttgctatcttccttgcacactttgtgtgtttcaacgaggataaatatgttggcgttttggctcataaagcctctatgtctgcggaagttctggatcgtacaaaacaggcgattgaacttctccccgatttcttgcaacctggtatcgttgaatggaacaaaggttctattgaacttgataacaaatgtaaaattggtgcgtttgcatcttctcccgatgcggtgcgtggtaactccttcgcaatgatctacattgacgaatgtgcgtttattccaaactttattgatgcgtggttagcgattcagccagtaatttcttctggtcgtaaatcgaaaatccttatcacaacgacacctaacgggcttaaccacttctatgatatctggaacgctgctatagaaggaaaatccggcttcgtaccatacacggcgatctggacatcggttaaagagcgtttgtatacagacggtgatgatggcgtatttgatgacggctattcatggtcttcgaagatgatcgccagttcaagtaaagaagcatttttacaggaacattgtgctgaattcatgggaaccaacggaaccctgatcgctggctggaaattgtcaaaactctcatgggttgatactgatgaaacggaaactaatttttatcagtataaagctcctgtagagggacataaatatattgcggtactcgacccagccgaagggcgcggtcaggactatcacgcgatgcatattatagatattacatctatgccgtttgaacaggttgctgtatatcattcaaacaaaacatcgcaccttattttgcctgatgtcctgttacgttatcttatgatgtacaacgaagcatgggtttatatcgagctaaatagcacaggccactcagtggctaaatctttgttttctgagttggattacgataacgttatttgtgatagctataatgatttggggatgaaacaaagtaaacgatcgaaagcgattggatgctcaaccctaaaagacttgatagagaaagataaactcatcataaataacaaaaagacaatacttgaatttcgtactttctcagaaaaaggtgtttcgtgggctgcggaagaaggtttccatgacgatctcgttatggcgctggtttgctttgcatggctaacaacacaaatgaaattcgcagaattttgcgagaaagacgatttgcggttggcaaatgaggtattcgcacgtgagcgcgaactgctttatgaagatatgttatgtcctgttatcgtaacgagtggcgacgaaacaatatctgtcggccaacacggtatttcgtttatataaatttagaggaaacttaataatggctttaatctctccaggcattgaaactaaagaaacatcggtacaatctaccgttgttcgaaattcaactggtcgtgctgctattgttggtaaattttcatgggggccagcttaccagatccgtcagatttctaacgaagtcgaactggtaaactattttggctccccagacaatgacaccgctgattatttcatgaacgctgtaaactttttacagttcggtcaggatctgcgtgttgttcgtgtcgtcgataaagaagccgcaaaaaacgcaaccgcgatctataatcagatcaaaaccacgatcaccgctgctggttctaactatgcagtagacgatcagatcaaagttaaacacaataacgttgttattgaagaagatggtgttgttaccagcgttgatgatcagggtaaagtcctgtctgtgttcattccgagcactaagatcatcgcacacgctaaacaggttggtgtatatccggatctgtctagtggctggactacagaaatcgtttccagttcttctggtgtttctgctacgattacaatcgacggcgtagaagttgatccgggtattactctgctcaaccttgacaccgcaaaagaaactattcaggcaactgctttccagaaactttgcaccaaatacaagctaccgtctgttattgcaatttatcctggcgaaatgggtagcaccgtaacggttgaaattctgtctaaagctgcatacgattcttcggctgtcattaagtcttatccttctggtaagtctggtaaaaacagcggtcgcagttcgatgaactttggccctcagaatgataaccaatacgcgtttatcgttcgccgtggtggtattatccaagaaacgtttatcgtgtcaaccgctaaaggtgataaagatatctacggttcaacgatctacatggatgatttctttgcaaacggtggttctcagtatctgtatggtacgtccctaaactggcctgtcggattctccggcgttctggaactgggcggcggtacttctgcaaacgccactgtaggcgctgatgaactcatggctggttgggatatgttcgcagatcgtgaatctctgcatgttcctctgctgattgcgggtgcttgtgctggcgaaactgccgaaatttcgtctactgtacagaaacacgctgtgtctatcggtgaaacccgttcagattgcgtcgtattcgtttctccgccgcgttctgctctggttaatatcccactggctcaggccgttgataacctcgtagaatggcgtacaggctacaaaatcggtaatactaccccagttgataacaacatgaacgtaagttcaagttatgcgttcatcgacggtaactataagttccagtatgataaatacaacgatgttaaccgttggatcccgctcgcgggtgatatggctggcctctgtgtttataccgatcaggtatcgcaaccgtggatgtctccggctggctacaaccgtggtcaactgcgtaactgcatcaaactggctatcgaaccgactaacgcgcatcgcgattctatgtaccaggtacagattaacgcggttactggtttctctggtggcgctggatacattctgtacggtgataaaactgcaactactgttccaagcccgtttgaccgtatcaacgttcgtcgcttgttcaacatgatcaagaaagacatcggcgataacgcgaaatataaactgttcgagaataacgatgatttcactcgttcttccttccgtatggatgcaggacagtatatgtctaacgttcgcgctctgggcggtgtatacgattaccgtgtggtttgtgacactacgaacaacacgccggatgttattgatcgcaatgagtttattgcatcaatctacgtcaaaccagcacgttctatcaactacatcacgctgaacttcgtagcaacctcaactggtgcggatttcgatgagttgattggatcaacgtcagtataacatgtaaggggctgaaaagcccctataaatacacatagaggttagaaaatgcttactgatattgtacgcgcctttgaatccggtgatttcgcacgtccgaacctgttcgaagtagagatcccgtacctgggcaaaaactttaaattaaaatgtaaagccgctactatgccagcgtctaccgttgaaaaagttccggtaggttacatgaaccgcaaaattaacgttgctggtgaccgtacctatgatgactggacaatcacggtatataacgacgatgcacacacaacccgtgatgcaatcgtagcatggtcaaacatgctgcatggtatgggtgaagacattacaggggatatccctgcaaactacaaaaaaaccgctacggttaaacagaaaaaccgtaacgacgaagtaaccgccgaacataccatttatggcctgttcccgaccaacgttggtgaggttactttagactgggatagcaacaacgaagtgagcacttttgagtgtactttcgcgctagactggtgggtttaaacgctataaatacaggggtagcaataccccttatcattatttttcggagttgtaaatgaacttttttggattagacaatgtgttagggtttttcaaaaatttcgccaaacaggatgaaatggaatttgaagcccaattaaaagatgatacaggttcgattgcgcctccgaaaaataacgatggggcgcacgaaatcgaaacggacttatcaaaccagcgttattcttctgtgttccaacagttctattccggacaggatccgcgaattcagaacaaaacacagctaataaatacataccgtggtatcatgacatacccggaagtggaaaacgctgtttctgaaatcattaacgaagctattgttaatgaacaaggaaaagatattgttacgatggatcttactaaaacgaattttagtaaaaatatccaagataagatcatggaagaactcgataccgtaatgaatattcacgatttcgataaccgaggctctcgtttattccgtgattggtatgttgattcgcgtatctatttccataaaatcatgcacaaaaatgaagctgacggcatcaaagaattacgccagttagatccccgttgcatggaactgatccgagaatcggttacagaaaccctacccggtggggttaaaattttccgtggctatcgtgaatacttcgtatacaccgcaccgaaaaacggttatagctacaacggacagatttatagtcacaatgacaaggtaaaaattcctcgctctgcgattgtttacgctcatagcggccttgaggattgcgacaacaacattataggctacctgcaccgcgcggtcaagccagctaaccagttgcgtttgctggaagatgctatggtgatttaccgtattacccgtgcgcctgaacgtcgtgtgttctatatcgacgtaggtcagatgggtggccctaaagctacacagtacgtaaataacattgcacagggcttaaaaaaccgtgttgtatatgacgcgagcactggtaaagttaagaatcagcaaaataacctgtcaatgacagaggactattggctgatgcgtcgtgatggtaaagcagttaccgaagtttcaacgcttcctggtggcactgccttctctgatatcgacgatgttaaatggtttaaccgtaagctgtatgaagcgttacgtattccgttaagccgtatgcctcgcgatgatggcggtatccagttgggtaacgatggcggtattacccgcgacgaattgaactttagcaaatttattcgcgaattgcaaattcaattcaaccctgttcttgcggatccgttaaaaactaacttgatcgcgaagaaaatcattacagaagatgaatgggatgaaaacgtaagtaagattgcttttgtatatcagcaagattcttactattccgaaatcaaagatattgagattttggaacgccgtttaaacctgatgggccaacttgaaggggtggtcggcaaatatatctcccataaatacgtaatgaaagaagttctccggatgtctgatgaggaaattcaaagcgaagccaaacagatagaagaagaatcaaaagaagaacgttttaaaaatccagaagcggaagaggaaaacttttgatgaaagaatttatcgaagcaatcaaaagcggtaatctggtggaagctaaaaaaactttttactccatcatggaagaccgcacagaagcgcttcgtcacgaattacgcgttgaacttgccgaagctgtacgcatcgaaggcgaagaagacaaagaaaaagacgacgaaggcgctgataaagatgacgaaaagggcgataaaaagccagccgaggatgataaatccgataaagatgatgagtgaggtgtgtaatgcaacttgacatcgaaatcaccgccgaagatctccatgaacatttagacgaagcgaaagctcgtgtagatattctgggtatcgatgaaggcacggttaaaatcatcgaaaatttggcggtcaccgaaccaaatttagcccttgctatgatggcggttgttgaaggtttaacacttgatgaggtaattgtcaagcatgttgattcccgtggcaacgtagaacgcctcaaagacaggaaaacccgtgagcgtaatgcgtatcagacgaccggattaactaaatcccaacgtcgccagatcgcgcgtcgtgctctcaaaacaaaacgtgctaacccgtcaattgctactcgcgcacaacgtaagcgcaagaaagcattgcgtaaacgtgctgcactggggctataaatatgaatgaatcccaaatcaacgaaaacggcgatatgcttttaatcgaagaatggggtttaccttgcggtgacgtttcagaatctattttagaatctgttggggaatcaaaagacggtaaattacggatcgaaggtattttccttcaagccgaaaaggttaaccgtaaccgtcgtttgtatcctaaaaacgtacttgaagaagcagttaacgattatattagaactcaagttaacacccgtcaagcattaggtgaaatgaatcaccctccgcgtccgaatgtggatccgcgaaatgcttgcatcctgattgaaaaattgtggtggaagggtaacgatgtttggggccgcgctgttgttgttgaaggcgacggtggtgatggtgacaaactggcggcgttgattcgtgctggttgggttcctggtgtttcttcccgtggattaggtaagctctccgattccggcaaaggctacggcgttgtacaaaagggctttaaattagctgtaggcgttgatgtcgtctgggggccaagcgcacctgatgcatatgttaagcctatagtggaaaatcagcaaagcaaaccgcttgttgagaataatagtgctgatgacgcttttctggcattgtccgagcgtttgaaaggtctataaatacattaaacaaaacaacaggaaaatcaaaaatgcttaaagaacaactgctggcggaagcccagaacctggatactccggtcgagttagacagcattttcgaatcagttgaactttctgatgacgtgaaagcgacattcaccactgtattcgaacaagctgtaaaagctggcgctgcaaaactcgctgaatcccacattacccagatcgcggaacgttccgacgaactggtcgaagctcaggtaactgaacgtgccgctgaaatcgaaactaagctgtacgaagatgctgataaatattttgcgcacatttccgaagaatggctgaaagaaaacaaagaagccgtttcccgtgacatcaaagcagatctgtttgaatccctgatcatgggcctcaaagaagttctggttgaacataacgttgtcattccggaagaacaggttgatgtagtcgccgaactggaagacgaactgactgagaatcagcaggaagttaaaaccctgtttgaagcaaatcaggaactgaccaaagaaatttcagaaatgaaacgcaatgcagtagtttcagagaaaactaaaggtttgaccgaatctcaggtcgaaaaagtagaatctctgattgaagggctggaatattccgcaaccttcgaaaataaactcagcgcaattgttgaaatggtagcaaccaaagctgaaaaacccgttgacgagtctgtaaatactccgcaaacgaaagatgactttgttccggtagtcgaaagtgttccggcagagaaatccaagatcaataaatatgtacaagcggcaaaagccctttcttaatttcaaaaggtaagaaacaatgtctaagaaaaacgaattgatggaaaaatggaacgatcttctggagtctcaggaaggcttaccggatatcgctaccaaatccaaaaaacaactgattgctgccattatggaagcacaggaaaaagacgcagaagttgatccggtttaccgcgacgagaaaatcgttgaatccttcggtggtttcctggcggaagctgaaattgctggtgaccacggttacgacgcaaccaaaatcgcttctggtaactcaagcggtgctatcaccaacatcggccctgctgtaatcggtatggttcgccgtgcgattcctaacctgatcgcgttcgatatctgcggtgttcagcctatgactggccctactggtcaggtgttcgctctccgcgcagtgtacggcaaagatccgctggcttccggtgctaaagaagcattccatccgatgttctctccggatagcatgtactccggtcagggcgcggctccgagcaacggctttaccgaactggcttccggtactgcgatcgctgacggtgctatcgtgttccacgatttcggtgaaactggtcgtgtgttcctccagaacgtttctggcgctccggttactgtaactggttctaccgacgatgctctggatgctgctgttatcgccgaacaggaaaaaggtactctggctgaaatttcttacggtatggctaccagtgtagcagaactgcaagaacagttcaacggttctactagcaacccgtggaacgaaatgggcttccgtatcgataagcaggttatcgaagcacgtagccgccaactgaaagcacagtactctgtagaactggctcaggatctccgcgctgttcacggtatggacgctgacgccgaactgtctgctattctggcaaccgaaatcatgctggaaatcaaccgcgaaatcgttgatatgatcaactataccgcacaggttggtaaaactggtttcactcagaccgttggctctaaagctggtgcgtttgacttccaggatccgattgatgttcgtggtgctcgttgggctggtgaaagctacaaagctctgctgattcagatcgacaaagaagcaaacgaaatcgcacgtcaaactggtcgtggtgctggtaacttcatcatcgcttcccgtaacgtggtttccgctctggctcgtatcgatagcggtatcactccggcaggtcaaggtctccagaagactctgaacgttgacaccactaaagcagtattcgctggtgttctgggtggcgtgtataaagtatacatcgaccagtatgcacgtggtgattacttcaccgtgggttacaaaggcgataacgaaatggatgctggtatctactacgctccgtatgttgcgctgaccccgctgcgtggttctgatccgaagaacttccagccagtaatgggcttcaaaactcgttacggtgtaggtatcaacccgtttgcgaactctcgctctcaggctccgtccgaccgtatcacttctggtatgattaccaaagaaatgttcggtaaaaacgcatacttccgcaaggtttatgtgaaaggactttgatcctaagttattgaaaaataacgatattaaagggaaccttcgggttccctttttcatttctataaatagtgaaaacaattgaggctatattatgaaacatattatctacaaaataacaaatttggttaataataaaatttacgttggtgctcattcaacagaagacatcaatgattcatacatgggttcagggattgcggttaaaaaagcacaaaagaaatatggaatgaataactttgtaaaagaaatattacatgttttcgatacccgtgaagaaatgtatgaaaaagaaagagagatcgtcaatctcgaattcataaatcgtccagatacgtataatgctggcataggtggtaaaggtgctcctatgtcattgattggttggtctgacgaacaaaggaaaaagatttctgaaaatactgcaaaggctatgcgaacaccagaactaagggagaagatgagacaatcccgtttaggtaaaccacagtccgaagaatccaacagaaagcgctcagagacgttaaaagctaaatatatgaatggacgtatagacagagagtataaacctctcacagaagcgcacaaggccaaattaggccgttctgtatccatagatggagttgtatactcatccggatcagcggcagcgaaatcccttagtatgtcccactctggtttaaaatatcggattaatagcgacaaataccctacctggaaatttgttgcataaataccattatacactttacgcaggaacataaaatgagtgaaaaattttacacaattaacaagctggtgcgtcagtcacagctaccgcctggcctgtctaaaaaggttcttgatgaggcaaccggaacagaaacaattaacgtagctaatacccgtccggatctggtatctcttacccgtgcggtaaacaacctgatctacggtgaacttgtagcaattcaggaaactaatttgcctaccgcaaccctgttcggtgtgcgttatcgtaaccctaaaggcgatatgacgttttccagcgctgctacctattccggtaagtatgcaagccgtgataacattccagttggtgcggttggtactgcctataccaaaggccaagtttttaaacatccgacaagcgatgtcgtatacgaagcaactgatagcgtaactctcgcaggtgctgatattaatgaagcgattatggtcgcattattcagcaataaattacgcctggcaagcgaagccgcgccaacaagtcagtatgaaaccagcgaagatattagtacaacttctttcgaaatggatcgttggaatatcaacgttcgttcccgtaaattcaaaactgaaatgaccgtggaacttatgcaggatctggaagcaaaccaattcaacgcagaaaatgtgattgaagatgttttgggtactgttgccagtgaagaagtaaacaaagatatcattcagactctgatcaacgtatcaaatcgttacaacgttgatggtgtggtaacaaatggcattttcgatgctacaaccgcatacactgcaaaggatgctccggctttaggtcgtttcctgtatcaattagtgtgtgaaatggggcaggaaatgaatagaacgacttcatttgaagctacctatgtcctggcctcttctcgcgttgtaggcgttctggctgcgtctggttggatgcatgaaaccgatgaaacccacccgttagcgacagggcgacttaaaaacggttattatgtctatactgacaccaatacaccgtttgattacctgctgactggttgcaagtacgatctgggtgaaatggatcatgttggctctctgttctatacgccatacacagaagctgatcaggcaggttcgatcaagatttctgttgatcctcaatccttacagcctaaagttgctattctgatgcgctacggtttatcggttaacccatataccactgctgcaaacgaaagacttgtgaaaggtgatgactgggtaaacctctcaggtaaatctaagatgagtcagattgtgggtatcaaacttcctaaactgggttgatagtataacccaacggggataatattcaataggtggagtagggaaacttactccaccttttaataattataattaatattaaatcttgaatttataaatgatttatgataaaatttattaattataattattatagatcaaataatttttgaaatcaagtaaaaataaatttgattttataaattagatcatgtataattattcttttaataatatattatattagatcaatttaaatttgactactaattaatatagtatattatagatcaactgggtaaattggtgagtatgttatgagtttgaaattagaagatctgcaaaatgaacttgaaaaggatatgctgatagatcccctcaagttgcaatcagaatcagcggatatcccgaagatttgggctaaatggcttcgataccattcaaacgctaagaaaaaattgatccaacttcatgcgaaaaaagaagctgatgtgaaggatcgtatgttgtactacaccggaaggcatgacaaagaaatgtgcgaagtggtgtatactgggactactgaaattaaaatcgcgatcgctggggatccgaaaattgtagaaaccaacaagctgatccagtattatgacatggtggtagatttcaccagcaaagcactggatatcgtcaaaaacaaaggatactctatcaaaaacatgttagagatccgtaaattagaaagtggtgcataatgtctactgaaaatgaaaaatgtgtagtgtgcaagtgtccggttccttctactggttttgtgactgaatccgggcgcgtgtgtagtactatctgtgctgactacatcgcagaaaaaacaaaaaacggcgagatcaacgaatccgatgatctgaatgaagttcaaatgttgctgtaggagaatcttatgattggttacggtgaaggaattacagatcgtgatgaacgtccggatctgttagaatctgacgaacatcctgatttttaggataggtaaaactatgccataggcatgacaaaccgattatgcgtaatgaatgaggcttgtacggggttctttgcctggatcccatagttccccattacggaggcaaaacgggcgatggaggcaacaaaatcgcgtcctaaatacatgtgtacccgaaaggggcttgataaaagaatgctggatgataggcgtactcttttgcgccgtccgatggagtttaccttcggcggggtgattgataatataccttcgatcaagggcatgagtaaaaaaagccagaatagtacctcactggctataatcaaatgtacgtgttgggctgattgcgtcccaaaattaaaagccccttcctttcggttggggctttttttagaacttttcttcttctccgctttcgagttcggcctttaattcttcggctcgacctttcagcgcatcgcgcatagaaatatcgtctgacggcgcaacatcaacttcttttacacgatttttgtaatatttttcaagctctttaaggccgtccatagtacggcaagaggcgaccttgctcatgaaatcatcaatagccgcctcataaagtcgaaaatcgttgaaactcttcattttgacctctaaatttcgatttgtttgatcacgtagtcaaacttttcttcattgtaaatgcgtactcgttcgattgcgtgtttcataccatagtttttgtatgaatatttatttttagcatttttggactttgccagcgttgctaagttatcaaccaaatcccaaacagtagcaagagatttagaatcatgtttacgcagtacgcgcccaattgactgtttgactataacagcagatttgcaaggatgtccgaagatgatgtgatgcaggttcttgacagaaatacctgtactcagtacaccaatagaaccgattacgatcagtcccttcgttgattccgcgatccgtttcatttcgtttcgctcatcaatccccgtttccccagaaatgtatacaacgttgtcatatacctttttgagttgctcatacagccatttaccatgtttgatctgattgaacatcacaaacacgttttcatctttttcccttgccagtttcaacgccagcttacagatccatgcgttacgcctggtatgcgatgttatatacttgatttcgctttggtaatcagcccccttcattttcttaatctcatcctctttatatctcatgaagatggtattaattcgaaggttggtaacttgaccttcctgcatcaaccgatttgtatcaactggcttgaagatttgaccaaaagcgccaatgtattgcatcatgtttgctttgccttctttcagagaaccagaaaggccaaacttgaaaatacactgatccattgtgttgatgatcttctgtatgctttgtccggttgatttgtggcattcatccaccatcaaacacatgaactgctgaaaccactcaggaggcattttaacagccgattgccacgtagacacgtagatcaatgcattactgtttttagcagttcctgaacgtattccaagcattgcctcgcgaggtaaaaggcgatagtttacaatatcaccgatcatctgatcaacaagggcggttgttgggacaatgattagtactttgcctgtgtaattttccagacaccaacgagatatcaacccctggataagagatttacccgctgacgttgggaggttaagcacagcacggcggtttttaatcgcatgaaacaccgattgtttttgataccaatacggatcaatttgcttgtttccgtcgtatactgggtgttcttctaaccacttgtcaaaatctggctgggtaatttcttctgtttcgtggatcttaggatccatccagatagaatacccgcgagactccgcgaattttgttacaagataggctaaaccgtagggcagtttcccgttatagtccatcaagtatatgtagccgttccatccaccatatttgtattttgcctggtactgataacctggcggctggaagctgaaatagtcgcgcaattcatagactatgttagcctctgcctgaatctgcacatgactagtgttaaggaatttgacttcgatatccactatgtgtatcctatatacggtttatatgaatatttataggctaaataatgataaacattggagaactacaatgagtattgattacgaaaaggttgaaggtttcaaagccttagaacaaaaagaagccaaattacagcttgctgcctacgcgcaagaaacgtttgatgtcaaactgaaccgccagaagtcattcgaaaatatgcttgctgatctggaatctgccgtaccagcagaaaagccggaactgttgatcgactcccccgatcctgaaattgttacatacgaaggtgaacaatccgttcctgatgttgttattgatgtgactaacgatttcatggattacgttaaagaggttgctccggaaatcgcagaccagattgaaattgttcctgacgctctacaagctcctacaagcgattctgagacggtttctgatgaactggcatggatggaagggtttaccccgtctatcatcatgatgggccgctctgtttcgaatactggcttttatacgtgtccgtattggatctatgattggatgaaacaaaatccggattggtacaagcaccctgacagttgtcctcattattcagcgcgtcaaaccctcaagtcgctggcatggtacatgcatcgtgatgggatggttactgtaagggaaacccgaaacagccagttctacacgttcaaaaaataattttaaaaagtagttgaccttgccctgctattcgagtatatttgtattcgaaggcgggggaatggctctcgcagtgaagaaggaaatacaaaatgaacatgatgaaaaatgcttactacccagttctgtttgtttggactaatggtgaagttaagaaaatcgtcaattctaaagctccttattacactgttggtgaagcacttcgccacgctgcggaagcaaattatcctgctcatgccgaacctggttatgctcgttggaacggttctaaatgggttgctgatacctgggacaactacgaagaagaaagaatggagtgtgatcctgattacgtatctcgtcaaatggaagctcatatgattgcagatcgtagactggataatgaagctcgcggattttattgattaacaaggggctacggccccttttcttttaggtgaaatatgaacttaaatcacgaatgtttaaaagatttgagcgatggtaacgagattggtaacgttatttttcttgatatcgatggcgttctaaataatatgcggtgcatgaaatttggtgaacatatggacatcgaatgcgcacgacacttacgccggatagtgaatcacgctaattgtgatatcgtcatttcctctacgtggagaatcggcaacagtacccataatctacgtgaaatattttatccgtggggattgtatcggatcattggtaaaacttgcactaacttccctcatagcactggaatgcgtggtgatgaaatcaaggcatggatcgatactttcggatgtaaaaactatctcattcttgatgatgacaccgatatgctttcttcacaaaaagatcattttattaacactgatgggtttgttgggttgaccgaagaacaatccacttatgcgatccgtaacattttcggggttactactccgttttgtcctgaatgcaatgggtatggacgtgttaacggctacgacaaatgcggaacgtgtaacggtaaaatactccggctataaataccaataaacataagaggttaaatttatggcaattccttctgtaacaattagcgccaacaaaaacgaacttttgattggtgaaactttgaccttagaggttaaaaatactgaactagatccgggtgatgtgtttctggcctaccgttggcaaaaagatggtgtagatattccaggcgcaaccgccgatacttacacaactacggttgacggtacaactgctggtgattataccctgatcttaaaacacggtgctgatgaagaatcagcaacagaaaccacgtcagatacaatcaccgtgaccacttattctgatgatctcgtttctaaatggacggttcacccgattccgtggcgtgataccagctttaccccgatcggttattgggtacttgatgaaattctgtatcagaaagcacagggtaaagattggaaaactgattatgctgattacaagtatagtgaggaagtacaaacgatcctgaaagcgttcatggaaaacggtgaatgtgagatccaggattcacgaaacggctatattcataaaatgagtgaaatctaagaggctttaaatggcaactgaaaaatggactacggttcatcctattccgtggagaaataccagttttacatatcttccatactggctatacgatattatcgttgatgcttttgagaaaggcgacgactggcgcgattatgcggaagaaaaatataaattagagtttgatactctgaaagaggcgtttgaagattatggtgatattcatgtaatcgaatctcgtaatggtaaactggttagtctgttgtcattgactcctgctcctgaaccagatcctgaccaataaaataaggcaaacaatgaatacacttctttttgatttcgacgacactttagcagaattttctcaggctttttatgataagttcggtgtacgtccggaaggaacgccaaaagaacgatatgacgaaatggcggcttctttggtgcgtactgatttttataaaaaccttccccgtattcaggctgggattgacctccttcaatggagtttccaacgccgaatcggtgatcctgctactttgctgcttcgcgcggaagcggtcagccctctttgggttatgaaagaaaaactgaactatactgataagatttgcgctgaactggggatctctcgtctcgattttagtcgcattgactatccggaacagttcgcagaacatgcctatcgtggtgttctgatttcccgcaaccagaaacatcttgaaatctggaacaattctcatctagctaataaagttccaggtattttccttgcggaaaccctggaagaaaatattcagctagtcacggaagcgcttgcaaaggctaatcaataacaaaaaagggaaccgcaatggttccctttttttacaatctttttaattcatcaagcgctgttttcttatcaccaacaaagaggattgctttacctcctgcttttctgaaaggcaacaccgcttttgcccgatcgtcaaacagaattcctttaccagcgaatgctgctttttcatggctacttttaacgtagtggaattctggaacgtaacccaatactttttgtaatgctttacgtttttgttcggcaacaccgtcagaattgaatttaccgacactggttagtattgctacatcgccaagtgttcttaaatgatggaataattcaaatccttctttgattggttccagattttcgtagaaatcagttttggcaatttttgctttgcactttttcaactcatcttctgtcatcatcgagggttcgccatacattggcacaaatgaaccttcccagtcgaacaatacaccatccatatcaaagaaaaacttattcatatcaattcctcagtttgtgtatgcatactataatgtttaatcattaatgtcaaccccaagtatcagttttcggtgcgtatgctgcaactttagccacaatttccttatccagttcagctaccgatttctgaggtttaccacgggctttaactttgatgtagtttgacttaacaacaaacatccctttgttacctgatttcttgatctcgctatcaacaccaactttgttaaagctgatccaaatgtcgccgtccatatactgtttaagagaatcacccatgttcaggatcttcgccatagtaagggccgcgccttcgtgggtatccatgagaatttctttaggaactacacgatcgcgtttctggttctgctgcatagcaatatgcacatcgttcataacccatacgatatgtacgttttcttttttgtatcccagcgtttcgacatcacgcgcgatgcttgccagcttgctcatgccttttaacgttacgtcaaagatgaggttaggtttacgatcttctggtgctgccataataccggaataaacacggttttggtttttgttggaaatgttgaaaacgtcggcgatcacatgatggagggtagatacgttttctgggtttttgaggttcattgttttgacatcatgacccgtttgtttcttgatctctgctgcgagtttatcgctacccattacaagttttttcagggcgtcaacgtccagtgtaataccttcgatgcctagcagtttttccagtgtgaatcctttaccggaaccagcaccgccagccagaataacaacctgaccaaacttaggataagcacggcccccgaaggtgatcagcgcttcggttaaggtgctttctgtgaattgtttaaatgacttcatgtaaaattctccagtttattttctattatttattgacatgctttctgacagtggtgtatggttatggtgttcgacggataggccggaagaactttaaaccataaggtatatgatatgaaaattgatttacatcgcttcattgcagaattttcccgcgaccgcgacatggactctttcaactactactcccgtgaaattgaagatcgttttgcggctcatgttgggttccgtcgccaccatactcctaaaatgcgccctgaccacgatccgaagtatagccctatcacatggcaagccccgatcaatggttacgttgaagggatccggatcatgacttttaacgcgatgtatggaaacgctttgatccatattgcacgtgagaaaaaggcagaattccctaacggttggcgtattgatgaagtgattcaaacccttatgcagttacgacgtgaatacaaagctggtatgtgtctgcgtaatgaacagtatccgatgtataaaacgtatgcctatatctctaagcatctaattaattccatgttttacatcgttggtaatcatggttccgctatagatatcggttcttatgaaatcgtggcttatgctcgcgaacaaggaaaggccgctgcactgaaaatcattgaatctggtgctatcattcttaaccatcgcattgatactattgcttactatggcgatcaggttgaggttgaaggcgtacaccatgaacgattcaacaaagccgtatttgctaaaaatggttatgcttatggtaatgacattataacttctgctattcctttcgttcgtctaactgttgaaggatttggagaaaggttgccttataaactgtcagaagctcaaatgtgtgcggctgctgaaagaatcgccaaaaagcggaaaatgtataccgatgaatacctggcgtatgtcaacaagacaaaagaagatgtagatcgagaaatttcttgcatggatttgtgcctttgatataatgtaagcatcttttaaagggaggatgcatgaaaacgatacattgcagaaatgaaaacgttgtttactatcacggttcgtgtactgctgctggtattgaaagcatgttattgcctccctgtgattctgatactctgtctgaaaaaggcaggaagaaaaatttagaccgtgttttctttaccgctgatatcgggttagctcgtatatacgctggaagggccgcgcgttctataggtggggatcctgttctgtacagggttgtgtgtccggttgatgttgtatgcatgaacgaagacaaaggcgcgagcgtttaccatgcagcatgggcgttttgtgaggaattatgaatgataaagtgttggcgtatctcgttttcttgctgggatatcgcttagaagtgatgggcgcgtattcatcaatttatggtgatttaacggctatctggatggtcgggttaggggttgcttttacattcctttcctttgcaattgttaatgaattggaaaaggatattgtatgaaactatatcatgtgatctactctggtgttttaggcattgacaaacaaatgttagttgatgtaatgtgtaaaaaactcgatgagcgaattggaacccgatacaaaaatcatgtatcggaaagtatcttcatcaacgttgaccatccaaatgacatggaagaaatggttaatactcttgatgatcagcagatcccgtttgttgacaatttcaacatgagcgctggagtgtatacggtagtaacttttgttctaaaaaatgttgacagccgaaacgatagcgtgttgaatgtagttgcaaaaatcgattctaccaaaggaaaataatatgaaaattgtacaccgtagcatttccgaactgtctcaagccgaaaaagtgcaaattcatttcaaattcaatgatttgcgtaaaggttatgccgaaattgcccgtgaacatgggttagataacggcgatatttaccaggtagtacaggaaattgaacgtatccgcgcgttccgttctgcaaatctccctgttaaaaatgcaatgcgccgtgaagcgatcgaaatccatcgtaagcgtgtgtacaatttagaacgtgctaaacgtccgatgaagaaagaaaagaaacctcgcccgtttaaacgcgaacatcttaacacctctatggcgctggcgtttcaagatgcggggattatctaatgcgtaaatctgcgatggatcgttgggctagtattgctacttcaaacgtaaaaccaaatcaagccgcacctgatgtagaagcggttcgtaaagcgaaagaacctgagatcgtggcccttagccctgaactcatcgagcatcgccgccgtgcgtctgctattgaactggatttgcgtattgcgcgttcatataatctcaagcatgaacacgccgcaaagaacaaccattcttttgaccttactctggaagattggaaagtgttgatgacaactgaacgttgtcagtattccggcaagatgtttagcaataaaccaggtagcccatatgcccgtacaatggaacgtattaatccacgtctgggatatacacaagaaaatacaatagcggttatcaacgccgctaatgccgaaaaatcacagcttgatgcattcgttaagggtgatgtcattctggatgaagtaaaagtgaagttgctgcgtaaagcactttatcaagtcgaaaaacgtgtgaaaatgaaaggttaaattatgtttaagaaatattcttctctgactaaccattatgaaggtaagttcatcaatggtgtaattatgaacgggcttactggcggtgtgtgggttgcacgtgaaaagatccacggtgctaactttagttttatcaccgatgacggtattaccgttacccccgcaaagcgtactgatgttgttaagccagccgaagatttttatggctgttcagcagtagttgcaaagtattccccagggatccgtaagatgtgggaaaccctcaaaaagaccggaacttatgatgatttggttattcaagtctacggtgaatttgcggggcgcggtgtacagaaagatgttgattacggcgaaaaagatttctatgtattcgatatccgtgtaaatggtgaattccttccggataacctgtgctcgctgatctctcgatctcatggcctgaaaatggccccgctgttgggatatggtacttttgaagagatcaaagaactgccgatcacgtttgaatctgttgtgaataaagcaaatagcggcattggtagcgataatacagtatatggtgaattcgtatatcctatcatggacgttgaagagggcaacattgcagaaggctttgtaatgaaacctgtttcacctgcttttatgccaaacggtgaacgcgttgcaatcaaatgcaaaacaactaaattcactgagaagaaagcgaagaaagcaacccgctttaatgctccggtttcactgtcagaaaaagacaaaaaccaactcgatgagtttgtttgttaccttacagagaaccgtgtgaaaaacgttctttcgaaactggatctggcttcgatcactgcgaaagatttcggtcgcattatgggcttaacggttcaggatgctatcgaagaaatcagccgtaatcatgggcctttcctcgaacagttcgaagacccagcaatggctaaaaagctgtttgtaaccgaagcccaaaacatgattcgccctgtatggggcaaaatcctgaaccatgaattttaaactatgaacagtcacggaaactatagaagtatttctgatgaaatagccgcaataagagaactccttcaatacgtttcagttgatattacttctggaaatatcgtatggtcttctccgcgtcaaggtaggagggttggtgattccgctggtactatgaaagatggatattgtgttataaagtttcaaaagaaacaatatcgcagacatcggatcatcttttatgttgctaatgggtatcttcccgctcttgttgaccataagaatggtgttgaatttggtgatggtatagataatttgcaagaggcaacgcaacaagagaacataagaaagcagataaagaaacgaagcaatgcttctggaaaaagaggggttatttttgataaaagaagaaataactatcaagcgcgaatagttgttgatggtaagcagatttttctaggttcatatgataaccctgaaaaggcttatgaagtttacaacgaaaaagcaaaagaattgttcggtaatttttatgtcgaatgattttagtacagtaattaaaactgccaagacagtaacattaattggcagtcgtaaacctcctgaacgtatcgcaaacattgctgttaaaatcggacgtgctttgaacgaacgcgggatcagggcttattctggcggcgctcctggtatggatagtcactttctgtttgactatagtccggataacagatgtataatccttcctgagaacgggtttaacggccttttctcaaacggaaaggatatcatcgactttcgagatttaaacacacagaaagccgctgacgaagccagaaaggtagcaggtaacttcgatacacagaatgaatacgttcaaagaaggtatgcgcgaaacacgattcaagttcttcgtgaaaatcttgacaatccaactgattttgttttattttgggcggaagaacgtgaaggatgtgttaaaggtggaaccgcgatcgctgtaagattggctaggttgtacaaggttccatgtttcaatctcttcaaagaaagtgtattgaacgatgtgtgtgatacgttagggatcaatatcaaacccccaacgttggattttttatggtaattgaacatgcgcccttacttcgtgaaacatacgaaagatgggctgttaataacgcaataggtgaaaatatgattcatgtacgtagtatcggtgctgacggcgaaactccagtagaaggccgatcaccaactctcgcagaacgagcaagagaaattatcaacgatcagaatgctaagatgatcgaacatgcgcgggatacaatcacaaaaggtgttctgaaacacgcgacacaacaaagccttatctatgatatgaagcacgatatcggctcttgtctgggtattgaatgtactcgctatgcgttccaacgggtttctgaatggttggaagaagaagggctaaaattcgatacagaagaaaaacgcaacgccgctaagatcacaaattctctggctagtaagtacaatcaaacgtatcgaaaccaggaagaacgcgaagtgttcggtttcaaaattcctgaaaggaaaacagatcgccgtgtaagtgaattcactttttacattagttggtaaaaaggtgttgacggggttggttatagtagtattctaactcccgtagacaagacactaactcagaaggataaacatcatggaaatcgtaatgaaagcaacttatgctggatattgcctggaagcaaaaggtgttgctaacaatggcaaaggcttacgggccaatgttgaagcaatgctggatgcattacatgcagtgtacgaatacgacaacgtagcgggtagcgttcttatccaggcgttggaagttgatggtgttgattgtgctggttggtgggatgcttacattgactacaacgataaccgggtttacctgttgagcaacaaagattatttctaaggaaccactatgagcgatgaagctgaggctttagaagattgggctgattttgatgacgaagaagacagggaatatttctgcgttaacagtggtgcttacaaagaccgtttagaacttcgtgaacttttatccggttcctctcaaatatcaggatccaaacgaaaaagtagtaaacaaaaagttcagtatagtgatggttctgtacgtgatgaaaccgttgttgctgaattccgtggtcgggttatcacaaaagaacgacaaattgatgtaaagaacttgtatgaagtggctaaggctgctaaaacaggttctgtgattgtttgccctgtgtgcaaagaaaaacacacaaagacaacgtatcacaaagttttctgttcgaatggcagaaaaaccagtaaggattgtaagtctaaatatcacaatacaatccatcccgaacgactggatcgggtattttaaaataaacttaaaacgtggagtacgtttatgaacaacaaaactttcgaagaactgaacagcatcatcacttccgtagattcctataaggtttctcactggtcgcaatatccaactggctccgaagaggcgctgttttatattgaatctcgtggtggtaaatttgatcaagtagttacggctggctgtaaccgccttgcgcaaatcctatcacgtccggtgactatggaaaacgtagattttgctaatcggttgtacaaaatgcactttgggcgcgaaatcttcaactacaaaggttggaaagaaattgcagaactgggttacatccctcttgaattcagagcgattccggaaggaaccccagtagcggttaaaaatccggttgcaactttccatgctgggaaaaatgcgctgtggttagcaggacacgtagaaaccctggcgatcaggggagtatggttcccttcaaccgtagcaactctatcccgcgaatgtaaaaaagtgttgaagaaatatctcaagaaaacctccgatctcgaaggtgaagcatttgatatggtattacgtacccgtttgcatgacttcggcgcacgtggaacctcttctgctgaatctgctggtattggtggcctcgcgcacctgtataacttcctcggtactgataccgtagaagcgctgattatggctatctctctgtttgaagattgtcagaaagcgtttgatgatggtgaaatggcggctggtatttcaattcctgctcgcgaacattccactaccgtttcttacggcaaagaaaacgaagaccttgcgtacaaaaacagtattgagatcttcggagaagggatgtatgcatgtgtgtatgattcctgggattttaaagcggcggttcgccgtatcgcagaatataaagattcgattctttctaagggcggtactctggtagttcgtccggattctggtgatatggtagacaatatcatgtacgctcttgaagaactgggccgtatctttggctatacagtgaactcaaaagggtataaagtactacacccagcagtaaggatcattcaaggcgatgaaattcatggccctgaaacaatcaatcgggtgttgaactggatggagtctaaccgttgggcgtctgaaaacatcgcgtttggtatgggcggcggattgcttcaagaagttacccgcgacactcaaaaatatgcgatgaaaatgtgcgcaatcaaaattaacggtgtgtggactggtgtttataaatgtccaaaaggcgctgaatggaaaaagagtaaaaaagggttgttgatgactatcactgatggtgttaactttaaaaccattgatactctggaacagaaagtgccggaaggctggaaagatgctatgatcacatactatgtcaacggaaagattactgcccgtgacactttagaggaaattaggaaccgtgccgggatttagtatccgcaaaaacgacaaaggaaccgtgattttctatgacaacatgccccttgtagctcgcaaggggctttttgctaaaatcgctgggtattcctttaaactggaagaagtcaacgacgaaacactaaaagagatcgtaagaattgccttacagttaagaggtaagaaagacgaacaaagagctattgacatgatcaataaattgggcgaaactcaatgcttcatagtgaatcgtggttacaagtacgataccattgcaaaatttgaaaaagggctttgtgaattatgagttattatggtgtgatcccatacacaggaaacaagcaaaagctacttcctgaattgttcaaattatttccggacagaaacagctatatgcgattcattgactgtttttgtggtggtttgagtgtgtccctaaacgtccctaaacccgttctaagcaacgattacgatcggacgttgattgatatgtataagcgccttcaaatgcttcctgacctctctccggtgcgagaattgattaaacaacatgggctgggtaagaacgagaaagaagcgtatctcgcatttcgtgatgcatataataagaacaaggatccgctatggctctatgttctgatcctgcattcgtttagtaatgttaatcgaaccaacgataaaggcaattttaacgccaattttggttgtagaacgttgaatgattctaccattaaacggtttgaacacttcaaaaacaatgttcggggaattgaattctctagcgcatcgtttaaggatcttgatatctgtttgaatgattttgtgtactgcgatccgccgtacctgatcactgatgcagtttataacaagttctggaacgaagaacgcgagcatgaattatatgattttctcgataatttaaactctgatggtatcaagtttggtttatcaaacgtgacacatcatgcaggaaagcaaaatgatatcctgatcgagtggatgcaaaaatataatgtgcataacctcgataaaaagtatctgttaggccagcatactgattcttacgaacaaaataaaacgcaagaagtctacgtgtgcaactaccagaaacgcgacgtaaatacattccctttaacactgaacgatttaatgtaggttaatatgtttaaaatttatggctatatcccttctgtgtataactgcgccccttgcctgaactcaaagcgtttgctggacgcgaaaaaacatccatatgagttcgtgtctgtagcggattcggttgaagacggcaaacccgtgttgaacgaagcggtgatcgacgaactcgaagccctggttggtacgcgacggatgaccatgcctcagattttccatgacgggaaacacgtaggcggattcgaccaacttcgtgagtacgtccgcaccctgtaataaataatgacaccttactgaatggtgttattatgctgacgaaacgaattaccaaaaaagactatcccacgatcaaacaagccctctttgaaaaacaaaaagggcgttgtgctctctgcaagcgccctttagagggtgagatcgaaaaacatcacctcgaccatgaccatgctttagacggcgaaaacgccggacgtgtgcgcggcctactgtgcaacctatgcaacggtacagaaggtatcgtgaagcacaaattcaaccgatccggtcttgtgtcccgtgatgttgactacatccagtggttagaaaacctgcttgcatatctgaaacaagattattccgaaaaccgtattcatgacaaattcataccagataaggtaaaatggttttcaagacttaccaaacctgatatgattgccgaaatggtttctatgggcttcgagtacgccgacaaagacgaacgcaaagccttaaccgcaaaatatagaaagcaattaatgaaggcaacgaaatgaaatatctaaacgctcgattatcaacgcaacagaagaaaaagctgatgatgttgatatcctccactgacaaaaagatcatatctctacatgattggatgcttggaaggggtgactctgatttgtgttatgtcaaaccgaaagaccgaacgatgtttgatgatcgcggtcgcacattgactaatttttctcctatcaccgttattgatatgtgggaactccttgagattgtaggacgggatatacctgttgacggggttgaactgatcaaatatcttaacgagattggacacaatttagatattatccataaggcaacgaaatgaaagtagaaaaacgcgacggtaaaaacgtcgatttcgataaagaaaaaattcgcaacgctgtgtataaagctggcgggactatgacggatgctgatgccgcaatcatgctggttcagtacaatcagatccgcgatggtagcgcaatgaagatcgcccgtatccaggaactcgttgaagaatccctgatgaaaacgaacccagcggtcgcccgtgcatacatcgaatatcgccacgatcgcgatattgcccgtgagcagaaaagtaaactgttcaaagatatctccggcatggtgaatctgtccaacaaagagatcaccaacgaaaacgcgaacaaagacgcaagggtattcccgacacagcgcgatttgctggcgggtattgtggcgaagcatttcgcccgtaatcatatccttccgaaacacatcgtagaagcgcatgattccggtgacatccattatcacgatctggattacagcccgttcaccccttacactaactgctgtctggttgacctgaaaggtatgcttgagaatggtttcaaaatgggtaacgcggatatcgaaccgcctaaatcgatcggtgttgctaccgctctcatggcgcagatcaccgcacagattgcttctcaccagtacggcgggacaacctttgcaaacgtggataaggtgctggctccatacgtggaaatgacgtacaacaaacactttaaagatgctgtttggtacggggttcctaaatcaaaacagtatgcgatggaaaaaacagaaaaggatgtattcgatgcgttccagtcatacgaatatgaagtaaacaccttacatactgcaaatggacagacgccttttgtcacgatcactttcggtatgggtactggttggcgcgaacgcatgatccagaaagcaattctgaaaaaccgtattcgtggactgggtaaaaaaggcattactcctgtattcccaaaactggttatgtttatggaaaaagggattaaccttaatccggaagacagaaactatgatattaagaaattggccctggaatgttcttcaaagcgtatgtatccggatattattagcgcggctaataaccgtcgtattactggctctagcattcctgtatctcctatgggttgtcgtagtttccttagcgtgtggaatgatgagcacggtaatgaaattcttgatggacgtaataacctgggcgttgtgacaatcaaccttcctcgtattgcgattgaagccgaagcacaggaagatgaagacgcgcatgatgcattttggcgtatccttgatgaacgtctggaactgtgctttgaagccctgatgactcgtatcgatagcctacgcggtgttaaagccagtgtagccccgatcctttatacagaaggtgcgtttggtgtaaggttgaaacccgatgatgaaattctggaactgttcaaaaatggacgcagttctatcagtctgggatacatcggattgcatgaaactctgatgcttttcggatctggacaacacccattcgaccggatcggttctcagaacatgggtagactgattctggaatatctacgcgctgcgaccgaagcatggaaaaagaaaaccggatttgggtttagtctgtactcaacccctgctgaatctctatgtcatcgtttctgcaaactggactatgagaaattcggaagtatcaaagggatcacagataaaggctggtacactaacagttttcatctggacgttgaccgcaaggtaacaccgttcgagaaaatcgactatgaagccgattatcattacattgcaactgctggacatatcagctatgtagaattccctgatatgaaaaacaacctggaagcccttgaaaaagtctgggattatgcaatggataaactggactacttcggaactaaccttccggtcgataaatgctttgaatgtggctctgatgatgaatttaagccaacagaagacgggtttcattgtacccattgtgggaaccatgatccggaaaaaatgagcgtcacgcgccgtacatgcggctatttgggtgctcccgctgtccgtgggttcaacgaaggtaagaacaaagaaatgatgcatcgcactaagcatcaaaattaatcaaaaagcccttgacttcggttgagggcttttgttatattgggcctatcgaaaaggagacatactatgaaactgactaagaaaatgaccgatgtagtggcatgtgcgtttgcattaggctacaaagttgaaaatcacccaactcgcgttgaagtcatcaaccctatcaagggccgtcctggtttggttctgtgtgaagacggtacagcatatcgtaatgatgtctctttagaactggcaactactatccgcaccgcaaaacaaatgaaagatgttctcattagcggcgcaaaattgagggctttatgatgtattggacaaaagataaatttgtttttcgtgatgatacgtgctttgggactgcataccgaaacttggctattcgtggcggttcgttttcggctaatgatttgtctaaggtagtatttcctattaaagttactgagtatgacgtattcggtgttaaaggatttactgattactttggtacaaagtttgaatcagaatcttacatttttactaatagcgatcgtgaattattcaaaaaacacgttgttgttaaagagaaaccgttattaccaaaagaggacgaagcaaaggaaatctatgatctcctgaacatgcttgacaatctcggtacttgtcatctgttcggtaaacgcgcccgtaaagcgaaagatgttctcaacttgttgcgctctcgccggaattacctgatccgggaagctgaacgcaatctgaaaaattcagaaaaacaggctgaaatccataaatccacccttgctaaattaaaggctttgtgatgtttccgttatacgctaaagtgcgtcgaaatgtcgggaattcatatcaggaatggagtgaatggctacgtgaaacaaagtcattctacatttcaaaagcaactgatatgaaaggccgtaacattcgctatcgtaaacccagtggtaaacgagtgaatgggatagattacattgttcttgattcgattcgggatgatatacgataatttaactttgaggcaatattatgattttcaacaaaacaaattcacgtaatttgaactatctacgctgtgaactggaagctaacgaaattgaactgtttttctgtggggctacagatccggaacacaaattgcattgggtatcaggtgagattgtaagcctaaccgaccagattgttgaagaggctacccgtcgcgatgcaatagttaaaattggtgctgttgatgtgaactacgaagggcatccttcatttttcattcaatattatccataaaagtattgacctgtatatctgaatgtagtaacatccttcttgtcaactaaggaggatgttatgaaaatcaaaaacactgctactgaaactctttgcaacgaaattgcagaaatgtactggagtaaaggtcacttagaggctatgaaagagtttcaaaagtggtgtgatacccaaaagttagctaaatgggaatacatcgttattgttgaacggatcaaagaactgatcctcgtgaagaaaggtaacatgaaatgattcaactgaaattagacacaaatgcggtgttaagcctgtttccggaaggttcaaccgcccgcgtagatctccaatctgctatcatcaaaaacgtggtgaatagcgtagttggtaagcgtgttagcgaagaaatcaacaaacggatccaggaacagttagctgttctaatgccgaactcatccgaaattacacagatcatcaaatctgaattctcggattacgtcgaaaaacgttatgggtattccaatgtttttgatgtcaactatggcaatgttcgcgaactgtctggtaaaatcaaagaatcggtaaaacagcaatgccaaaccattcttaaagatatcgagaaagaggcgattgctcatgcaacagaaaacattattgcagacgaagccgcgtttatcgctcgcgtctcgaataacctggaagttactgtacgcaaagcagtaatgcaacgggttaacactcagttcccagacattattgacgaagcgatcagagaacgtctgtttggtgaaaaagcatgaattacgaccgcatctataatatggatgtggtcaacggaaaagggatccgtgttgttttgtttgtgactggatgcaatcataaatgcgaaggttgttataacaaatcgacgtggaatccttgcaacggaacaccgtacacggaagagacagaaaaccatctgatttctctgttgagtaatccgcatgttgatggacttacattaactggcggcgatccgctttaccgtgacaactatcctactatcctaaaactgcttgagcgcgtttctaaggaacttccaaagaaaaacgtatggttatggacaggatataccctggaggctttacaggccgacccagaacgttctaagctacttccttacattgatgttctgattgatggtaagtatgaaaaagatttaccaactaaaaagccgtttcgcggttcagataatcaacgtatgatcgaattcgctaaaaaatcgatagaaattaaaaatatttcttgacctaatgtgtaactatggtaatcttaccacatcgtaaatgacgattaactttaattgagagataatatcatgatcctgaatttcaaaacccgtaaagaagcgcgtaactactgctggaagtggaacattcccctgaaaaccatccgtaatacagggcgcggttcttgcccgtggacagttcaagcaaacgaactgaaaacgttcgtggttggtaaaacttacaaactggttgaccgtgaagggtttactaccaattcacacggcggatctaacaccgcaaacactatccaggcgatgcagatcgaaaaattcctgaataacgaggtaaaaattatctcgaaaatcaattcagatactttcaaaattgagcatactccggaaatgacttttagctctctgcgttcgtgggaagctcgttattttgtcgaagttggcgctgctccggttaagaaaacgaaagccaacccgaaaaaagccaacgttacggctccggttgcgcctgtttcaccagcaaccgcagatcttgatcaaatgcttgatggtggttcggcaatgtcggttgaactggatcctactaaatttgttgaaggccgttcgtatgttctggttaaaccgcagcaatttaaaaatcgttgtggcgctaaccacgggatcaaatcatataccgatgaatacagtaatggtgtatacaccgtttaccatacgacttcgctcggtcatcatcaattgagcaaaacggtagaaaccattgattcccagaccggaaaagttggttactatctgcttgattctgaacgttcgttcttccgtgaactggcgacaggaattgttgatgaacctgttagcgtttccggtaatagcgctatcgctatcaatgtagacgaagcggctaagaaagaagaaatcgcaaaagcaatgacacagcttgaagaagcggttaaggcccatgatgacgcgcttcaaaatctgcgtactgcttccgacctggttcgcaaagctgctcgaaaagtagcagaagtaagcaagtaaattaaactgggtgctccggcacccttttttatgaggtgacacatggaattattagaaggtaaatcttataccctgaacatcgacgctaaagaatttgcagaaaaaacctggcgaaatgctttagctgaattgatcaaaaacaacggctatatcacaatcgatcgtattgcgattggggatactgaggacattgcttatgttctgcaagatgatttcgaatacgagatccctagccatatctggaaatacttcaaaccatatgatttgccggaagaagaaccgaagattgctactaaagaagaaatcgccgcgcctgttttaaattttgtatcttctgatcctaaactgtggatgactgtaaaacctgttcaacaagatatcaatgatctgcgatttgattatccttttgtcaagcggatcacttcgatttctgtactaccagcgccgactgattcacaggcacttgaatttgcattacagcatgttttcggtgataataagctgtacgcgattaacaaggaagctgctattgatgaacagaaaaaggaaatcatcaaccttctttctctgcatcaacaacttgaagcggtggaattgattgagcgtatgctttctgatacaaagaaagatatcattagcaaaatcactccggcacgaaggaaagcaattgatgaaaatcgagatttacggtattcccgaatcgcttcataaatgttatggttgtattgaagctcggaaattacttgatgagcatggattagaatacgaattttattctgttctaaagccagcaaataacagtgtggggtttgattacgatcggccccgcattgaagagttagcgaaacgtgttcgtagtcgaagcatggcatttacttaccctcggatctttgtagatggtaattttattggtggttatatgcaattgaaagagtatttgggtgaagcatgaataaagaatacattcgcaaagtagcaaacgctattcacgcaacaacgattgattttctggaagggtttgatcatattatccaccctgaaacgctggatagttgggaagccaaactgtttaaaagtatcaatgaacagtttccggaaaaggttaagcgctggtttatcagacaggaaatcgtagcaacgatccttaatgaacgtggtgttgaggcgttcggtgtaacccctctatataaacgaaaccagattacagacgaaacaatcaagaaatataaaaagatggttcggaagtaataaataatcagttaaatggccttcgggccattttttgtatataaatattggtattgaatacaatataggaaaaaagataatggtagctaaatcattccgcgcacgaagtggccttgatgctgctggtgaaaaagttatcaacgttgggaaggctgatcgtaatacgctgagtgacggcgttaacgttgactttttcaatgaatttaacggaatccagcagtatgacccgacccgtggttattctcaagacatggcgatcatttatgcgcgtcgtatctggtacgcaaaacagaatattgcttcccctgctggggctttcgacgaatccaaatggatcgcaactcgtaatgacccgaaatgggtttatagtaacgtaaccactccagatggtagcattattgaatctggtagttacattatggctgatggacgctttactgaacttctgtacctgctgccggacaacccgacagagggcgacgtaatcacgtttaaagattgtggtggtttagtaggtgtgaacagtatccttgttaagtctaacacccgtcagatccgtttacgtactgtacaatcagcacagtatcgactgacccacccgtacatgatcgcaacgtttatctataacggtaacgtatggcgtgttgctgaaactctggataaccgcgattctgagatcgtgaacgcaaccggaacaggttcattccagttacaatctggtatgacagttttccgtaatagtgctacaggtaaaattactctccagttgccgaaatatgcaaatgatggtgatgtgatcacaacctatgacgctgataaaatgaactctatcaacatagccgttttgcagatttatccaggtagtggacacactatttctgatggtgcaagtactggtgttacttcggtaactagccagaaatccggctttggtatgttcatctttgatgcacagaatagccaatggaaagtatatgatgctgataaccgtgttcgtctgcgtcgtatctatagtgatttaaacgcagttcctaacgattacgtttttgttactgcaaacccttctgggactataccaaacgttacagttacccttccaactgatgttgccgatggtgatcgcgtttacgtatccctttacatgatgggtaaaaaccagaactgtacaataaaagttaaagatggtacaacggacaagatccgcaccaacaaaaatatgatgcagttcccgcagcgcaaagattatccgcctaatgattggtttagtgtaacttcattagcttttaatgctggcagtgattacctcccgtatatcgagttttcttatctgaaagctacgaaagaatgggttgttgctaattatcgtccaatcgttgaacgtgttgatgcaactaacagatcgcgtactggtgttattgctctggctgcacaggcagaagtaaacaaaaacttggaagataaccctaacgacgaaaccgctattactccgatgacgttagcaaataaaactgctactgaaacccgtcgtggtattgcgcgtttagcgacaactgctgaggttaacaaactttcaaccgatacctatctggatgatgtgattgttactcctaagaagctgaacgaaagaacagcaactgaaacccgtcgtggattggcagaaatcgcaactcaggcagaaacaaacggaagcaccgatgatattacgattgtaaccccgaaaaagttgcataaccgtattgcatcgccgaccttaactggtatccttgcccttgttgctactggtggtgctcctaacaccaatacggatcgttctcaggcgggtactggggtttatgatcattcagattatcagaaagcggtaacgcctaaaactcttcgtgagtataaagcgactcagttacaatctggtgttgtatggctggcgtctgaaaccgaagttattaacggtactgttgcaagttcaaacgttccgaccgttgttactccggaaatgctgcacaagaaaacctctactgatggtcgtattggtttgatcgagattgctactcagacagaaaccaacgcagggactgattatacgcgagcggtaacgcctaaaacgcttaacgatcgtgctgcaacagaaacgctgacaggtatcattgcaattgcaaccactgccgaagtatcagcaggtactgtaacgaataaagcgatcgtaccgtctaaactgaaaggttatctggacgatacaagccatattactgttgctactgctgacgggttaactcaatctgggactatctggactacggttaacatcggtattcaatcagcaactgaaactcaacgtggtactttacgcgtcgctacacagtctgagacgaacgcagggacattagatacagtatttgtcacccctaagaagttacacgctaagaaagcgactgagagcgcagaaggtatcattcaggtggctacggctgctgaaactactgctggcaccgttgcaaacaaggctgtttctcctaagaacttgaaaaatacaattcaggttgatacttcatggcaagctaccgatctggtacgtggtactgtgaagctgtctaaggggcttggtacttggtcgggtaatgatgtggctggttctactcttccggatgatggttatgccgctgtaggtgttgctgtttctccgtatgaactgaacttaacactgaaacactatctgccgatcggggctaaagcggttgatgctgataagctggataacctggattcttcccagttcattcgtcgtgatgttaatcagacggttaacggggcattgactctaacgaaagcaaccactgtacaggctgacattaactcaacagccgacgcaagtttccgggtaatgaatgttagtggagatctgaacgttggtgatggttcatcgatgggtaaacttcgtttgaatggtggttcatctaacgactggtcaattcaagcaagttcagcctctgggcgtattgcaatgatctcaacgggtaacactggcacagttcatctttctgtgtataatgatactcgcggcgttgtagctaacgttaaattccaggctcctgaaattcaggcgattagcaaagtgacgctgggtaatgatacagtgatcacggctgctggttctgttctctctatgggtacgaaaaacaagacaactaagatcctaacttcggacgctggtaacattttggcagaagaatctgggaactcttataaagtctttactgagaagaacgcgcaaaccttgctgaatcctacgtatgtacgtaaagcaggtgatacgatgtctggacggttgacggtaagcaacagttcaattatcatcgcaggtcaagcggcttggtcaacgctggatgcagtaacagaagcatctagaggtaactggacggctgagatcacagcatcggcgcaatacaacttgcttcctggttatgcggttccggttcttgaaccagacccgattaatccggatatcatgattgtaacccgttatacctatgttaaagcacctggtactttaacgcagtttggtaacggaactgcattcacttatcagatttgggcacctcgtccgacctctggtgctggtgttaatgcgctggcgcaatccttctggatccgtcagatgaacccaattacgggtaaatttgatgagtggggccgcatgtatacgagcaacaacccgcctactgctggtgagattggtgcaacgtctgctgttggtactacggttaaaaacatgactgttaccgattggatcaaagttggtaacgttaggatttacccagatccggttactcagacagttaaatttgagtgggtggcataatgtcaaacttaatggcggggttcggccccgattttgtagaaacgcaaattctatcggaaacaaacagcgtaacttacagaataaccgcaaaggcaacacatcccaatgcggttcctaatcagtatgagtttacactaaatcaaaaggcggtagggacaccgcctagtgttgggatcaacgtatggagaattaacaatgctatagttgatccaattaaaaccttcacattatcgaatgataattcagcaactgcaaacaaagcgtttgttgaatatatggatgctcaaacttctgggctgtatttgataatgactaacggtgaatacaaaacaagccaaatcgttgatgattggtttgctaaaaacagatccgttatgtggcaaggcgctgatttcgctcagagattcccaaattctgcatatgttgcattgtatggggccgcaaaatctcgtatactgattgaatcgttttacgcgaacgatggaattttaaaagaagattcacgcgcatcaatcgaccttgtctatgataacgttggtgatgttggtcgaactggtgtacctttcagatctgttgaagatacggaagaatacaattcaaccaatggatctgaatataaagtatatcctgttgcaaacccagtgatctctaaactagctgattacggtatggctcctggattggctatgatgattactggtgatttttacgcaagcaaagcattattggatgctggatcaacaacaagggttactgttcgatggtttacgggtactgctcaaacttcatcatcggtgattgaagttcctgcaaataaacctgatgagtggttacgatttgaacagttctatacgatccctagtggttgtgatggatttaacgttgctgtatctcgttatcctaaacccgctacggatagtttatctgcgatccgtaacttcgtgatggttcaggtatctgctgccgaagccgatcaaaactttgctgcacagtttggggttaacggtatcagaatgaacaacatgatcgatggtggaacaccgtatatatttgaattgccgaatactaaggtttatcctggtggcgattattctgcttccgaattccgtgaagttgatgcataaacaaaggctcggatcatcgggccttataaatatgtaaaaaggggttattatggcagatttaaaagctggttctacagtcgggggtttacctatttggcactccggcacatttccgctggttccggttggtaatactctaacctatcgcggatataaggtttatactgaaaacgataaaccgcaagcatcaaataacgacttcgtttctaaagaaagcggtggtcaatatttgggtgtagttgcctttaaacaggggctacaaattaacgctactttcacaggcggaagtgaccagaacggtttatattctggtaatggtgatggcgcgggattatcaaaagccaacattgatcttgtatcatggtatggtattggtattcgttcatcttctggtactaatggtcgcgtattagtcatcaacgctcgaaatggtgatttaaacactcagggtaatattacggttgaaaaacaaatcagtattacaaccgctaaccctactgacgcaagtcatgcaacacgaaaaagttatgttgatggacagataaataatgtcacaacaaatgctaatagcagggtattacgcgctggcgatacaatgacagggctgttaactgccccgcaattcgcgagcacaggcgcggcttcccgtcccgaacacgtaccacggctcgaccaggtaattactaaagggactatcatagattttggatcttattaaggtgaaacatggctgatttagaaaaaattcaattcctacgtagcacagttgcggggaaaacacctactacaagtcagcttgcagatggtgaactggcgatcaacatggctgattatgccatttacacgaaaaatggttcttcgatcgttcagttagcgggtaaaggtatcccagaaacaaataccaaaaaattaacagttgatgggcctagtgctcttaatgataccgttaccgtagcggaaggtaaaactattactttcaccaacgagaatttaagtggtgaaataactcgtcatatcgtcggtaaatgtgccagcaatgatggatggtacatcggttccggtggtacaagcaataacggcattcttgaaatcggtacgactgatgactacactgaaactattcagtttgtacagcgcggtgctggtaacgtagaagccagaaaattagtcttacttgatagctctggtaatacgactcttcctggcgatttaagactgggaactaataagactgttaaaattaacaatggaagcactcttgttcttgaaatgggtgtaggctctaacgatgtttatattaaaaaccaacgaggtgtaggtgttcttcaattaactaatgatagtaatttaacgttcagaaattcccaggtttattatgccacggatggaagaggccctggtaaaggtggcactcttctgactaatgtagaaaacgcgcgtcagcttgagcaagataatttccctgtaactacaggctctgatactaagtggacaaaaattgcccttttaaaagacccagggtcaagccagagccgcttgcaactgatggtgactaacggtggtaactacggtagtacctatagctctgttgactttatcgattgtagtgctagaaactttccatcctcattaacaagcagtaacattcgtaatcatctacagattcgtcgtctcggtaatccggcacttgaagacacaaaccaactgcgttatagtctagttcgtacctctgaaggtttagaactgtggtttatgcagcgagcatttatcggcagtgttaaagttgcactgttatctattgccggtggtactgaatattatctgcctaacggttacacaacttctgcaactgctccggaaggtttagttgagagtgtggctattcgtatctatgacgaaattaataaacctaaccttgacaatggtactgatggtattctgtctattgctaaaggtggtacaggcgcaagtacagcggatgctgctcgtacaaacttagggttgggtactgctgcaacccgtgatgttggcgaaggcgatggtaatgttctcgaaagaggtgcatttggtcttggtggtacggtaggcgctggaaatattgcaaagggatctttagcagagaccgttaagtatcttaatacatacggaacatgcttctttagggtagaagataacattgctacaataccacagtattctcctagcatttatgttaaaactggaagcaaccagttaattctttcagctaaccacagaaacggtgttattagtgtcgtcactacggataaagttgatggtactaatttaacggtatctcaagtatatactacgttgaataagccatcaccgtctgatgttaatgctgttgctcgtactggtgatatgatgtctggcgatctaacgatctccaaagtgtctcccggattccatttaaattctgagagcggaaactccgtaatttggtttaagtataaaggggctgaaactggtgctgtgtgggcgttgcctaacactgcctcttctggtgaagttcgcattcgtgccagaacgtcgggtggaacgactggtggagaattctcgtttaaatcagacggtacatttacatcacctagtgatatcaatatcactagcggcgctttcaacggtaaaagtgtcaatactcagtatgcgaactttaataacacaagttcaaccacaaccgaacaaaccgtttctattagtggttcgcagcacactccgctgttactgaatagaccgactaactcgaacttgtctatcgggttcaaactttccggaatgaacatgaaacgtttgggtattgatgtaaacggtgatattcgttacggtgaagcagaaaaccagacacaaaacgcatggctgttgacttcggatacgataaacagatggactgttaacttcggtcgtgatattaacgttgctggtgtggttaattcaactggtggatttactggccctgttactgcgtacaatttgactgatgcaagtcaggaccttaatgatttaaccttgaactataccgaaccgggccatattaaagtttactcatgccgcagtgcgggtggcggtagtaacatcaccaataaaccttctggcgtcggtggtaactttattgttattgttgaatgtatccgtaaagtaaacgataccgattacactaaccgtcaagtattacgcgcatcggacaatagccgcagttgggaacgttggttaactgttagcggtactactaaagcctggacaccgtggagaatgaacgttgttaacggaaacgatgatgatgtatcatttaaatctgttaccacgactacaggaaacctgaacagcggaaatgatctgattgttgctaacaacgctcgcgtaggtggtaacttagggttaggtggtgcttcttccacgaaatacgctgataaaggtgttgtgattggcaaaggtagtgctctgttagaaactactgatggtcgtgtgattattggtagttctggtggtggtaatgctgttgaattgcgtcctggtggcccaactcaaaccaacaacaggatcaaagtaactgctacctctggaagtggtggtgatactgcgatcgagtatgaacaaggggcgaaaattcgttccaataatggtggtgatttgattgtttctgctaaagctggtcaaacaatctatttgcgaccgcaaggtgatgcatccagcacaaacgaaacccgtattgatgcaaacggtagtatcacgattaacggcaatattaacgccaacggtacattaacttgtactggtggtgctgttaacggagacttgactgtatcaggaaaagtagatatcactggaaaccagttaaaaactacttctttgtgggctactggagacgctgctgttaatggtgctttaactgttgacggtaatgttgttagtaattacggtattggtagctttgttggtgctgtagatgttaaggctcctgctgcggataatggtacaacacacctttggttccgacattctaacggtggtgagcgtggtgtgatttatatgccgcgtgacaataataccatgatgggtttaagagccggtggaagtgaatggcaattacatggctctgcaggccaaatggtagggccaggcgcacgctggagaattcatcctgatggcaacatacagggtgatgtttatggtggttatatcactaactatatcaacgataggtttaaccaatgtgctcaatgggttcgtactggtgctcaacaagactttggcccaattggtcgaccggcacctggtaaaactgttcctgctggttgggtacttgttggtcttaacggtaacagcaacgaagctaaccagaacatgcaacttatcggcggacggttacaagtatggaaaccgggcgttcaatgggttgattctgctacttgataataaggggcttcggcccctttaaacttaaaggtaaaataatgattgttaaacaaatgaaaggtattaaatggcatcacaattttgaaggtggtgcttactatcgagattgtaatgataagtgttggtattcttttagaaactctcttgataaaaattcccatattattatcgttgatgctaaaacaaataagataattaattactacaacggtgaagatcctactatgataggtttgtttgctgataaagaaatgattttggatgtatatcagctcgacgattttcctgttgattcgtgggatgaattctcaaaaaggaagttcgaatttatcgatggcaagaccataatgactaaagatgttgaagttgaaaaagaaagaaccaaagaagacatactggcggatctaatcaagctacaaaaagaattagaatctatgtaattttaaaggctaccatacaggtagccttttgttgtatcctaaatatacgtatagtaacctaagaagagtcttataaaaatggctgagagaaatcccgtggataaactagccttatttgatcgggtaatctcgtttgtgatgggtgtgaaaacatggaaacaattgctgataaaaataattctaataatggttatgtttcttatggtagtaacttggtacaaatggactgatatattcccgatgataaaaggtgcccttgtagtcgatacaagggctatcgaaattgaaagaacagaaaagtttaatcaatccgcgttggaacagttgagcatagttcatcttacttccaacgcggatttttcagcggtattggcattcagaccaaagaatataaactattttgttgacattgtagaatatcagggaaaattaccatcccagatcgatcctaaaaacctcggcggttatccgatcgataaaacatccgaagagtacacgaatcatataaatggcttgtattattcatccactaaagcaagttcctacctaccgacacgtgattttgtgccagtagcttatacttttagttgcccttatttcaatcttgataactactattctggatcggttttgatggaatggtatgcaaagcggcctgatataccagatatgaagataaacatcatatgtggacaggccgcgcgcattttaggtcgagcgaggtgattaacgtaatgctggtgttaaattgtgtgatcttccaatagcccgtttgattgctttaaagaagttcatcaccgggctatttttctcgtaaatatcccaaactttcaatttgtcccacggatccggaacataatcttcattccttgccgaaacccccaacgtaacccgcctgtatccagcgctgtcgtgataatacacgaagaatggtctacctattggcgcaactttacaacctctcttagcggctctcatagcctcatcgaacgtcattgatacccccaaaaatttctatgcatgaatggtcgaattccgatagtttcactcaaaatgaatatcggatgatctagctcatcgtggttttcttcgtcaatgacgatatcccaatcagtagccttttgttcttctaccgtggcaatgaatacctggtttacttcacacttgcggtgtgtacgtctgatgattgtatccccttcacgaaacacaatcatatcagggttggtagtgcggtacgcggttttacccgcgcacacttcattaagcatatcttcgtatgtcattataaaacctttacacgttgaacgatggtttgtttaacgtctttgtattctccgtgctctttaacggttgctttgaaagtgatttcatcaccttcgtttgcaatgttattaccgaagtaaacaacaacattaccatcaacattaattttggtcataaatctttctacagaagtgtagtaagaaacttgagtatatcccagtgaaatcactttctcaacggttccggtcatttccagacgttgtttgatttcaccgatgtggttagctttagaaatgcgttcctggcgctcttgttcccactgttcgcggatttcttcgcgtttggcgatataatccttctccagtgcaacacccatgcagtaagcgcacacggcgtcaaatacagggctgtttttgttgtcttctttagactggtcagcccaccaaagaacagtaaacattggcatttctgcaattacttcgcctttacgcttaccaatcggcatgatccctttttccagcagttccagtttttcagtatcgaacactgacagtttaccgcgacgttcgaacagatcgaaatctgcaaagccctggaataccattttgaaagtatcagtttcagttaaacgggctgaaacacggtcgaaatactcacgcgctttcgcttccgctttctccggatcggtagataagttgcagatatagttatcagaagtataaccgccacctctacgctcaacacgcaaggtatacattgcatttttacgaccagaagaaatgaagtaagtggtagtaactacggttgcgttagtcatggtatttctccttaaagggtatctcgtttcgatatggctaatataacaaaagcccctgaccgaagtcaagggctttttaatcattcattcgaatctttcattgttttatgaagatgaatatcaaaaattttccagtacgcctttccgcgaggataaatttttgctttgtcaatatcgttgttgcttccccatgtgttgtttgggccacgacatcgattttttatataatctgtatgccagaataagcgctgaaccgatgattccgtacctaatggatcttctttactgaacagaatttgtatactcataagaagaacccagtgcgaacaatcagatcgattttcttttcaggttcaaacggtgatttgctatcgatgttacactgatagaacataccaacatacttttcaggaatgttggattcacgcgcccatttcaggttatcatcggtattcggccccagcatgaggttaacaacatcaacagcataatcctgttctttggtgttgccggaaccgtttacataatgcccgtgggcggttttgaggatctcaattacttcgctatcgtcggtttcgacgttgtaaagcgttgtattttcaggaatttcttcaagaatgatcaaagcggttttcatcacacttacctttgtgtttctgtttacgttttgcttctttaaatgctcgcttgcgatcgcggtgagtagaagcgcggttgaaatcatgtttcgctaccaaattattcatataagccccttaaagaaaaatatttaggggctttcgcccctgtatcaatccagcagtttgcggatcttgtctgcgatacgtccggcgcgggttgcacttgcagtatgatcgctttcttttgaagccagttccgccagcttacgctgatgttcttcttctgctgcttgacgatctgctgcaacctgtgcaacctgctcattatcgtgagcaatacgcgcttccagttcagacagggttttgtcgaaagttgctacgatttcatctacagaacgaattttattaaacagtttcataatttatctcaattggttagttttaatcagtatacatcaatatggttgaaattcaaaatcataaatgtcattcagtgcgcggttccactcggtgtagttttcaccagcaccataacgcatttgaatagcactttcgaacgttgatccgttgaggttcgggaaaccgaacaggtttttgattttgtcatgtgctacatagtacagagaagcactttccagcatcgcaaccatcgcagacggttcgtgttcgcggcgcttgatacgtaacagagtacgactagcaccagttttacggcgttgatttggtgctacgtagaaacggaatactacgcgccctgttttatcatcaactaccaggtaaaacccgttttctttcagatccacgccttcgaatttcttgaaggttccgcgtttcatgtcaccaattttaattgcatatttgtgaatgtcaagtcttgtcagaattcttttcatattttttagataccagtttgcctaattttgtaatttcgcctgtttttacgttaacaaacaaggcgatgctcagaaatgggatgctaatcactacgctgatcaatgtaaacagaaaacgtatcacaaaaagaacagcacgttcaagatatcgttgcatccacgcgattcctaaacaactataccctactataaaggtggttgcaacataaaatgcaccaaatcctttacgaaatacgtaacctttcccagattctatccggtcgtcggcccacatttcacgggcagttttcagaatagattcaccactagcgcgagtttcgttagccgaaggcatgtttttaaatttcatgatagtctcctatgcgcccagaactctccaggcgcggttgtttagttagtaatggctaaaaccatatgtaacatcaatcatgactttataacggcatacacgcatttttgcgttattgtaatccactgggatcgctaccacgtcagcaggatccacctttacctgaatgactctaccaacaccgcccccgtagtgtggaaggtatgatttagccgcaacgtgtaggccagtagaacaggtgcgcgttttatcttcgtctaccatgtttcgaggcatggagacagtcacaccaggactattatcaaatttgccagtagcgagatctttatagttatcgcgcacacgtttccaggcaaggaaacaaccatcatcggtcagttcaatgtcattatgtacaaggaacccataaagctggtatacagcatcgcgtgaagggtttcgcatcaaccgttcaaagaagttcaccagatgttcatacggacgatcgttatacatttcgcgaatgattcgttgagtgatatcagaatcaaacactacatctttatatagaagctgatgaccaatgattttaatgttgcctttgctataggttcggatcgcttcttgagtatccaaacaagttacagcacctttgacatcaccagctttcagcatttcatgcgctttcttaaagttcggatgtgtttcacccgccatgaaaacgcgcccttcgtatacaaccgtaatgaacgattcagatccgatcatacgcggtacagtgtctgatactttaggcttttgttttacatcccttttcttagggaattccgctaacttgcggttgataacgcgcccaatggttcgggcgcttacgttgaactgttgggccagtgctgttttacttgcccccgtcaaccatccattatagatagctttctgttgtacttcgtcgagaattttgaccattatttccaccgtattaatttcttaaactcactgagattcttttcgttgttgtaaatcggacgaattgaataagaatcgctatgttcaacaagtgaagccagtaacgggtttagtgatttaaagatttcccatgcctgatcaacacgttttttcatattgctgcgtttaacgcgcattgatgctacggattcacgcagaatcggacaacgcaccctggaaagatttttaccatctttctcatacccttccagacacactatacgttcgagggtatcaacaatcttatacagtttttcattatatcggtttttcacaatccgatcaagcgatacaccgaaacggctatgcaatgcgtctgtttctgttgagtgatccttcccaatccatccaggcaagcaattatctttcaatgccttttcagatttaacatactgcttgcacagcatatcatcaaagcataccagatttgaatccgggatccacttccagaggctgttacgtatagcaaacacaacagggatcccagtatggcgcatgatacgcgataaagtagattctttcattgctgaatccatagacaacccggaattttcaccatctaagcggctatattcatcaataccatacaaccgaacacctggggctttatccagtgataaaaactctgattttgtcataaacagagaagtttttgccagattgccgttactatccaactcataacgatatacggtcggggtttttgggcgcggttctgaatttttcggtgcatatagcgcttttgatttttcgcgatctgtatcatagatctctttttcttttgtcatttcactggtacggagatacacaatttccgattcatcaaaatgaccttttcgaacgatatcattaacaatctcgcgttttgaatcgctatcgtaatacgcaacaaagctaacacggcttaggttatgcattttagcatacccgacgatatacggtttaaccgtgttggtatccacttttaacagaatgagtttcttctgtttccacggataataaatgcgtgtgatgtcctggcgtttggttgtttctggcttatacttgctccagcggcctccgctacccgttacctgataccatgcatctttaccgtcgtattcgttcgcccaatacccagcaatataatcatcattatatttgtttggtttgactagttcgctatggatccagccaatagaatcaccgttgatgcgaaaattagcatctttaccaacaaagttttgtaccattgaaggcagagaatggaaccacgtcagtttatcacgaacggtttgtaacttatcgaattctgatttaactcgattgaaatacacccggctgatttgtttcagacgttctttaacaatccctactgtcattttatccatactcaactcttcgcgagaaggcatgaaatcaagttcaccgatcgggaagtcaataatatacgtatactggctttctgtatagcaatagaacatcgaggtatcatacaaatctttatccagaggataaatgatgttacccatgcgagcatatacaccgctagtgtatgctgatttatgacggatcaccccgctatcgttggttgcttctttcggctgatagttgattttgagaatagaagcaccaacaaagttaggacgaatatcagtaaatgattcgtatacccttgctgcttcgttttcccattctttgatatcttcaaccttaaccggaacggtgatagtaaccccgttaggttcatcgctttcaatctcatacagaggatcgcagaacggttccccatcatccatatagattgtatatccgcatttgataccgtcttttacagattcaactgtgaacgcatcggaatagcaaagcggagatttgcaacccagccccatagaaccgatcaggtcgtttgaatcatttttagttgattcgaagtaaacggtaaacgcatcactaacgaaatcaggagacataccgatcccgtagtcacgaataacaaaacgaggatcaacagcagttggcaactggacatcaaacgggttctgatttcccgcttctttgtgtccatcaatcgcattacaagacagttcgcgaatgattgcgcggatcttgtatttgtatactgtcgaagaaaggatcttatacgctttcttgtttgcgcgtagagatagtttgtttcgtcccttgctggtatctgtaccaacacggtagatggtttgcggtgtatcttcgcgtaatttcattgtttatttctcacttaacattaaaaataacttggtcacaagagtacttcgttggctttttgttcagaccatattctactacttcacaataggtgtcaaggaattttaccaatttttcttcctcgacctgctgtttcttcatatcaaggataccccacacgatagccccgataatgacagaaaagaacgcacaaaatccgaatatggtcagatattttcccaacttaggcgcattataacgtgtcatacgttacccctctttgcgaatgtatgcaagttcttcatgggttactggacggatatacagacggccttttgtatatgccttgcgcccgctgatccaaatgtttttcatatccttaacaccgttcatcacatcgttgtaaaacttcttatcagctttagcctgatagacttcacggccttgataatctttcatgaacaaacaataaaggatctcgttcttatcaactagattagcatcctttgtagttgttttacttggtgaaggtttagcacccaggcgcaaggccatagcttgccacactttaccatgttcataaccgcgcccgacaagagcatgagcgatttcgtgtaaaagagtgtctaaaatatcctcgtagatatcttccgcaacatgacgaccagatagttcgatcagttttttggtataactgcaacggcccagagtttttgtaatgcgtccattgatccggaatgtccaaccattactgatcaaaccgtgtttttccatcatggtacgcgcccagtgggttacttccattgcactacgagttttcaacattttagaatctcctttgcttggtacaaaaccaatatagcaaaaagccccctgcattgcaagaggctttgttattatttcaacttcttagaaagttcttttaaatcattgagatactcaattttaggggttgtttcttcccagtatttcaactgtttccgcaattcttcggcttcgtcttccagctttttgctttcgtccgtggttagatggtagatgttcatagccactaacatttcggcatgattctcgcaacctatccacgtagacacgaatttaaccgcttcgctgcgactaaggccacgcagagaatcaggagattctaccatttgagcaataaacgcaacctttgccagtgctttatctaacgcttccttagtttcctggatacgcttattgatacgctgttgatatacattcatacgaatatcaacgaaatcctttagaagcgtttcagggcgttcatatgagtatagtttgccctcaaagataacgttaatgtttgggtttgaattttcaatcaacccgaaatctttcaggatcttttcgcgggttaacccattggcatactctcgcttgagcgttacttcataacgaaaatcttctttcgatagatccttgtagctaacgataacgcctttttcttccagcttgtcaaggattgcaatgtatttcacacggtcatacttcactgggatctcggtgatcaccaatttggttttaccttgcaattcatacgtgccgtaaattgtcccgtctgtgatttcacctttaaagtaaggatatttcagatccagtgtgaaatctttatcattcagatatgcaatgcacccgttaacaaccgatttaggatcatgaggcggaatgtttgttgcatatgcttttgcaatcccgctaaacccgttaaccagtaccatcgggatgatcgggagatagtaagctggcggcacatgttccggatcttcatgaactggcgttaaatcaccatccatataaattgctttgaatattggcgatagtttgcacttgatgtaacgaggtgcgccaggtttcttaaccaaacgggaaccaaagaacccatcacggtcgaataacggaatgttattgcaccagtgcgccgccataagggataacgcttcttctacagaggtttccccgtggtgatacccatacatagcaacaccgccagcgatagaagctactttctgaaatcccgttccgccctgcatagcagagtgaataaagaaacggtgaacgggtttaaacccgtctaccaggtgcgggatcgcacgtgaataaatcgtgtaaagggcaaacgttagtccttccacctgtacaacatctttaatacttctttccattagtcaaccttagaaaatttgtgttttccattaacccaatctttacgcggatcagattcgtcgccgaagcatagttctaacacttctttgtattcgtcgtcaagtacgatgacatcatacttcaactgatcacccagaacacggtcgtaatcttctttgcgtaaagaacccagccccttgatatatcgtacatcttttgctttatcgcggaacggtgcgaactcatcaagagaatagaaccatttttcctcgcgcccaactttagcgataacgatcggggttcgaatatatcggatccgtttctcagtgaacaaagaaggccaacggctaaagaatgcaagcaacagagttaaaatgtcgccgccgtcaacgtcagcatcgaccatgatgccgatattatcataagtcattccggaagtatcaccaggatgaatattgaggatagccattagctcaaacagttctttgtttttgataatgtctgtaaaactcataccccatgtattcagaggcttaccacgtagcgggaaagcgccttgtgtttcttcattacggcattcgatgaactgaccaacagcggaatcgccttctgtcagaaacaatgttgtttctaccccaggggtatcaataccggaagccggaacgtgtttagcaatttttgcctttttcgctttctttttcgctttggtgatcgcggcggcttctgctgcttgtttacgaatcaatgcggattcaatgatcggagtaatgatttctggggtatccataatcatttttgcgatctttttgtagttcaaattcgcatgattgttaaactcacctgctgtatttgctaatcgctcttttgtttggctatcgaatgcaggtgcattaaagttatgcaggaataccacaagagttaagcattcttttacacgtgctttcgggatctcgatactatgctttttcttgatcatcggttcaagttcagaatagataccatcaatcatacactcaacatgaacaccgccgtttttcgtatccagaccgttaacaaaggatttctgtttaaacccgtcctcagtgctcgccagaatgaagctgaggcgattatttgtctggacaatggttttatccccatacatggaagcgtacagcgggaagcgattagagagcgtttcgccgttatatgtgaatttcacagacgggaaagcaacggcaagggccattaagcgatccttaatcacttctttggtttcttcatcgataccagttacaccaaacatagagaagtctggagtaaacttaacagtagtaccctgttctttactggggctggttcggtaatcgatgttctgtgcgccgtccgtacagttaatggttactttgcgtttcccgtttgcagtctcgccaataaaaatcgagctataacagtttgtcaggaaagaaccaacaccattcatacccatcgttacgcggtttttatcatcgaagttagaacccgattttgccatagtccatgccgcaactggtttaggaactattttcccatctggggtttttacatcatcctggggaataccgcgcccgttatcagagattttaaccagattatgatcaatggttacatcaatcttattagcatgtttgaattcagttcggatcgcttcatcaatcgagttatcaaggatttcgttgatgattttaaccaacccttccacgtactcaaccttgcgatattggcccattatgaaacgttcatgcgcttctttgttaaccgatccgacgtacatatttggacgcaaccgaatatgatcgcgatcgctcatacaaaatgattcgtcaacctttgcgccttttttggctggttgtggtttctgttctggttcatcatctgccagaagaaaatctaaactcatattcacctctttgtttaatcactgacattatatagggttctatgaaaaagaaaacccctttcggggtttacttgttataagggaaaccatcacgaaccatttgaggtttatcaaccgttcgttttgcttcgcctccgcaatcgcaatctttcggtgcatcacgggtagcaatgcttgccatttttggaaattctttattacacttggtgcatttataggtataggtaggcattaataaatctcttttaaacttaacatcttaactaaacgggctttgtctatgtcaaaaacacattgacgtgcgcccggatacaacttttcaacttcgtataccatgcagacgaaaccaacattgtgcatgtactcgcgttcatatgcattgaaccaacgagaaaggcgctgtattgactgaaaaccaaagtataacccagccgcttgaaagtctatgttatctttttcaaggttgcgcatcaatcgattatcgtcatccggcgctggatgtcggttatcatccatatcaatatagatatcaggattcatacagaattgatccaaccattcagcagtatccattgacacataacgattgacatatgggccgctttttgtttgccatttttctgtacaatcattccagaaagaacaagaaaattccacacgatatacgaacatgatataatcctcacaagtaaactcaaggtttacaagtacgataccacttatctaatttttctgcaagcatttcgttgataatttttgcaatttcgtaccgtccgtgagtagtacccagttccaggtaaatcacatcaagtgcgcacacaatcgcatcaacactttcttcaacgatattaccgccgcgttgaggctgaatgaggcattcgctgatctcgccaacttccgctgataggtgatgaaccacatcactcttcgtgcgtttcttcactttatgagcgatttcgaaaaacttatcaagtacgatcgccgtttcttctcgcgttgcagtattctcggatgtcgtctccgtttgttgaacaacgtattttgtaaaatagttttcaaacacgttgaaagggatcacatgaggaacaccattcaaaaacaccccttctttacaaacataatggatttggcgcggaatagacaacccgccgctgcgttccaaatgtcgtttaacgcttgctacaaaatcgaactctttcccgtatccagccgacatactgtgatacgtgagtaggccaaatgcagaaacatagagatcattttctttatac

SEQ ID NO: 5 - DNA, 176857 bp, Unknown
  bacteriophage strain capable of infecting bacteria of the genus Klebsiella
acaggacaatacgccttcattgatgaagtgacaagtactattcaggttaacttacacgatcgtgatggttcaccgcatacaacatacgtatttcagaagtgcttgcccgtcaaaatcagtaacagtgaattgagctatgagaacaacaacgaaatctggacatttactgttgattttgcctataaaacatcatgggttgtcgaggctgataaagaaggctgggaagggttcaaacaatccgtagaggaaggtttagccattgcagcacgtaccgcaattacaggacaataaaggggctacggccccttttgaggatcttatgtttgatattattcgagtaacattaccatcagggatcaaacgattccctatgtttacagttaaagaccagtttaaattaatgctgacccgtattgatatggaaggtcggccccttaaagagcaacaggaaatactggatgaagtgttggatctgctttaccctgggtattccaaaacagaacaggaatacattttcagccgggtgtattgtggttcgttcggtaaaaacgttatcaaggttgtgataggtggtaaaggtgggggccactccgaagccttcatggtgattaatgatattcaactggaaaatgaatacaagctgaatgatgaaatcacattagggtttaacttcccccgtacacgcaatacaagcgaagagttgtttcttgaatgtattagttatgtaatatacaacgaacagcgctatgaatggacatcactaaccgaagaaacgaaagaaaatattcttgatatcgtcgaacttgatgatgtcgaaaaaatcgttactatgctaacgaaatcggttgatgtgtctatgcgcggtaaatcatttagtggtatgttaaccctgttcaagatcctgtttagtcgtggggatctggatgaatttgtgaagaccaactatctgctaaataaaaacggcctgaacctggaacctatcatgaatagtagcccgatggaaaggcaaatttatactgcattgcttgcagaagacttgaaaaaacaaggtgctgttaaatgagaaagcatgaatataaacacgttgagaaatataatgttgattatcgtcctctgacacatacagagtttacccccgacgcagattttatcaaaggggatgtttacctgtatcaaagagaatatcttttcattctggcacttctggaaagtaaaaatattgatacccgtcaactgttcatcaactgtgaagaatgtcaggaaagaattgaattccagcttaaacgcaatcaaataatggttgaagatttcgacgataagctatacggcaatgacgggatcgcgttatctgttcaccctcgtaagactggtgatgaagaaatccccgatcttatcgattacgtaatgatagacggcgaacagatcatgtggagtgattgcagcgacaaagataaagaaatggtgttggatgcaatcgactatgcaacctataaatcgatttctaccgccctggataagccagcagtggtcgcaaacattccggtaaggtgttcgtgtggacatagccatatcgtctctctgagaggcttacagcaatttttaaaggtggtctaaatgggtgtaaatctgaggttgctatatagcgatatagaacctaacatgcaacgagattggaataatgacgtagcggcctcaaaaggggccgcagcagtaagaaatagtttgattggtatcgtaaccacgatcaagggtacacgtccatttgatagtaactttggttgtgcaattagtgatatgctgtttgagaacatgaaccctctgacagcggaatcaattagaacttctatcgtatctgcgatccggacatatgagcctagagtatataatctttctgttgaagtcattccacagtatgatgataactcagtaacagtaactatctattacagcatcattgatgacccggatgacgtagagcaaatcaaactacagctttccgcatcataacaaaaagccccttcctttcggttggggctttcttttagaattcaatgaatcccattagtgtttgatatcgcaattcaaacggggagatataactttgcatctggttttgatcggatacgatgtaataatacacctcatcattatcatcgtatagtgcttctttgatgatgcaatatcgatcggtttccacgttcacataaagagtatccatgtactttgtaactttggaaccctgtgaactgatttcacgaatagcgttatctatgaaaagcgacaatgcttgcatgaagttatcaaactcaccatattcacagcccataatagaaattgcagtgtattggtgccagcctttgattgtgtctccacggcggatccatccaatttgtctacccccgatagatacacaccacactttaccaacgggactatagaaccgcacaacttcttttaataacagggacatgatcccacattttgtataaggattcatttcaacctcatttcatatcaagtagccaggaagggctagtttcaagcgaaattgcagtatattcgtattttacagtataacctttgaaaccgaaaggaatgactgcattttcattgagatattttactttatgctttgcttcttcttcattcagagcagcacagactgttgtttgttcaacgttaccagcaggagaagtaaatttttcaatgataatgtatacgcagttcatcctattgccctctttccattttttcaagtttcagtgtatccacttgtagttgaagtttaagaatacaacctttcgatatgttatacaagtagtcactaacgatttttgactttacctgatcgtaatcagaagataacgtaatccaatcatacatcgtttggtatgatggaagatacgtacattgttcttcttttgataacgctttaaatgattggtaatcggttggaggttccgaagcaattgcggttgtggtcataagactaagtgcaagtagtagatatttcataatgtattcctcattgttttcgatagaaccaatatagcaaaaagccccgaccgaagtcaagggctttttcatcaatgcaagaaagatttcacgtactgttcgatcttttcacgacatgtatcaactgaggtgctttccgcaattacggcatgacataacgcctcgcctccgacccagaaactcatcatgtactgaatatcacgaccttccatttctttttgatgcgctttgattcgatcgaaagcgttttcgattgtttcagtagcagtaagcatttcggattccccgtcaacctccgccagttccccatcgatcatttcgctttcgacttcttcccagtatactatcgttatcatgcattaccccagtggttaaccgtcgtaatccccgccacaattcacatcgccttcaatgaacagttcgcggttatcacgtaataaattatactttctttcgagttcaggcccgaacgcgtcggcgtcttcataccagctataattgtatcttccgcattcatcatcatattctggttcatcaccgcgctcgttgaagtgaacaattttaatatcgtccatccccagttctttcagcttatcccagatatacgaaatctcaacgctatgggaaccgaacgcttccagtgagatcgtaccgtcgctatcgacttgaggaacaccccacttcgaacgagtatcatcggtgatcatatctattaatgactcaatattattctcaccgtagatatcagcaacttccttttctttaccagggcgaacaagtccgatcccgataataaagctactgcttgagctattgctcacaaacccagaacgaattttcatcgcatcaccatattaccaatcatgaatagagggattagcgcgaagacgataccccatagaatgaccttatcttcacgacggtcacacccataatagataacacctccagcgaaaatcaatacaacaactgaaacgaacgcgaataaataaatcatttgcaggtatccattctcatagaaacttctttcaggatcttattcagatcgtgaagcgcatcttttacgttaccttcgttataggtaagcatatcctggtacagccctttcaagcaacgattgattacatatgctttttcagaaggtaacattgtaccagagcgattataatctctgaaaatgtccatcatcgtgccgttgttaccaggtaatgacgggttgaagttaaccataccggacatcaaactatcaacatacacaactgttgtgttatcagaacgatacgcgccaccaactttaaaccagttgctgaacacatacggagattcccgcacttcgctcaaatcggttccgatttcatcgatgtttacacgaatgttgttaaaatacaccgattcatcaatagaaccatgacgccataagatagcaccattgttatttttgaatccgactacatcaacctgccagccgttatctgttaaccggacatcatcaacgacgatgaaatcaggtagctgtgaatgaaagccgatgttttcaggacgggaattacgaaacccatcacgattggagaaataaaggatgtcgccttgattcagttcgcatatattcataagatttttaaagtccaattcaagtaattccacaagtcacctcaaagccccctttcgggggcaaattcattagagtttgacttctttttcttccagaacgattgtgcaatcaaatttcacatctttccagaattccgctgcaacgatatctgttgcggtaacgcttacgctggtttcttcgaaatccagatccgcaaaccatgcgtgtccgacgacaataccgtacattacacgactcaggcgattattaagggcgcgaacctctttaatagtttcctttgtctgcttatcaagatactcgatcaggtcattcttgtcaagcgcttcgatctctttagatacggtatcgtaagcccacagaatgatcaggtcgccattgttgagtttcttcttaccttcggcgcgttttgcaacggtagccgcaacagccggaagtgatgaaacgcctttgattttcacgttcagttctttcgacatgtaaacatcagtcgattctgtgcgctcaaccttcggagagaagccgtaatcacggatcccttgctcagacaaccattcaccagccgcctcaccaaagcgctgtttaagcccttctgcgttgcgtaaaccaatcgcgttatcacggaagaacttcattaccttctgacggcctttcaggatttccagacggacgttatcagcaacaaattccttaccagaaataccgcgagtcatcgaacggttaaccagaggcagagaggtaaagtcaaccagtacagacatacggtcttcaccaattttagccagcggtttgatagtcagaccagaagcacgtaagtttttcagagtcggaatatcggtttccagcggaagtaccttaacgttcacgataccatctttaacaatggtaaagttacgcacttgtttggtttctactttttccggcaatccaaactctttttgtttgctttccggaatggttacataaccttgcagatccgtattgatggaaatgttcggacgggaactgttacccaccaggtgtttcactgcaactttcgttgtggtttgggtaaattccggtttccatacttcatgcgctaccagttgcgccgccagtgctttacgttcttccggagtagaagcgtttgcaatctgttctgacagtttatccagagtatcatcatctttctggacagtctgacggcctgtacgattgtacgcccagtgttcagaagacaggtcgatcacggtgtcggtttctgccaacagttcgagagcatcaaccaaagtaaacgcgttttcatcaggaaccatgttgtagtcaacaccatccatcagacgtttagccggatcaacaaccgcttcggagatcatatctttagcgttggaataatcctgtttggtaaagcagttatcgtatgctttaatcagacgcacatcacccagttttttcagaactttccatgccagatctggattcatggtatgaagcgcatgatacagaaccacatacagaacctgttcgccttctgctgttgccggatcgaagccgtcaacgtcattgatcgcgttttcacccagcgcccaaatgtttttgatatgttccggaaccagaacaacaccatttgcagcattcaggacatacacacggccttcatccaggtagatcgcatgggttgcatcgccaactttgacttcaacacgtgcggaggtttgcgcggtaatgatttcatcaaatgcaggtacatacgcatcaaacccttcaacgaatttgtgtaatgcgttggttgcttccgccattttttccagcagaggacggtttacataataaccatattccaggaaagcaatgttgttaaacgtcaacggcagagtagaacacgctttcaggatatcatcagtacgccagcagttatcataaccatcagtcaggaagatcagactgttcagattgccattatccgcttgcagatcggtagcgacttcaaccgccagttgcagaggttcaacgaagccagtacatccggtcggacgcagataacgatcgatagcatcattgattttgctcaggtcggatacagagctaaccttttcgccaacgaatacagaaccgaactgaccacggctggagaaatacagaatagatacggtatcatcctgtttaaccagcgttgccaggttgtttttcaggtgctgacgaatgcgcgggagttcgttatacatcgatccggatacgtcacaaacaaaaacgtggttagtcggggttggtttggctacggcgtttttgaattcaatgttagtgatcataattttctcatttataggtaaatttgattaaaatttcgtttacttttttgctaattatatctaatgcatcatcgcatccaaacttactactcaacaatgaaacaaaatcatccatcgttgttgtttgagactcgccaacgtcaaaagacagagcgtaggcaacaggatttttaatccttacgatttgaatagtatactcattcaggtcaaaccgttcaagatattttcgcaaagaaaataaatcaatcggtactggtagagtttgactaaacgttatttcttcccccagttgataggggggcatttttacacagatttcgtattccatcagtgatgactcttcatagtgtgttccagattacggaaaatttgcccgtgttcaagctgggattggaattctccgcattcatcagagtaagtaaattcataaatgaatacaccgtcctgattgccaaatttagcgttgtactcttcatacaaccacatcttgatcagagcgtctttctcttctgtttccagatcataccagtcacgcccatcataagcaagcgcaatttgaggattagaccgatatcgagtttcggcgctatcttcggtttcccattcataacgcttatcatcatagtatgattcgaagctatttcccatatgaccgcccaggtcgcggtgtacctgctgtacaacttcttccgctgtcgggcaagtcatccagctataaccacagttaggaacacagtcacccatcatttcgcggagattgttgatatcagtcggatccttcgggaaccgtacaataaagctacttgatgaactattgctcacaaaaccagaacggattttcattataatttctcccactcaaacgttgtgaaatgttttctttcgtcatacccaacagtacaacaatgtgttggctttcctgtgaatccatcaaacacagttatacaatagtaatgcaaagatggaagcggtgtatgcttaatgtagttgatcgcgacgttcaggtcaacagtagaacatacacaatcagacgtttgatcaaaacggccatcaaaaatcaactcaatgctatagatgttcatctttcacttccttcatatttttcataacttcttcaaaagttacggggatttcgttgtactgtagtgattcatcatcccatacatcgcgatgcccgaatgttgaactttttgcaatgagtttttcattttcccatacatcaatagtaacatgatcaccaagataagggaaattaggaactttgttcagcacatcaacacagttttgtaatgattcagaaacatgaacaatttcagtgaattcataatcagcactataagaagctacgtaaatcatcaccaccccctaacgatgctaatcaacagtaaccccaggatccagaacacagcaaccgcacaaatacgggccattactacatttccgcgactagtccactccgcactaaggaacaagagaacaaacgttaacgcgtataaaaccatttcaataacttcggtaatcatataaacctcacgaaaaagcccctttcggggcttgtttaattaatgcccgaacacaccacgaatagactctgcgaatgcatacagttcaggatttttagctttcactgtttcgatttgctccagaatgtaatctggtttatatttcgcaccgaaccagcagtaagagaaagagcgatcccacatgaacacgttatagtattcaccgttgcgaacttcaaccatcacataaccaggattagaacccagcgggtaatctttcagaagattgaatttcgcgccagcaccagtacatccgttaaacaggtcattaaaagtcatggtatgttccttttgtcagtttcgtttcaacaaggtcactatactattcttcgttagcctatgcaagatttaatttagcaaattcgccaaaatgttttatcgcttcctggtcgtatgcttttgcagcctctaattcatcactataagaaccgatatgcttaaccttaccatcaaccattatctgtgcaatgtaacgtattccggttggttgattgcgtacacatacacccttgaatatgctggttccttcctttcgccgtttcctgttctgagagttgcgggattggttcgcttcgcgcaagttatcaatcccgtcaccagcctcaacaccatttttgtgatcaatcacatcaggtagttttccggtcgcaacgtagtagatgattcgatggcgtagataccctttgcttttgaaataaacgcgggtatatcctcctttgatcttcgaaccaacttcctttccgatcaagtcggaacgtttatgcgatgttcgtataatctttcctgtgtggacatcaacagaaacagttttgaggaattcatcaattcctctctgttcttcttcaattgttcttaatccattatgtgacataacgccttcttaatttgttttgctatggcttcaatcactgggatggaaactgaattcccagcctgtttgtaagcctgtattttgctttcagggatgataaacgaatccggaaatccttgtaacctaaaacattctcgcgggcttaatcttctagggttcttaccttcctgcaataccagacattgaacaccgtcctttccatattgggctgttatcgtcccagtacacacagaatccaccataacggcctgataaccaaaccccttgccgtttgccttgtttcgttctttacgctctctaaagcccttccaggcacgatctgatatggtgtattgatcattatccggttcgagaatgtcacctacccttgttggggtacgtggaggaacaggaaaactaaagaacaccggatcgcgaaagcagacaataaacacacgctctcttcgttgaggcaatccaaagtcttttgtattcattacctgataatggatatcgtatccttcgtcctgtaacagcctgtagatggttttaaacgtgtttcccttgtcatgggttaatagctggggaacattctcaaagaacagcacagagggctttttagcccgtataatgcggagtatttcaaagatgatagtaccgcgaggatctaacatgccctgttttaaccctgctttactgaacgcctgacaaggaaatcccgccaacaggatatcgtgatcgggtacatcgttttcatcaatggcgaatatatcaccctgaatattttcatcaccccagttatcagcatatgtttgttgtgcatgtttatcgatttcagacgttaaaaggcattcgaccccgccgaatgccttatcgaaaccgagcctcacgccaccaacaccagcgcaaaggtcaattattttcatacgtcgaaatcaacctcatcgattttgtatgattcttcgccaatatcagcccatagctgaatattcacgctttttgcatcacgataaagagattgaccacaaagtccacctgtataacaagtttctgtaatctcgttaacttccaggcggaggctattgcgcataattttaacaacagccttttccattgccgaatctagggttttagtatcacccaatactacatctttaacgttcaaaataacatcacccattatcgccactccgtttcaattccgtgtttgtatgcgtcaacgcccaaaggcgtgatcactaaacacatatcagtatttttcgttggtgaactaaacgccatagatgcataacctttttgaatcagggcatcacgccccgatttactgggaacatcgttgaaatctaaatccaacatttttgacgagtatctgtaaagtttacacagaacatcaatttcagcgccggataatttcggatatgtcatttgtagtacctcacaacatgttcataatatacacgttcaatgaaatcattccagaaatcgcgatcaacttctttcggataaccagatacagccgccagcttttcaacttcacacatcgttgattctagcgcctcttgtacggttgcgaaaggaacaccgccagctttaaccattttcaaaaatgcgctgtccggaagaggatacacaatatcaccttctttgaaaatctggatcaattgcataccaccgcgcaacgcatgagaaagagctttccagtcgatcccgttgttggcttctgcttgccgtgcgcgttccccgtattcatcccagagtttatacacggatttcttcatttccgctacggtgatcgtagactggaatttacgccccagaacttcataaaattcctgacaacctgatttcagtgttttgtctgtaacgaatcgacaaaactcattggtcgggaatcggttagaaatctcaccaactttgatgcgcttgccgtagttagattcatccacgttacccagcaatgatgtaccataccagcaatcaggaatcatctgtaacacatcgacaacttcacgcagtgcagccaggcgagaacctttaacgccatacttcgccgcttgcttacgaacataaccaaacaggccagtgagttccgtagtgtagaagcgtgaacggttagcgcggagatattgccagatatcagagttagcgatcagtttgctatcatctgcatgaagcatatcaatcgccacggtgtcaccatcacatgcgaggctaataaacttttgcagactgtaaatctgacgatctacgtcattaacaccgttctttgagtttttatcgccagttgatgtatcaatagacttcttcgcagtacctaacaggatttcgcgaggatgagggagatagatccctttgtagtctttgtcgcttgttggtgtttccagtccgtacaggtgagaaccgaatacggtttccataatcattttcatcagaattcaacctttaatgtttttgcgatcccgcgcaattcagcggtagtaatatccggaatgtttgttccgtagctattcccaaatacttttttaatcttatcacacaaatcgcggcgatacaccatttcatcatattcttcttcgctgcgatacagttgataacccatccacccctcagcccatccggaattgcgcttgattttaatattagtacaacaatcagacccatcttccggtcggaaagatgcatacaggtactgacgcgcaactttttgtacgtaaagggttttggggttgcgattttgtcgctggtcactacggatcccagcatcatacaacgtatcaccaactttcacatcacttaaatcaatcatttacgtctccagcaattagttttttcacagtaatgaacgggaacaggcacacccaacgtttctttactgcttctgttgtatgttatcacaacgaatcggttttcgccacccctaacacactccagatccaaaatctcgcgggttcccttcgtgttaatgtctgcaacataatattcttcgttgttgacaatcactatatccgacataatcaagcgaggtttcatgcagcgtacacctctgattcatcgatccattccagatcctgattgagtgattcaatcagctttttatcgcgtctggaaataacaacggtagaacctttttctgccttcacgatgatatcaccagaagaggtgatgtattcaaccacataatcacggcgagggcttccgagtctatcaccaactttaacagcacgtctaaccgattcatgagatttttcggtgaacactaattcatcacctacgtgggtaacaataccatcaacagcagaacgagaattaacataaattttgctaatctccgccatgaaaacactatctctcagatatcgagcagccactttatctaaacactgagaagatactttatctccgccaggatatactgagataatcattacatgaccctgaacacgggcggttcctactttatgcagaatgtaaaccattgaaccatcagaatctttagatacaaggatcacgctgaaagattctttgtgttgcttctgagtttctccacaggtaaaactcacgtccagaaaatcaccaactttaacagcacggggttttgctacttgttcacgagcactaataacagggatcataatcatttcctcacagtttcaaattcttcatcagatttccaatatacgttaaaattacgacaatcatgttcggatgtcaacgtatatttttcatttgttttctcatcggtgataaccatagtttcattatcgattgagttaacaccataaacgaaaacattctcaccgcgtttgtttaaaaacgcatcacccttttcaatcaactgccaacaggcaacaggcaacccacctggacaaatcggacgggtaacaagacaatagggatgtttcataataagcctcttttgtttctgtaggcccaatatagcaaaagcccctgacctaagtcaagggctttgttttaaattccggtaaatgctacgatgatttgataatgatcatcgaagaatagatcccgcatcgcgatcacttcgtgcatcggtagccagaacgcgtctgctgcatcatcagagccgcccataatacgaggcaatgaaccatcgttattaggttcgagcttgatatactgtgctacagtcggttttgagaagtacaccgaacgttttggatgatcgaacagcatcgaattacggatagaaccacgaataaccttttcaggtactttaattcgtacttcttccagcaattcacggatcgcacaatcaaggaacgtttcgttaccgtttttgtgtccacccggaagcgctaacgcatctttaccaggtgcaaacttacgacggattactaacacgtggttattacatacgaccaccgagtcagccgtgcaacagttcagagaatccggatacggatattttttgaacttgtcaatctctcgttgccagtgtgcatcttcatgggacaaacgctggaattcttttgtttgtgtccattcatcgataaaggaaaccgtagtgctaggcgcatattttaacaaatcttcgtcccagccttcatggtgttcccagataattttgcgtaaattggtcgaggacagatcctgatctccaaccttcacaggttcaaccggaatatgattccatccgaatgctttaagccagtaagaatctttgtctttttcgtatccgacgatcgcaattcgatcatttcgagtttcatcgattgccatacgaacacgggatttccatttttcctcgttatagaggtaatccggaatgtacgcgaatttgattctggctgcatctccaacatcaagtttacagatagaccaacgagtgatcattgcttgacgctgtttagcggtcaatgggtttagtgtgttcggatatgcataagcagaaccgatcagaatgtaaaccgtatcagcaacagcaagggcttcccttaccattttctcatgaccatagtgaaaaggttgaaaacgtccaattactacagctttatcatatttgtgtttcataacgtgctccacgtttaaaggttaatcataaaacagacgcaattatcaacacaccaaacaatccaccaacgaaaccaaagaatagtgaaatgagtatagtcagtacgatctgttttatgttcattatagtattctcgttttagatgtcaagcccccaaagagggggctttaaaacattatttacgagaatcgaaaatcactttaccagcataatccgaacccattacagtttgaggtacgccacctttatagcgggtagagtagttcatctgtacatccagttctttccagcggatcatttccggtgtaatggtgcgttgcagggcggcgttggcttctgcttctttcttcgctgcatacagacgggcatcagcatcacgttcgttagcgattgcagcgttttcacgcgcctgacgatctgcttccgcttgttttactgcttgtaatgaagtctgttctactttttgcagttcagctttagcagcgttaacctgttcttcgcggatcttcgtgttagttacctgttccatgataacttccggcagggtgatatcctgcaagaatacctgtttcacagtgtaaccgtaaggccgcgcataatcttctacttcctgctgaatcgcaatttgcagttggttttggatcttcgcatcaaacaggtcttgcgcttttggtacggatttaccaaattcgcgaacagtggaaagcagtttttcggttacatacttatccagtgcctgatcctgattacccgcgttgatacggttgatcggtgctttgctaccgtcgaattgcagcattacggtcatatccacagtggatttaaatttatcctgggacggaacctgtaatttgtcgaacttcatcgcgatgtctttggtgctgaacgtatcaaacgttgccagcgggtttacaatgtggaaaccgggcagtacgggtttcggtgatactttacccatgaaggtttcagttttaaccgtaccgtcttgcacaatggtatacatgttaggcactaaccacagtgctgcaactacgcccagagcgatcagagaggttttcttcgggttgttcacgatagtgtttaagttcatcataatttccataagttgttgttcaattcgatagttattctatcatcacatttcacgctgtcaaactatttttaagaaagttttgtcagcttgtagattgtttgatagcacaagcccttaatctcgtccaggatgttcttcaaagaactatctactgattcgtagatctcgtttgcttcgttggctattttacggagatacgctaccgtgtcaagcatattttcggtttttagcacaggtttgtatcttcccgtgattcctatgtggatttcggtgaatttatcaaccaaatcctgcatatcttcgtaaaaaccctcatatgctttatgttgtgagtaggaacctgttgcaaaatgtgcgctatgcatatacgtaacggacataaggcacatgccaataaaggcatctatcttgcttgagttctcagattctgtaatttgtttaaatgattgcatgatgatccctttatgaacgatggatacttgcaaactcatacgcgaccctaattcctagctttgcgcattcggattcagatcggcattgtttttggtgccattttcgttccatgtagttgtagaatagttcgcttgtatttacgctgggagggatcgttgtgatgtatacttgaagggccgcattaatataatcgtcaaattctttctgaaccggacggtcggcggcgtgtgttgtgggtgtcatcatcaacaatccgaacagcacagccattgatatgcgtttaatgttcataacaattactcttttactcatagacccactataggtctactcctgtatatatttatagcaaaaacgaggccgaagcctcgttataatatttttgctgtaaagtcaatcaagtaatgtcataccaacacaaacttctttcgaaagcgcgtattttgttcacgttttctacgttttcatcccaaccgatcacaccagctttcatacgtttcagttcctgacgtaaacgggtacgtacttttgaatcaattttctttactgcaatagaaagcattgcattcagatcgccatgagctttgttaccgtcgcgacacagattattatcaaatcgaatgtatgcacatcctgatttgtgtttccagttggttgagtaccaacgcaacccatccggatcaatgccatgttgagcataataacgagaatactcttttacttcttcgatcttttcgttagatgaaaggtcacgaagaggattgtatttcttacggtaagtgcgactcataatgatctccttttgtttatgcttccactgtatcagggttgttctttagttgcaagtaatgttttcgacaaagtgaaacatatttgtcttcggccccgatctcaatctggtcgccattagcaacaaattttccatttgcatcaatacgggcaacggtagttgctttctttccacaatgacaaacccctcgcaactccctgatctcatcagcaagtgccagcaacatataagaaccttcaaacaagttcaactgaaaatcggttcttagtccatatgtcattacgggtatatctaattcgtcaactacccgacacagatccatgacatttttcttggaaaggaattgtgcttcatcaacaaacacgcaagaaaccagattctcgctatcactgtaaaaatgattgttgtgaacatcataatacaagtccatatcaggcgtgatcatggtgcatgttgcttccaacccaatacgcgaagagatactctgtttaccttctcgcgtatcaattgctggtttgtacatcaggatccgcataccgcgttcctggtagttgtatgcatcagtgagtaaacgagcactctttccagcattcattgatgcataatgaaaatatagtttagccatttatcctctcaacaaaatctggggtattttggaatttcccttccccttcatggtttttgcatgttttatttgaacagtagatccaccaatcccactcatcataagggggtttggtaatgttcattacacaaattaaagggaaatgacaatcccgacagcgaacattttctataatgtttgcgttagccatgcgtataaccgcccatttcgctatcttgtgcttgatggatatcaagataccacatattgattttgcttttcagttcgcccatttctttatcaagcccactgtcaacaagacagagaatgtcaaccaccgttttacgctgggtgatgttgattttgttcgctttcatcgcttgcgccaatgcattacaggttttaaccagtgcggcgcgttgtcctttgattacggcgatccgtttgttcgctttcttaatctgccgccctgctttgataggatccatcatgattaattcaccttacgaggatcgaaatgaacgacaatgatcgggtaatcaccagtcacctcattaataatgcgcttaatgagttcccagtcgcccccagcgagtccagcaccgattaaaggtgtgatgataggctttccagtcttaacggcgtcagcaagccctacagcctgtttaaacgcattaccgattgcatcataatcgacacgcggcccaggtgtccagaaatcatattgagtatatgcattgaaaacaatgttgcctttttcgccaatgtaaacagaacaagttcctagcttatcacgggaaccttttaacgtattggcatcaacttgaaatgcaccaggaatacgatcgcggatttcgcgagcaataccagcgcccatattgcaatagcagttgcatccgtggatcaaatggccttcaccattcagatacatattgacagcattacctttcacttctttaatgatcatttttattattcctatataattcgcgttcgattagcatatcgatgaaatcagtaatatcatcaaaccaatccttagtttcttgagcatgagccaaatcaccatcatctaaaaacttttcgcgagcatcagcaaaattatctagtttgttatagagttttgctttgtctatatcattcataaattaaccttaattattaaaagaacgtaagaaaaatacgtaatgtcacacctgtttacctttccgttcacggcggcgatcttcttgatgacacatatataaaacaccaccaaaaattataaaaccgataacaacgcctataaagtatccagcactaaacatagtcatcatccccgcaatagtaacaaggcccagtactctcatgtttaccagcattgtacgccaagaacaccacaaccgccgccataataataaaaatccagatagccattagtaaagccctataccagcattgaattcatcaaccaaataagtgcggaacttttcacaccgttccttatttggcgcttgtttgcatagattcatcattggttcagactgcaaaaactctttttgtttcagcaacttaccgcgtttatacaggtgagcattttcctctccccacatataagcaacatctaactgttctgcgatcacttgcttacatactgcgacatctttgatatcacgattgttgcataactcatccaggcgagcatcacccgcgtgagcaaatccagcaaccagagttaaaagcagtgctaactttttcatgatgattccttattcatcctcttcgataggggtataataatgcgcattgcagatatacgcaagaacttttttcagagacatatcagagaatgtcggatcctgatttcgtctcatcccactaccagtttcaacagcccaacgtttgttagctggattgtatgtcagccagtagcaatcccattcagacagagtatgttcgaacagatcgaaacgcttacgcccatttgcttgcggccttacaaaaggttcaaccatttctaaagcggttaacactcgattaatgttcgaaccgtcttcatccatcgcaatccgcaaacagtattggttaatgtccggatccataccatcgatacccaggccgatagattcgaaaaattttgtcgccgcgtgataagacacactagaagaacgatattccaacatcacagggatcttttccccgtccttgacgttgttaatgatatcctgatcgataagttcaatcaggtctcttttctccttgatcaaggtagaaatttcttcttgcagcggggctatcttcgcatgaagttcttttatccgttgatcaattacggacacttcgaaagctaaatttctcattgcacccattccccgtttttgtcgatgtacatgatccaatcagcaaccgcccaatgggaagtattgcctttcggagtcgctacgatgtaggaaccagctttaaacagtacgcgtttagtttcgttcaggatcaggtcactcataatgtattcctctcaattagatgcatccataataaaaaagcccccgaccgaagtcaagggctttttgtcaaatgatttgtttttcttctaacagcttcgcggttgtattaaccatacgagcataatcacgggcttctttctttgtatacttgaaaccagcgttatagctcgccagcgcctttttcaagtcgcctttgtggtaatcaagccaatactccagttcatagatcgcatacttcgatccaccttgaagagtttcgagctttttgattactacgcgtttaggatatgacttatccattcgtgcgctggcgctccttgcggtaacttgccagcatccataagcgtgatggccttttttacctttaccgacattctcacatgcgcgagactcgatccaggcaatagccgctaaatgatagcctaaacgtttagccttatctttttctacaggttttgcagtcttcaaatcatagttgtgtccaactcgataagcatactccagaacctctttctgcttcggtgtgatgttatccaaatccttgatataggatggagaatttttgtttgccggaggctttacagtagccttttgtaaaggcaattgatgagtaggcaaatccgcaatgaaatcccctagcggatccgttgcagcgttgccagaaaaagagcacaagaaaatgctggcagcaattataattttcttcattttaatacctatgttgcaaaaagaggggcaataatacaccccactttatatttatgcaactattttatatagttttcgcgtcgcgtagtttatcggtgataaattcagcaatgttataatttgaaatagccttgttaggatcgtatagtgcaacgatttcatctattgataccataacagcatgtttaaagtagacgctccagctagtagtaaagatttctctgttgtcaaatccacaatcagggctgaacaaagcgcggtatttgtatccactgtatttcgtcagacgattcgtgctgtgcgcgtcactggtgatcagaaaagttccctggtgagtttccacaacgaaaaagtatccgaggcgttctttgttgtccagcatcttttcaaacttgcgatcggtttcttcgcgaacaatacgagaagtcagcatttccaacactttatcgtattcgggccaatcattctcgatcacgatcgcatcaaatggtttcttaccattaatcccgcgcccgatttcgattttcgtgcaaatttcgttgaacgttttcaaatcttctggcgtcagttctttaagatcgctcaattttgctacataataacgtttttctagtttcattttacggaaacctcaattcaaaaatagtttcactgagttaccacatttaggacatatgataaattttttcacaacataatcagcagcagagaaaaatccattgtaaatcgcttctctcttttgctgtatatcagatagttcatattctaacccacttttacagcaactgcaaacagtaattagttttgggctatggatgacagtaatcatatacacctcacaaaaaagggggctttcgcccccatcattagaaattgtcttcgacaaacgccgcgagacgggaacgatacactgtatcaagaatgatatggcttgagtgttcgtattctttcagcttttcaacagcccatacaaacccgttgttaacggcagtgtttcgagggttgtcgatctgcttaatgttcccgcatagtatcagaagtgtgttctctccgcaacgagaaatgatagatttaatttcgtggttgctaaggttttgacattcatcaacaatcagcacagaacctttgcccggatccggatgtccgatactgcgaccacggaagtaatacaggctagggaattgaaccacccctttttcaatcaaaccttcaatgtatttttccgattccggattatccttaaacagaatattcaggctagtaatacaaggttcgatagaaggccggagtttttcgcccaatgtaccaggaaggaagccaatttcacttgataacgggctatctgacttcacatacatcaagttagcgtaatgtccactattaaccaggtgcatagcaccggaaacagcaagcattgttttaccagaaccagcgccgcccataatggtagcaacatcgatttcattgctcataattgattcaacgaaagccgcttgcagagaatcacggggttggatagctttcatgagtttgcgtttcatagcctgttcatgcttaacaggtaagacattcaagcaaatctcatcagcagtcaccacacgcccgactaactcaccgtttgaggtaatgtactggttaggataaaaatcttcgtcaggaagcgaactgtaagtgatttgggctacattatccgtatatcccaacacttctacggtatcccagaaatcagggatctctacataaccggaatacaacacatcgctatcttttaacgtatcgtcgccagtatactgttctaccttacacccacgggacattgcgatcagcaacatcataatatcgcgagtaactaaggttgcatcctgttgcatacaagtttcaatgattcgttcgtcttgcttgtcaagagcaaacgttttgtttccgacataatcaaccactttaagggtgatagtgtcagacagtgctgggtttgtcaggtttaaaggaatacctgatttcgtaatcgcatcatatgactgaccgaaaataacttttgacagaagccggatcgccaatcgtgcttcgtgcgctgttcgttctttcgttttcaggtgatctaattcacccatagtagcagaggtaataatgatttctgtaccaggttgagtgaatgaatagattgaataggggttactaatcaaaacattggtgtctaatacgtattttgacatacattaaccttatgtggtttcgttaaaaaatgcaccgaaaacctcttttgctttccggttataaacggattttgcttcttctggagtgttatagtaccccaaaaattttctttttccatctatgtttatctgcgctttgtacttcccattggctttatgataagaaacacctttcaaccctgtactactgtttgagttacatttctttttcatcgcattttgctggttcgtcgctttctgtaaatttcttgctgtatctccattctcaacaccatatacatgatctacgataggaggaagataaccattctcaacgtaaaacactattcggtgtcgcaaatacatagaacctttaaaatgaatttgggaatactcgtttttgcttccggcttcacttccaggagacatagggccgcgctgaactttccaatacactttacctgtagatgtatcaacatctacaaaattcagaagagattcgatcccttgaatctcttcatgtatggttcttgatgaatagccatgacttttcattacatacccagcgaaattacgtgaatatatgctaatggatgtttcttttgtacacaatgcatgagtgtattatacacaatgtccatgcgttcattgcgcgtaagatcacactcatcaaaaataaggtttattgcctggtgctctattcgacgtccacggaaatgattaagaattgcccctttactggtcaatacatcacatccggtagcaccatttagctgtttggcgtcttgtgctgcatttaacgtatgcgctacgtaaatgttaagggaactatgggaacgtttcataaaatcaaacgcgcctttagtcttttgcgtttctctgcccagatccagcctggtttcgaataccataaaatcgttagggccgtaattatgcgttggttcttccaactctcgcataagatgcatcttacgacattcttcaattgtctttacataaaattcactattcatgttttacctttaaggggccaaagcccctttgttacgctaattccacatgcggggcatcaatgaattttgtttcgatcggaaggttcggatcatttttccagttgataccaaaacgcagtttaacacccagttcatcacctgcttgtttaacagcattcaggacaggcaaccacactttagggtttgtttgccagccttgaggcaacacgctaggatacagatccaccgcatcacccgtgatgtgttttgagttcattgtttgagatacacccttacggacgttctcgcgctgttgttctacagtacgcagaccttcacgtacaccaaaatcaacaggagacagttgcagagcacgttctacgactttcaccagttgaggtttaacgcctttaaggttgttaaggcttttttgactgaatttaaacataaaatcacctcttgtaaaaataccctgtttgggtacacagggtatttatggtttaagaggttcgataattaataatcgtaaagatcaccgaagcattcttcaaattcacgtttacgttcaatttgctcgtttctacgctctttcatatcaggaggaagacggttttcattgacttcatcaatgtaagcctgtgcatcctcttttgttagaaagaatgcatggaaattgtatccgttgtacccgttcatactacgatcttcaagagagaattctgtgtgacagtcccagtctttgtacagggtaatacatttagcaaacagcccaataccgcgatgaatgtatgggaatccagtaacaatcatcttgctacccatttccgcattttctccgttcacacagaatacttcatacataatcgcacctggtttaacatctttcttaacagcacgtttttcaaaagcacttttcataatatattcctctcaattggtgtaactacagactactagtttattttctggatgtcaacaaggtttatcgtttttagacggaaaagttagagtgaacaaacgatcatgaaggttgtcgatccgttcacaagcctgtttcagtatggttttatcaccatcatttgttgtttcaatgcatccaagttcatcggtgtcaatgttcactacatcgctcatcaatgaagcaaacacgttaacatcaggatgtaacagttcttcgatttcggccttcatgccgtcgtgttcagaaaggatatcaataatatcacgggttaaatctccctggtacgggaaccctgtttctaaatgattgatgatcctttgtgctttcgtaatcataattttacctacaaaaaagcccctttcggggctagttaattagagttcacagcaacggcacacaccgtattttgtaaatggagcatcaccgctaacgtaggcccagaaatcacatgcttcttcggcagtatcgaagattgcagcatcatagaacccgtgggcttcgttaccgttctcatcgatgaaaaccggagtccagatattaggattgaagcaatcgtcaacaacaacccaaccttctttagctttcattgcttctttgttggcttcgatgtgagctaagatttcgttcatgatgtccatttttctctcctaaagtgtgtttcgtttcgacagggctatagtctcataaccccgtatctacgtcaacacttatttgaagcgaattgtgctatttttgaaaaatagtccagagcacacagcaccttcaattttcacccctgtagggcttttagcaacgaaccctgttgcgtaggtgtctttctcatcacatgcgaaccaggcgtggcctgtgtacgtgatatcgctaaacccgttagcagtcagaatacgttcggcttctttctcatcggtgcatccggattgtgctaaaacgacaataacgactaacaccaaagcaataatatatttcatgttaaactctttttaagttggttttactggcttcaatccagtacacgggatcagaatagttaccacacatacccagtaacacagttgtacatcctaaatgatcggaaggtctcaatccatcaggatgaaaaggcaattcgttaacaccgatactggtagcaaaaagagcacctccagtactgtaaaatgttttgatatgatcgtatgcatcatcaggccactgaaaacgataagttttattgtcaatggttactgtatacatatcatattccgtaaacaacggatcttttccttgtgttgccccatacagagcgccgcgccattcaaccagatttgcttcaatgtcgcttacacaaatttcattacccatacgcaaatcatgaaggatcccttcaatggtacgaatagccccgctaagttcattagttaacatagagtttccttaaagtctttccagcatatcaggcccaaatgccataacaaaagaacccctcaacgcttgccactttttatggaggcgcttaggtacgtttacttgcaaacgatccattttacgaataagttctaatgtatcgttgcttgtgatttcattgtaacctggatttattgttgcgatcccatatctaaacgccattccagcttcggtatttccaacaaaaacagaggctttcatttcatcaaaagattgttcaaacatgagatcagttcctttaaattggtttaatggttttcaggtatagtttagcataagaagaaccaaatgagttaccattatgatcaaacttatgttcttcactcttccagtatttccccgatttcatcaagggtatacgcttcttacctgctgttatcgtttcaaccattccggtatgagtgaatgtcatgatataccctcttctttcagtacttcccagatcagtttatcaaggtgcatcaggttccacataaccgaatcataagaacccagtgagcgggagtaaatcactccccatgaacgataacttttctggaatgcttctgcactatctacatcatacggcatatcatcaccggatgcaatcaaaagtttaagaatcatcagactgttcagaagttttgaactagcgtcttgtgcttgtacttttgcacaataattttcaataatcgcttttgcctttggttcggtgatgcgtccatttttgcatcgctctttgtacacatacataagttcatcgattatttcttgcatacattctttccttctgttcggtgctcataccatacaactgagagcgtatacgatcttgtatacgacgcgtttcgttttgcatcagttggtttgaaagaatcaaatcgactaccgcgccgcgaactttccatagataatcaatcatcgccatatcttcatcagtatggaaacctttcgcatcacattcatagataatgctttgtctttccgccattgccatttctgctgttgccggaatagccagagaatattcatacttctcgatcaacgattccagtgtacgcggttttacgggaatgtcaatcattaaaggattaattttcatttcaattccaccgcgtatacatccaattcaggggctttatgtacgcgcatatctttaccacatacagcataagccggacagttacggcaaccgttatgatccttgttgccaatcaattcctgacggaatttcttagttttcggatgttcccagatatctttgataaagtcactggtttccaggacgttaagcccttctgaccatccaccctcgacccaacgttcggtaaaggaacaagggaagaattcacccttctcgttgatgtacgagctaaacatagtagcttcgcaatcttccgcatactgtttgtactgttcaaaattttcatgcccttccatagcctctacaaaggccggagcggaacaggaatcaaaaccgaaccctacaccggattcaaggcaataatctaccagcgctttatactgctcgcgtgtaacggtatcccagttcttcccacgacctttttgtttcagacccaggaatacgatcgcgttaacttgtttcaagcgcggatcattctttacagcatcaaccacgttaaacgcgtcatcataggttttagagctaaccatgaaatgaaggttgatttgctgttgtccggcttctgcaagattagccactgaattaaacgctacatcgaatccagcatgtttgtatactgataccgcaacagccccagcaacagccgctaaacgcgctgcaacgtcttttgatacatcagcaatggtaaggtttggtacaatgcctttagaacgcgcataggccatcatatcaaacatatcagggtttgtttgtccctgtgcatcagcaccgagggcgcattgtgttaaccagggcattttatcaatgatagatttgaatgtatcaagatccatattgaagccgttagggttattggacttgtagcagaacccgcagagtttacccgctggcccgttgcatttggtagtgatctcgatatcgagaatttcggggaatggggcataggtaggatcagtttcgaacgatgttccccagcgagcaaactcaccagttttaacgttgaaattgtagttataccacttagagcgagcgtaacggatatcaccatcttgatagatgaacagggtaggagctttcagaacagtttgtgcgttattcataatataattctcaaaatctaacatgggattggaagacagcgcgagcgagactttcattatcaaacggtattgattggtgttgccctttgctatcaatgttaacgcgccaaaattcactagaacaattttcagtggagtagttcaacagcgttaccgttttattcttttccaaaaatacgcgtttgtcaatctctgttttgattacatgttccatcattttacccaccgttgtttgcgttcgtcagccagttcttttttgtacaccttgatgtattcgccgttcaaggcacggagatttgaaaatacacgattgaaaagatttttcttttctttgtatgccggagacatacggatcgattcaatagtcatacccatttcatttttaggatacgctcttaactctgcgccgatctcatcgatccatttttggtacagatcacgcttttctttgtactgttcaaaagtcaacatgtccattttttatccccgtttcgtttcggtatgggtgtaagataacatcatcctacacccagcgcaagagttatttgtattccatgaagaattttattgcttcttctggcgtcataccgtcagagaaaaatccaaagaaagtacagtgatggtcgttgtatgaaatattcaaaggagatagtaaacttcgaacatgttcagcccacaaacgatattttttgctgaatggttgatctctcattcttcgtccccttgtgcgtagtattcacacactgcatcttctggggtgcaaccgtccgagtaaagagcatacattagatcttcgtcataatcagaagaacccagcatatgttgaacagagcgtttccatttgttgtaatctttttcgcactgggtttcgctgttttctgatttaagcatttcgtacatgttcatagaaatctcccgtagtcggttgcagcatcttccggatccgcatcaagttcgtacagttcgcgagctagggcgctgggtttaatatcgcgccctaagtgggcgctaacattacgtagccatttcatatagggttcgaatttgttcattttatacgtaccgcgttaaaagcctggttccggagatcatacgctttttcaagctgttctgtagtgaacagagaactatccgagtttaccgtgaaactgtaaatggttttgttgtcggcgttgacttcttcgacaacgatttcgtaaccccagatcccgctgtactcacatttcacgttccggtacttgatgtaaactgctgcaacatcttcttttttgtagttccggcttttgtagataatttccatgatatcctccttcgtttcgatgtgtgtacaataacagattggggttatagagttttagcaattcgtgctaattatgccattttcttagcgattttccaggcggctttgaatgccggaacatcttcaatatcaacccagaaaccagcaccaaaaccatcatcgtagcaagggcaaccgtcgcagtaattttcccaggtcatcacttcaccaccaacagaagcaccagtttccatagcgcgtaacgcatcttcaactttttccagtttttctgcgttgttgtcataaatgatgaagtaccattttccgttgtattcgttacccagtttgattgcttcgcgaacaagtttcatgatgatttcctttttgtctgtttcgtttctatgtgtgtaatataacaaaacccctaaccataggcaaggggtttttgcaaaaattatcgtttgatcggggtattatctataacccgttgaatttccgaacgcatcgtagaatactggcacaattcggtaagcgcccgatccaggtgcatcatagcgtaagaaaactcttttccgcatttgtcgcatctagcgtataaatgtaaatgaattcgcccgatcccatctacctgactatatttctggaatatgtaaggatctgcacctcgatagccagtagcttcgtgcttacactctcgtttgaaccatgacattaataatatccttgtacgttgaagcgatcacataacaattttcttgtttggttagtatcgctttggatagaatgcaacatagcgctgatcatgtttaggttattttgcatcatttccgcgctcatgagaacttccatacgcgcacgtaagcgtttattttcttcttccaactcaaccatacggtcatatgctttgatgcgctctaagggcatatcaggacgctctttgagtacgcgagcacgttcaacctcacaagcatgatttgctttccagtggttcgattccgcttcaaatttattaaggcggcggatctcttcaaccagctttttgatcatgtgtggatccatcatgtcgatgaatttcatcaagcaattggattttgtttggttgtcagcaacagaccaagacgaattatacgtaaccgtaaacgtgcggcccatttcatcaacaaccccgatcttgttatcatcggtgattgtagccgcccatttatcccgcatggctgtacaggttccactggcgacactatgcaacttgtttaatgttgcgtcatcaaacacaatttcatcactcatgtatgcctcacatagatttcaaaatacgcagaagtgcgttagtaaagatatcaggaacacaaccaccaaacaacttatgattcatcagcgctaatttcatgctgtgattttcagtatatcgcccgttatggatcccccaggcaacgacattaccaggttcatgaataactaagttagtgagagtaacggtcatgcgctctttatcattgatagagaatgaatagcagtaaccggatccgatgtcgccgtaaaggttaaggtctttcaatttcccttgctcatgcaagcgtttcatatgaactgcacatgcatgattaatagtcatttcgtcatccctagcccagtcatcaataccagaggtataacgaatattgaaatagttagtcagttcatttgatacgctcattagaaacctcacttttataaaattctttaccagacccattacagctactgcatttgggggaacggttgttatcataccgccctgatccattacatgcaacacatttccgtaatttccagccatacacgaaccgcatgtaataatcggttcgtgcggccttgcgttcgtggaaattcatactttgtaaacctgaaccaaccacatttcgatgttaggcgcgtaagtaacgtttaccttatgcatagtgcggtatttgtaagcggctttgtacgcatcgagttcagtcggaacacagaaagagaaaccgttatcatagcgttctgcgttagaaacttcacaaccaactacagcggcaatgtttttattcatgttcatgatattttcctttctctgtttcgtttcgatgtgtgtaatataacaaagcccctgcactaatgcaagggctttttgattattttggtaatttttcgattgttgctttcaactcattgattttattaaagagttcatcgctatatttcatcaactcactacggcgtttttcggcccacttgatcaggaattcaggagaatctacaccatacgtgtaaccttctgcactcagttgaatacgagcacgggaaccataatcaacagaactttgttcaatgagaaacttgaccgcatcaagcagggctaaatcttcatgacttaccatgattccttctgcctttggaagatccacaacttcatcctgaatgagttcacggcgggttgtttcttccagtgtttcatgattctggatcatcgtttcgaccggatcctttgccacggctggtttgttttcacctacttcttccaaaaacatcaacatccatccaggaattttagtccggaaagaactttgtacttcactggtgcatgaatttcccagaatgtggatcgcgttaccatgcatatcagctttattgatatagataacgttctgctgttcctgtcggttgctaccataagaaaggaagcggcgtaacgatgtgttatgaccatacttccctaaatcgatttcagccaggcaatcaatgatcccacggttagaaaccttgtaacgtttaccctgtttgaaaaataacgattcttccaggtgagtaggggtaaactcttcataaagaacatagaattctttaggaattttgcgctgaaccagactcagtttacaattattagaaggaacaataacagagtgaatgtttccttcggtatcacacatagcttgcattacttgcggatagtaaagatggtctttcttgcaagtatagctatggatacgactctgacgttttttgaagtaccatttaccagtttcaaaaggcgctgttgtaaaattcattttgcattctcatacatagttaaaattgcttgcatatgttccggtgattgtggaacccctgcaaagttcactttcaaaaagaaattcaaccgatcttttatgttgcactcatcgagcccaagcgctggcaatgaaatgttttcaaaagcacgttgttcatgtctttccatttcaccccaaaacaaacgggaaccgttaggcatcggtattccaatttcgttgttccagaatttcatgatagttgtcaagcgttgttttccatcaatgacttctacccatcgagattcgttgaattcactatcaaccgcgatcgcaatgataccgcaaggaaacccagtaatcaaagtcttcatgaaagcatcttgctctttctgcttccacacgtagggccgctgataggacggattcagatccagatcgttgttcttgaaccaatgaatgtaactaccaaccatgatcgcatgatcgcgactttggaaagtttttaactcacgaatacggtttcttacaatttcatccgacattataaaatcaccatccagtatataatcgtaatcataaccgctacggtgaaacatattgcagcgtacacccgcgcattatgaacctgtgttttcaattccgcgatctcttgatccttttcgctttcaaactcttcgcgagtaccataatacccaggatcgttagcagttgccaatctaaccgcatctttttcaaccagcgttgcataaccgctttttatttgtgtcgccccgtaccatccaccccgatcgttgttaatgatcaggtgatcgcctttttcgttatgctttgattcgccaacgacaataaccctcttaccattcataatatgatcctcaaaggggccgaagcccctattttgcgttcttctgtagataatctaacatattcccgctttgatgtaaatccaaaactttagaaaacttctctgcgtttctttcgtttgtgaattcgtcgaaatgccatacaccatcatcagctattaacgcgccaggtgatgaacctgtttctacatcacgggaaagcgcaagccccagagggtgtaagatttcgcggttaatgcgccaaacaaggcccatttcagatagagtattaaaatcgacgtatttcatattatacctttggtttaacaccgtaggccaacataccgaaacggtgatcgttgtctgcatctttaaacagaacttcgttaccatcaatgcagagaacctttgcttccggatcgatgtatggaagcaaccataaagggatcaggcgtaggccgctatgttcatcccaacgactgaaattgagttcttccagttcatcaagggaaagctcattaggatcgatataacggaaccatttggtatttttgaggcggtcggggaagtttacaatttcttcatagccgaattcagcactccatgaagagtaaacagtgacttcggatgctttggttaaaacagcatcgcgaattgatttgcagatatcgattaaagtcagttgattttccatgatatatttctcatcttgctaaaattttaggcagtagttgccccatcgttttacgtgcatgtgacggaatctgtgagatcgggacatatttaaaatcatccatttcacgtatagtccgtccgttcttaacgaaagttgatgcacaatagcattcttccgctactgggtaatcttgccctacatagaggaataaagcaaggttttttgttttcgtgtaatcgagaacacccaggctaaccaattcctccgcgaacacttcaaatcctgtttcttcgaagcattcgcggatcgccgcgtcaatatgagtttcgcccttttcaacatgccccttcggaatatcccaatggggcgtttcggtggcatggcccatcaacacggcaccatctttaataaagataatacccgctgatagttccatttattcacctgcaaaagcgttatcaaatgctttaagtgcgttgttagcgcgagcactggcttttgtcacaccagcagaaaggttttcgaagaaagtatgtttccacacttcacgacgactggattcatgctccagactgtttttgtgatcaccgcgaatctgttcttccatgtcataacggtacagatcgagttctgcgtttaatttctgttctaatgcctgtgcaaatacatgttcaatattcattttgtatagcctatttcagatttaaggttttcgagggtggagtgataaacaacattcccttcgtgtcgagtataccatacttttccgttctggttacactcattcattacattttcatctaaaccagggatcggcttcatgctgggagaaaacgcgatagacatcatttgttctgcactatcagcaaacccacaagggaaaacaaatccagttggtttatcaagatacatcaactctactttagccatagatttcttcgaaatcctcacaatcaggcaaatacgtttcacagaaggtgcaaagcgtaaagaatgcaggttgacgaataccaggattatccggtagatacatccagaaggtgttagcaaacacgatgaatgttttcaggttttcggtggtaatttcgctaacaccatcatacccggattgattgatcgcgcgttgcagcggcacctcatactgttcgcaatagtcggcataatgatcgcttgttaccaggctattagccattttaatcaaatcaacgattttcatgattttacatattccactttaacaggttttgcaacaaatttatctttggtgcgcccatgaccattacacaggtcacattctttgttgaaatctttcatatcttcgacccatccagaatctggcaacccagacggatatgcgttataacgaatggtttcataaccttttccgttgcatttcgggcaaacatgaggacgttcctttttagcagactctgccagttcgcgaagggtagtagaactaccataagcccgacacatgttttcaaagtcttttaaagtcatgttataaacatcgatgacgttatattttttgccggatggtttagccataatatatttctcacttaaagatttttttgatgaaagagatagcaaggccgataccaaagaaaatcaagtaaccttttccgtcaccgtgcgccaaaacatagagtgagctgccgtatgcgatgagttctgcgatgttcattaagtttctcatgatatcctcctttttctatattaagtatcttaccataatataaaccaaagtcaacaacaaagttttatcaacccacttatcaccagtcattagtaatcccctacaggttgagacgccgcaacactcaggatcttgaaagtgcaattgttccattcacaataagtttttgcgcaatgaacacttcctttcataacaaacccgtttgagaaaattaaccagtaaagtttcatgatagcctcctttgtttcgacaaggccaatataacaaagcccctgcacgaatgcaagggcttttttcagtttttcaacatccaaagttgcggaggacaatctttagaagcgattagacgatccaggcgggacataacccgacgataaccgtcgtattcaaaattaatttttggtggaacgtagttgacctggattgtttttctgttagctaaagaaacatactcagggatcaccgttcgcaaccgtatagcgatcactggcttctcttcgccttcgttaaagaacatttgaacagttataggacaagcaaagattttaccatttacccgacgataaacaataacttcctgtgtcccttctgttttggccttcaccgcgtaggttagaacataacacgaataatgatttgctagactcatcatgatatcgcgataagtttcaatatcttttttaatcgatactgaacggtctttaaagcgatctgcaatgtggtcagcagtagccgctaccttgattgtataccagtcacctaacgcgctagtaaacgcctcgctaacttcttttcgtacactgttaacaagatacattaaacgtgttctgttcatataatcctcactgatttttgaagtattcgatctgacgcaaacgcttttcagcggcggctttcgaatcgtattcaccaagttcttttgtgcgatcgtgattcaaaacaacccacttatcgccacgctgttcaatgtgttctgtaatatcttttaacgacttatccagatccagtgattcagcctcttcacagataatagtcaaatccacgggcagtgtcaacaaccttttcactccgctgatatcatcaagcatcgaatcgtatgcaagggttacgtgcggtttgtaatccggataatcgtatgttgcgccagcatcaatagaatctttgaaacggctatgcaggtattcagattccaggatccctacgatagtgctaccgtattttgtgtcccacttttcaacatcaaccagtttagcaggttctgtgatgtcctgttgcgggaacaaatcaaccgttttccggctgtatacgatcgttgtatgcatcttttcggctgaaacagcattctttgtgatacctaatgtcttttgaacatttttcaaagcctcacatgaagcctgatcgaatttagcacacatgtagataccaggatctacaacaggttttgtgatttcaagaaatgatttcataaaacaccccaataaaaaaggggccgaagcccctttgtaataaatttgtttttacgcttcttcgccaaaggcggcttcatcttccgcgcctttttcgacttcaacggaagggatcagagcggataccgcgccaatcactgcttctggggttactggctggcttgcgtcaatacccagtaccgaacacaggtcggacagaagttgacgatgaaccgacagttcactttctttttgcgcgataacttcgttaagatcgaatgcgcggcctttcagtaccagtacttcattttgcagtttttgaatatcagacattttattacccattgttaaaatttaaaagtatcgagcactttgctctttagttgtttcaaagtaccttcgttagtgatgatactatctccaggttgaggtgtcaaacctttttccgtggaatgttcatcaacaattccggtatcctttacaataaacacaaacttagcacccaagcgtttcaggtatttatattcgtgttcctgacgacagtcagttaccagaagatgattgtattcgtcaccagcatatttattgacgaatctttccagtgtgtaacgaacccaaaccgtgttatcatacttgcatactatatcagttccaaacacttgcatcaagcgtctgatactccagggagtatcgttactcataatcagattatcaatatcatcaggactataaacaatattgtatccacgttctttgaggatttcaagcccgattttgaaaatatttagaacatcttcattagacatcacaagaggtttctctcgatcaccttcgtaaaaaatagcatccggatcagaatattttccttcaaccagactacgaatgtatggtttagcgtaaccatatcgctgcattgctactcttagcgttcttttgataccaaatgccagtgcttcacactgaacatcattgtacgcctcttgaataaatttagcaaccgtatctttaccagttcgcttttttccactaatcacataaatcattagctcattctcttttgagaagtgactacttttccgtcaatttcaacttccatatgaaggaagccaaaagttgccatacacgtaaccgcttcatcactatcgttagtataacccaattcaacctcacccaagtttgttgggaaggcaccataaaatctaaatgtggcgatcgttttcatctgggagttatccaggatatgcacagcgaatgattgcttaggatcatcccacgcaacagagttaaactcgttgtaatcgtttgtgctcaacatccatatgtaaatcccaagatacgatctcatttcctcatcgactacaaagcggatcatcaaaggatcaaactcaaaagccgaaccaggtactttacctcgaaccatcatatttgcaggaatatcaactgctgggaggttcattgatggtagtgtaaccccttgaacttgtaaagtcaaacctttcatgtaactgttatcaggaatatcaacccgaaagtttgtaggtgagatttggtttaaaatcatttctgtagacataggatctcctttcctctatttagcggggaacgggatcaaagcggcctgacggggtaatataaaaatttgaagaaaatgcttgaccttttaaaatctttgatctataataattattaattaaaattttatcaaaaagatctaacaagatcaagtaaaatttaataaataatttattaaaaaattttagatctgatcttgaattcataaattttatgatctataatatattaatattttattttatcataaatttttatgaagatcaatacttagatctaataaattttatgctttttctgaaaacttttcctttaccccgtcactaaatactggtactatgttcccatattggaaatcaggaaaaacaaaatgactcacttgaaaaaattcaaagaatttctgaccgaaggtaaaaccctcgctcgtaccgtagcacgtggtcaacgcgctaaaacttccgataaacattcaatcggttttcttcacttcaaacatggttctgatttcgaagttttagcaccggattctcacgatctggcatacttcggtaaaaacattgtacgtttgaaaggtatgactactggtaaagttcaagcggcttatgtcgattgggctaaaggtactgtttctttctacagtggcaatccggatgatgatctggatttcgacaaaccagaaaaattcaaagctgctactctgtatgaagaggcggaagaaaatctggatctgtataaccagttagcagaagatttcgaaatcgagatccctatggatgaagctctggtgaaaggtaaagtttacaaactcccaagcaacgatatgcgtcttctgtacactgggcgttctaaaactaaagcaagcggtgaatatgcagtgtttaccgtagttgatgcttccggcaaacctcgcctagtatctggtaaaaaattcacccaggaatataaaggcgatatggtttctaaactggttctggctgaatccgaagatctgaatgaagcggctaaaggcattcgcgaaaaagttattgctgtgatggtgaaacgcgggtttaacgaaaaagatgcagaaaagatggttgacaaaaacctgaaagatgctatgaaagttagacctggtgcgacccctggaaaacttgcagaaatagttagcaccctgtaaaaataaagccccttccttccggttggggctttttgattagtatttgctccagacttttttcgcgccgtaaggtttccctttggacataaattgttgagtcggtagccaaacagctttcgcccaatccttcggggcaatctctgctaatggtgatttgaggtgtgatggtagatatgctttgatcatttctgttgcgcctcgcatacctttcacgttaccccagttaattttgagtacagtcttgttagagaggcgtttagtggatccgtaccctcgcttcaataactcttctaaaaactcctgtcgtgctctgggtggcgcatagtgcaagttcaaaccatagaacactaagttacccgctttcgatcttccggatcctaagaaaataatcagtggaaatctatcccaatacggcagggtgtctttatattttgcatcatatgcaaacgtgtacaggcgacccgttgctggttttgccacacggtgtgttttgatactggttttgatgaaattaccaaaccattctgttgaatctttctgtcgctttgccgctgatacaccaacagtgatctttttcagactattacggaaatcgttgatgatctcgatcccgtgttttttacggtagtcattacgttttttacgggcttctgtctctgcggaacgtcgttcaatctcatcatcaatctgttttttgtaacgatgcattgactttgtgaacgttgcgtagtttaatccctcagaatcggcaaaacgtttagcagaaacacctttcgtttttgccttacggaatttgatccccagttcaacccaatcactcaatttgcgtttgggtggtgctttgggtttatcctcttccgcgatgatctcaaactcaaaaataaaactcatgtttccctccagggattactgacctcgccacccaaaaacttttttgagtgattcttctgttacgattttgaactgccagcctttttgacggcatagctcatttgcggctttccacttatcaatattaactgtataggtgtaaagagcatcaataaatttctttttattgtgtacgttgttgtttactggcttcggtggaggcatggtttctttaaggggcttaacctcccaaagatatgtagtaccattttccatttccacatagaaatccatgtaatagcgtcttctcttaccgtctgcattgcagaaatacgggatcactatacattcagaattccaacgttttacgtgtgggtttttatccagccacttcataacgtagcgctcccacgatgacctatacgtaatctttcgcggatcgcctttatacttctgtatgttttcgggtacaaacgaccctttatacgtctgtcttccagccattgcgtaaatcctaaatagaataatataacgtttagataggggaacttatcgtgctattttcatacttcccgcctgttgattacaaaggcacccagacaactgatattttccgagactatcgattttattttaatcgtgtgattggaaaatataaaacccgtagttaccagataacaggcacactacgacctgaacaacttgcagaatcattatatggaaaccagcaatactactggatcctgttgatgcttaactctgtttatgaccctttctatggttggatctccgatcaggaagccgcgtatcagtgcgctatacagcgttattctgaggttggcggtgaacaggttctgtatcatgtagatgaaaacaacaacaagtattataaccttgtcgaagaccccaataaccctggtcattggtatgacaaaggtgacaaaccaatgctgtatttacagtatcaaggtgtattagctcctgtagatatttatgaagatgcagtgttgcaaaatgaagcaaaacgaacaataaaaatcattagtccgtctgacatccaggcgtttctgaatgattttattaaagaaatggaaaaggctaactcatgaaattaggcggaaatttacactcccctttctttgatggggtggttgaaaacgttgatgatccgcgcgggttgggccgtgttcaagtccgtgtatttggacaacacccagcccaaaaacaaaaatccgatgcaatcggtgttcctgttgaagatttaccctggatgatgcctattcaggatattagaagcgctgcgatctctggtgtgggcttctctccaactggtatcactcgcggatcctttgttgttggttattggcgtgacaaatggcaccaagatggtatgataattggtactgtcgctggtgaatatgtcgaacaaccagacacacagaaaggtttttgcgatcctatgggtgaataccctcgctatgttggtaacgatgttaactcccttgcattaggtggtttgaaaggcaaaggatcatcaagtgtcatcattcgtgattcaaacacaagcatagcagtaaacccagacgatcgcccactggatgagataccagaagataaccgccctgatacgggtggatttacgatcgaaaagatgctcaaacaggatgaggggatccgcacacgctggtatacagacagtgaaggatatccgacaattgggatcgggcatttgcttatccgcgaaaagactcgcgacactgcaaaaattaacgctgcgatcagtaaagcggtaggtcgagaagtaacaaacgggacaatcacggcagaagaggtatcaaccttatttgctcaagatttagccaaagtaagatctgatattcagagaaccgctaacgtccgtgaagtgtatgtgaacctcaaccgtcctcgtcaaatggcgatcgaaaacatgtcgtttcaaatgggcgtcggtggtgttgctaaattcaccaataccctaaaagcgatgaaaaatgaagattggcaagcggcttataatggtcttcgaaattcactgtgggctagtcaaactccaggccgttcttctcgcgtgtctaaaatcgtcctcactggcaaccttgaatcatatggggtgcaagtaccagatccggaagggcgctctctgagtgctgcttacgctgcgtataacggtgctacactgttggctgctagtccggaagatccatttactcctggtgatacccgtgtgatgtttgaagaaccagcatcatcttataatgcggaatatccgtataacatggtgtttgaatcgagatccggacacattcaggaattcgatgataccccaggatacgaacgatataaccgtgttcacccagcagggagttacgaagaaattcgcccggatggaacccgcgttgttaaaatcgtaggggatgattatcagatcgtgatgcagggccggaaactcaacgttaaaggcaacttgcaggtagttattgaaggtgatgcgttcatttacaacatgggtaacgttcaacaaacggttgatggtaacgtaactgaatttgttcgtggaaacgttcaacaaacggttgaaggtgagtacgttggccttattaaaggcaatgctgaactaactgtaaacaaagatgcaacagttaacgttgatcagaatcttaccgcaaatgtgaaacagaatgcaaccgtggctgtaacagaagacgcaacggtcactgcaaaaaatgcgaaaattgagattgaagaaacgatggatatcggtgctaaagatatcaatatcaaagcaacgaataacacgtttattgattctggcgcattaacaaaaatcactggcggcaccgtccaagtggggtaattaaatgattatggattatgaatcaataattgatggaattatgcaaaattatcagcatccttgtgatgctgagatccccgctggctattatcggcgggttatctggcaagggcatacagaaaattatccggctgttggggttgagtgggataccgagataatcaaaatcggtactcatctttatactcaagaaccgttcggacatagaagcacggatctacctgttgtcaattcaccaggaacagatccaaataccggacaaccaacagggatccttgttccaaagatcggttattatttcaacactcaagcagaaattgatgcttacattacatctattggtgcaactaaaatcaatggtggtaatgattggtatggcgcggatctgtcaaaatcaaacctatacaaaaaccctggcgaactggctatgtataaggtcgaaaacagtggtggatatctttccggaacaaaccctgtatgtgatgctcgcatacgtcagacgtataatcaggacactggtgcattcaccaatattgattattattggaacggtaatcgtatagcctatatgaagcatgatgaaacaggggcgcaccagtgcaaatatacgggtatgcaggttaacaccaacgcagatacaagcattcctcctgttcctcctgcaatgccttccacttatggggcattaccgagtgaattaagccgtgctgatatttcgtgcattccggcaactgttggtttcgcatatacaaatatcagtgatgctatgttacaggcatggaatgaaacccgtcatacgttcaagctacagtttaacatgttaacgggtgctgtacagaatggattcgggatcgcgacgatgtttgatggtttatccgtatcgatggaagaagtaatggcgggggcgctcgcattgtcacagcaagcatggcaaactgctatgaaagttttcagacaagtgattagcgctgcatttaacattatcggtggtgcatggggattgattaatcagttcttgcctcaagtaaccatcttaggtgttgcgatcaacatttacgatctggtgtttggtgataattctgttcagactttgaaagatgcatttaatgcaatcatcaaatccggacaacaaacatatgaaaccgtcataaacgcaatatacggggccataggaagcgcatacaattactctgtggaatatgtcaaagctggcgctcgcgaccttgtggatgcgtgtagcgcgttatttgattggtgtttaacgatgttccaaaacggttgcgttgcattaatcgacttatacggtcggatcatgcaaacatgggctatccctccggaagtcccaaacccgttatggtctgcggtgctggctatccgtaacatcatgatgcaaatcaaaccacttgatataattctgggtggtaacttccctggattcactgcaatggatttgtatcaacaagcacaggaaaaagtcaaggcttttgttgatgagtcatatgaacagatccgagggctttatgaacaggggcaggaactttacaaaacgttaaaaaatcagattttcgaacgtgatgcaattcagagaaaattcaaccagtacttaaactggatgtggggcgctgtaacagacgaagcaacagcggcttatcaatctgcattggatgctgcaaacgctgctgtagctgcaacacaggccgcgtatgacgctatacaggaacagattggatctctacaagatgcaatgaaagatacatacagcatggcgatggaagaattaaagaaattgcctttgatgagtacaataaacgagtttttaggcttctgtggtgtcgcatttgacgatcttctcaagtcatatgaaaatgcgattactggtgctcagtctctgtacaaaaatttcattgatagttcgcgctcgtttaaagatcactgcaaagtaatctataaccaaatttgtacgttggcgttgagtaaagtcacacaatatgtgaataaattgctgtctctcataggattagcaatcaactttggttcgattagtgtatgtgttccagtactgaaatactaaatagtcgaatgatcaagaggaatttataataatggctactgctaagactaagactgtcaaaaaacagattaaccaaatccccgatatctttatcgggggtactttcgaagaaattaaatcggatctgattgattggctgggtggacaagaagagtttaaggattacgatttttccggctcacgaatgaacgtactgatcgaccttctgtcgtatgctactctttatattcagcagatgggtaacacggctctatttgaatcgtttattcgcacggctgcgttgcgtagttctgttgtacagtctgctcaagaactgggatatatgccagattcgcgcacggctgcaagcacagcagttatgattacggctgctaacccactgaccccaacatcgatccgtatcccgcgcggtacaaaattcatcggtactgtaaagaatacagacagttattcttttgttgtatcagatgacgttgttatcgttcgtgatagtaataacaactatacatcaatgctgaacctggtgcaaggccgtttagttcgtactgaactaatttatgacggttcgagtatcctgatccgagatccaaacattgaccgtagtcaggtacgtttaactgtaaacggcgcacaatgggaagactggacaaacgaaagcattgtaaacgcaacaggcgcaagcacgatttactacatgcgtgaaactgttgatggacataccgaagtttatttcggtgaaggtgaagcaagtcaacaagtggctggtggcgcactaaccgctgaatatatcgggggcttgaaacctgctaatggttcgactatcgttattgagtacctgtcaaccgatggggaagcggctaacggtgcaaaagattttatctatgtcgatacattaaccaatattagcatcactaacatcgaagaaaacccgactaaatcccctgattatgttggtgctgatggtggtggtgatccggaagatatcgagcgtattcgagaactggcccctgttatgcgtgaaacacaacgccgttgtgtaactgcatcggattatgaatcattcttgtctcacagatttggttctatcatccaggcggtacagtgctttactgataacgaaaaacctggttatgctttcatttctgttaaaccaaagtcaggtttgcgcctaacatcggtacagaaagaagatatgcaaacgtatctttcgaaatataacctcgcgacgatcaccccgtcgattatggatcctaactatctgtatatcgtgcaatctgtcaaagtaacgtatgatatcagtaagttgacggaatcggaggaatggttacgcggtcaggttatttcatcgatcgactcttactatactgacaacgttgaaattttcaacaaatctttcagtgtatctaagatgttgacttatgtcgatcagtctgatacttctattatcggttcggaagcagatattaaattgctccgtgaaattgacaactattacagtgctcctatgtctgggatccatttcttgaaccaggtggaatcgaaatcaatcatttccagtacgttcaaattcactaatgaagacgacgaaagttatgatgttcgttatgcttctacggaaatggatcaggatggtaacgcaaaaattgtaataggcccgttcaaggatggggatatttcgatcgctgcttatacaggcgatgactttgaaaaattaacagatgcaggaatccgtaataaatattacgaagttggatctgtttctcattacaccgatttcattagctttgacctgggcgttctgaacgtatccgccgatagtttcagtgctgcttatatcgagctaaccgcaaaacctctcgaagagacaatttttactcgcgatggttcgttgatcgtgtttgaaaatgacctgcgtcctcaatataccacattgactatgaatcctatcagtcaataatctttaacccctgtcttcggataggggtttttctttttataaatacgtgatatacataaccgcaaatttggagaaatataatgattaaagcgccttcgattacgagtttgcgcgttgataagctggctgctaacttcgtttaccttaaatgggatgatgttggcatggatttctattatgtggttgaattggcccgtagccgtgatatggacggaactattattccagacgaagatttaatctggagtcagttgggctatagctacgaaaacgaatggtttagcgatcaggttgccccaaatacacgttataaattccgtattcaaacaactcatgaagggtttgacccttctgattgggtgatcagcgatgaattatggacgtttgatgagaacgcctacgcatatacaaccatgcgtgaattcacccctgctgattcgtttatcaatgaaaaattcgccaaaaacaatcgtgattacgtcgattttaacgatgatgttattatggcttctctgatggttgaggattttgtatactctcccctgtattctgatgtaagccagatcagcgataagatcctgaaacaagaaagctaccacgaaattcaagatcatatcgaacacgtttgtaatgatatagatcgcacgttcctggtatactcaaacggattgctttacctgtttgaacgttttcagaatatggctaaagtgtcaaatgacaaaggccaaacgtggtattactacaaagcattaaacgatcgtgtaggtaatccggtttcccgtaccgttgcttatcagagcgctaacactacgtatgtgttaggatacgatcgcatattttacgggcgcacgtcaacagatattcgttggtcttctgatgaagttcgtttttctgctgatgatgtaacgtttgcgaagctggggaaccagtcagggttagattttgatgttgattcatacaacacgtatgcgcgtctaccgggcggagtgtcgaagtatgccgaagctatggcttgttctagtgattggctctacgtggctgctaagaacgttatgcgccgtattgcgttacgtaacacaccaattgatactgatcctggttctccgacctttggtgaacgtatttttgatgaagtttcgtataccatcgtaccaggaaatgataaaattgttgttaaaaaaatggacgtgctgaatgaccgtctatacgttctggtaactggtgaagttaaaacggcgatgatggatccgactgtcaaggctaacgtgatcccatcaaacgatgctggcgtttatctgtgggatgagaatgcaaagacgtttacccgtgtttatggtaaaaccgaagatgaacgtttttatatcactcatgaatataccaatatgtcaaccaatggcgatgaagtttacatttctgttggtaactacaaatatccaggcactttgccagatccagatctggttgaaaagtatccggaagatgtgcattcagcagtgaaatacgatcttgttcctggttatactgcaagcatttcgattaactttgctacagttcgtgcaaatcagaacgatcctacagtatggaactttgggccgcaagagtactacaatgaagcaaactttagctggcatttccgcgataaggttagcacatggatcaccaatgataaccgtcctctggtggtttatccggaaaccctatatactctggttactgatagcgcgtctcctgcgtcaacgattcgtgtaaaccatgaagtttgggacaaaggaacagttactatctacttgaataatatcaagtttactggttttacgaagtacacaaacggtgttctgttgtatcgctcaggtggtaggataattggattctatgaactgtcataccgcgcaagggatgaactcactattttctggaaaccagataacactttaatggtggcaagtctggttaatcaggaacgtgaaaacccatacacgccggatattgaacctggactaatagaccctgatctgagtcacatgatcactcgttttgctccgcaaagctatctggacaaccaacagttcgaaaaatttggtgaatattatctgcaatacatttcgttgggaagcaacagttactataacaaattgctgaacctcatccggaacaagtatccgagagagaaaaacaacgttgaatatttgtggtctgaaattaaccgccgtaacatttacctggataaaaccaaacgtgaggcagtggttagatttttcgaatcacgtgcaagcgatttctattcaacaaaagggattgaggcaagttatacgttcctgtttaaattactgtataacgaagatgtttccgttgagatcgaaagctccaacagtctcgaatatgatattttggttagttcaacaaatatcagtcaggatatcgtaggccggacgatctatacaccaactggacgcgctaacgttacatacatcgaacgtgaatatgaaaatggtcaattgcgttggtcaatgactctgcataatgctcaaggtaactttatcgaagggcaggttgtcaagtcagaaaaaaccaatttcaccggaatggtaattcgtggtgttcgtggtaaacaaatggctaacaactcgatcgactatataaaccgtggacgctcttactacgtgatgaaaattcgttcaaatctaccgacttcccgttataaggatgacgtattgaggtttgttcatccggtaggattcggcttcatgggtattacgatgttaacagtattcatcaactctggtttgtcaatgactcataacgagacaatcattgatattctgagaaactaccgtttcgatagtggttatcctaagttctggcctgatcgcattgcgagcatggacggtaacggaaaccaacaattcgacctggttactggtgaacctctgtacaccgcacacccgcgagcgggggaaccttttgatgtacctccggaatatgacgttgaagaaaaaccgcttaacggtgttcttccttctgcgcgacggttcgatcaaagtccgttgttcgattgctcaggcgttaaatattcacagttccgtaatttggtggatagacgactgaaagatgatgcaggaaacccacgtgatccaaatcctccatcacagattaaggtaggaaattaaatggcacaacaaaacttgtatcggtcggtaattactgcaaaattccgaaccgaaaacttgatgaacttcaaagatatgatcggcgatgccgccgatctaaacacgatttatatgtctattgggcgaactgaatcatgggcggataacgaatccgaccctaactttgccccgccatatccaaatgatagcaccgatggtgttagtgatatgtggacgcatatgatcggggctactaaagttcctggtgatatgatagatgcaattttaccacgtaaagactggggtgatactcgctatccaaacccgaaaatcttttactttaacgatattgttgttgtaaacaccgcgccttataaccgtactgatccgggtaaaggttggatggtttatcgtgtagttgatgttcctgatatcggttcttgctccatttcgagcattaccggaaaacttgaatgtatcaggatcggcggtatctggagtccgtctcatgaatcgagtgaacctccacgcggagaagctaacgggatcgacatgggcgacggctataaatgggaatacctctacacaatcccgccagatgtcgtgatcaaccgctgtacgaacgaacatatcgtagttcctttccctggcgaactggaagaggatccggtacgttggggttatgataacgtgattcaatggtatccaggacaatacgatctagtgtatcggttgaaggtgaattcaatgcgttttcgtgcatacatggattctcttttcttcccgcaatctacgcttcctggtaacaaagggttccgtcagataagtattattgtaaacccgttgattaaaaaggcaagcccgaccgaacctgaaaagaaagcaactggtgattactataatgctaacgcgcttgaacctgattccggacgtatgatttacatggaaaacagacaacctattattcgctcccttgatcagactgaggaagtgagtattgtattcgaattctaaggaaaaacaatggcttaccaaacagcaaaaaaactaattgatgtcggtgaaatcggcaacccatcaacaggcgacccgctttatgatggtggtgttaaactgaacgaaataatcaccaacgtttataatgcgtttggtgatgtgcgtatgctgtctgcaaacgaaggtgtcggtaacatggtgatccatgctaccggatactatcagaaactaccacgcacttactattcaagcacaccgatcgaactgggttccctgcatgacatggatacttcaacaggttcgattaccgttgttcttccttctggtaaggttggcgaaggttgctacttcataaatagtacgggtagtgtctctgttgatcgtcctatcgcgtttcgtcctcaagttggcgatacaatcgcgggggttgcagaccagttgtacatcacgtcaccttacacctttgtaaaaatctggtgtaccaaaaaagaaggtgcgatcacaacatgggattattctgtagaatctatgttcggttctaaaacgatgcctgttgacactacggcgcttgtactgaaagcaaacccgactgctattcctatgttcggatatagcgaatttagcggggctaaggtgctcgtatacgcagaaaacgtagctggtacagttaccaaaatggcggaagttttaatgaccgtggatcgtgtaaacaaaacgatttattcaacggaatacgctattttgaaaaacagtgaagatgaaatgtttacattaaactttactgtcggtgctggtgatgtcgtatacgctaacgtgcaagcgatcaaagaagatcgaattaaattcacgattaaagcaatcgatacgattaaatcagggatcgcgtcatgaaacaagaaattttaataggtcaggttgtagacgatggtacaggcgattacctgcgtcgaggtggtcaaaagactaacagcaactttacagaattgtataacatgctgggggatggtgagatcccccatccagcaggtgcatggaaaacctttgctggtacgacgctatcaccaaaatttggtgaatcatgggcgttgaataccagtgcaaacaaaatcaccgtaaacctcccgaaaggcggcgtaggcgactataacaaagttattcgtctgcgtgatgtgtggtcgcgttgggctaccaacaacgttagactgatccccgcaactggtgatactatcaaaggttccccaactcctaaagatctgtttaaagattttatggatgtggaattggtgtattgttctccgggccgttgggaatacgtcgaaaacaaacagattgacaaaatcacaacttcggatctggcaacagtagcaaaagaaacgtatattgctactcagggacaaactgacttccctaacgtattcggtgttggtaatgaatacaacttgcaatcgttcgaagtttactatcgcggtaacttgctgttcatcgatgagaaagacggattcaatgctgataattcagactatggatcgattggttctgctcctggtgaactggttgcgcttgatggtaattcagtacgccttaaaaacccgtgtaacgctggtgatacgcttcaatttgttacctatctagatgggttagcaacatggcgatcgagctatgaggcgtatgtgatgcgcatgtatcagactggtgatacttctctggaaaccgttcctggtgaacagtgggtaggcgatctgacaaccaaaaaagagtttacacctgctgaatttggtgttaaccctcgcgtgttgattaaccctaactcgtttgaactgcttctcaacggtaaacaactggttaaaggcggtgacgctgactatccggcgttttcctgtgaaggtgcggaaggtgttgatgaaagtacgtgtgttggtaactctggtgtatgggttccgtcaggacaggattatagtttagtattcactgattctgtagtgacttcaatcaagtttgctcaggaactggaatccggcgacgttgtaacgattcgttggtttaacaatgatattggtactctgatggattgggaaggaactggcggtattaaagaaaaagctgataaggtttatctcaataacgaagaagaagttatattgacgaaccgtatcgaatataccgattataataacccttctcagaaaacaatgcgtaatacaggggaaacctatcagggacgtattctggatattcaggctatgtttgatattatccacccgatcggaaccatctatgaaaacgcacacaacccggcaaaccctgctgattatatgggatttggtggttggaaacgttacgcagaaggttatttcctggctggctggacatcaaatgcagcggatcctgatttcgcattaaacaataatgatttagatagtggtggtcaaccgagtcatacggcaggtggtacaggcggtgatcgtggtacagaaatcaaaatcatcaacgttcctgaacttgtatcaaaagataaagttctgattgctgatgaaaatggtgctgtgatcattggtggttgtcagttagatcctgatgcttctggccctggatacactaaataccgtgaggatacattgaaagtgaatcatggtaacacattacctgataaaatcaaaactattccaccgtatatgactgcacatcgctggataagggttgcataatggcttacaacaatatttcaaaaacaagggagggcgctcgcgtcctctctaaagaagcagattacttacagtatgatacttatggtaagttgcctctgatcggcggtaaacgttcgatcggcgaaccaaacattgaccaaacaaaacgcggtgttctgtatggaaacgtacaatccgcaattgatgacctgtatacgcttatcgagcaaatcccgattaacggcgttgttaccatgactgaggatgcacctccaatcgccgtacagcaggttgagagcgtttcttttgatggtattgtacagaacatcgattcagaccaagaacaggctgtagttcacgtatacggcttccctttcatctttgataatgggactaacgccgcaaccgtttgtgaaacggcatacaacaaatttactgaattcgttgcagcggaaaaatatttcgcagaagttaaccgcaaaggtgttgatggtacgatcctagaatgtcgatttattgatagtgttccgcacccggcaacaaatatctcagaaaacggtattcgtcaaatcggaactatcgacgtagccgcaaaaaatggctatggttcatgggttaagttgggttctggtttcttacctgatgttactccgcaagtaaccgtgtattacttcaaacgaattgcataaggataacacatgagtaacaatacaatcaaccacgtaagtgataaatccatttacgtgacatttgacccaacaggtactgattggcctgataccataaccaacgtacaagatgcgttggaaaaaataggtagttgggcgcgtactgatactgggcttcctatcgcaacaacttctgttcgtggtattgctcagatcgcaaccgaagctgatattgacgctggcacggataacactaagattgttactccgaaactgttagcatatcgtatgcagaaccctaaagcatcacaaaccgtatggggttatacgaagtattcgactgatgcggaatctacaaccgtaactaacgatgcatcgtctattactccgcgatctctgaactatgtgttcaataaccgtaaaggtacagaatcggtttggggttcttctaaaattgctaccactgcacaggcggttgctggtacagataacactgtaactatgactccgcttaaagtcaagcaagcgatcgcgtctctggttcctgttcagtcaagtgcgaccgaaagctcgcaaggtttggtacaactggcaacagttgcacaggttcaggctggtacgatccgtgaagggtatgcaatttcaccttatacgtttattcgtttaactgcaactgaaagcaacctgggcgttattcgcatcgcatcacaggcagaagcaaacgcaggtactgatgacaccaaagcgattactgcgaaaaaattaatcaatacccgtgcaactggatcccagttcggtgttgtcaaattagcaacaactgttggttatgtggcaaacactgcactttcttctaatgctaatgtattgcctagcgatcgtagtgcggtaattaatggttctctttatgagaatagcgcaatacataacaacaaatatcagacgtggacagatcttgattggcatttcccagtaggtgctattgtcatgactggtttccagactgaccacggtagtttgtatatttgtgatggacgttcactgaataaaaataattacccgttactgtttgagcgtataggttatacatttggtggtggcggtgattggtttaacattccagactgtcgaggcgttgcagtacgtggtcatgaccgtgggcgtggactaaaccctaatcgtgggtatggtacatatgaaggagatatgttgggatggcacgaacacccattacaacttatctaccagaacggcggtaacattccgaaatggcaagcagtttacgaactgaaaagcgccgagaagaatgaccaaagcgctcgcgtatttgatgcttctataactaaagctactggtgtgggcggtgaagaaacccgcatgaaaaacatcgcattaaactacgtaattcgcgtattataacagaggttattaaatgatcatcgacaaattaaacccgttgccgaagatcccgtttgttgatggcgtcccagatgacgccacgactcaaacgaagattatttggatcaaaaacggtgaaactctggacggttcgccagataaagtgtcaaacactggcagtcttaaccgaactggtgtaaacatccagcagaacgcggttcagttagaacaaaatactatcacccataatgataaaatcaacgaagtaatcgatcaggttaacttgattactgaaaacattgatgctattggtgatgaaagcgtaatcaaaaaagttaaccagttggatcaggatgttcaggcattaactttatcgaacacccaaacacagaacaaggtagcacagttaaccctttctgtaaatgctcagaacgatgaaattggtgaatacgatccagaaaaggatcctaaacaccgcacaattcgtaatgatatcatttacatcaagaaagaagttggttcatatcctggatttaacgttgatggtgatgttgacccctcttctactggtactggccttaaataccgcgtactgagtaaccaacgtgccatttctatgcaggaaacccgcataaccaaactggaagatgactgggcgctttccgaagtaggacaactgacagaagaggtaaaagaacttcgtgctgaaatgggtgattctggtcttgccacaacccgttcaatctatgcgcgaattaagatccttgaggatggttctgttgtaatgcaaaatgaacttgatgcgattaatagttatatcggtcgcacgtcaggttcaaccagttccattaacgatcgtgtgaacagtatggaaaactccgttagttctctggctacacaaatcaacgatccggtaactggtatcactgcacaaattacaaccatcaatggtcaaattggtacggtttctgttcagggtagtatccgttatgatattgcggaaaacaaacgcagattgatggatatggaaatgattctgggtgaatccggtgatgaaggattgcagggacaagttgcgatcttaactggcgacattggcgaagattcagatcctaccagtatcaaaggccgtttgagtgttgttgagggtgaattacgcaccaacactagcgcactatgggaactgcaaggcgttgtaggtaactcttctaatggcctcgttgcaactagccagcaggttaacaaagaaatatatggtgatggtgttagtgccgaccccgttactcgtgctggtttgaaaacgacaacccgcaacctgttcactcaggtaggagataactccgaaggtaacgaaacgggcatttatgcactaattgccgaccttaataaacgtgttgaggatttagaagcgttgaacattgcacaggcacttgcagatcgcgtaactatcgaagatctgaatgctaaactggctatgtatatcaaagaagctgacgccgatctccgttatgagagcaaaaacccgcctctgtcattcggtactaacctaactggtgatactgaatacactactggcgatccattgtctctaagcgtaactatgaatggtggtgtttctccgctgtcttaccagtggacgaaaaacggcgtaaacgttggtactgatgctaacacatttaccatcgattcgctacagccttctgattccggaacttacaaagtaacggtaactgatgcaagccataaagtcatcgtttctgatgaactggcgatcactgtcgcttaacgattaacaaggggcttcggccccttttgaggatctttatgattacgaacaacccagcacaattaaaagatgaaattctgcgccgtttaggtgctccgatcgtcaaaatcgaagtgacaaccgaacaggtttatgactgcattcaacgagcattagacctatatgcagaatatcattacaatggatctaacaaagggtatatcattctcaccctggggccggataacccgaaaaatattttcgatctgagtaaagaacacattttcgcaattactaaagtgttgcgtactaacatgggttcccttgtatcgatggatggtactgcggtttatccgtggtttactgatttcctgatgggccttactggtggttctctgggcggcggtggttgtgcatcacgtacctacggaatgaacgcatatggcgcggatatgggctattttacccagatgatgagctatcagcggtcaatgcaagatctcctgtctccgcttccggattactggtataacgacgacacaggacagtttgcagtatacggaaccgttaaagatggtgatattgttgttatcgaagcaatgatcagatcctttgttgatgtacccagtatggtcggtaacgtcgctggatacgctacagcgggttctgatggtgaagataagccaactatagcagatatatacaataacccctacaaagccgtctcaggcggtgtgaaggctggtcaaggtgcaagcgttcatagttcatcctctgcgtataacaaccgttgggtgaaagattacgcaactgctcttgttaaagaggtaaacggtcaggtgctggctaagtttcagggtatgcaattgcctggtggtgttgctccggatggaacccgactgattcaggaagctatgcaagaaaaagaaaacctccgtcaagaacttctgttactgtctgatgcacttccagtgttgatgatgtaaggaggaaaaatgcaaaattgggatgaaagtctgtttgcacagttagaagatggttccggcgtcgatcggaacctaagacaagaagtaacaaacccgtatgttaactggtacaagtataaccctactcaacagttacatgattcactaacagccgaagcaattcaaatgaaatctccggatatgtattacgtccgtcgagaatttgttaatattgataaaattttgggcgaagaccgtgaatcgaagtttacaaaatcgtggaaaattgcagcatacatcgattcgtatgcaaactacgaaggacagagagacttttacagcaaatttggtatgatgtcaaacgatgaaatgacacttgtgatcaaccctcgtttatttgcacatcaaactgatggcgggatccctgttctgggggatttgatttatttccctatggataacagcctgtttgaaattacatggattgagtttgacccgttcttccagttcggcgatcgtcctcaacgtaaaatcaacctcgttaaatttatctatactggtgaagaattggatcctaaactgcaacgaaatgaagggattaatcttgctcccgatgctgatctggatctcgaacctattcgaaatcttgatggattggctgataccaatattgaacaatacgaagaagatcaagcctttgaagatgaaggcgatgaattcattgaatcgtttgatgttgtcaacgggcgcggatcaccgttcgcacagttcccataaatataaccaggggaaaccctatacatgtaagggtataggagaaatcttatacccgctttaacccatacaggaaaaataaaatgtttggattttggtataatagttcgttgcgaaattatattgtcttgatgggttgtcttttcaatcacgtgcaagttaaacgcattcgcggcgaacaagaaaaatttatcaaggttccgattacctacgcatcaaaagaaaaattcctggcatccatgaacaagctgaactatgcatacagtcaggaaaatgttgctaaaacggaaacaattttaccacgtatgaatctatccctcgtcgatttgcagtataacgcaattcgtaaaactgggatcgcggtaaaccaaaaaatgacgcagttacgcgcacctggaaaaacagtaacgcagtttaaccctgctccgtatcgtctcatgttcgaactgggagtgtatacccgttatgaagatgatgtgtttcagatcatagaacagatactgccatacttccagccgcatttcaactgtcgtattacagaattacataaaaacgacattaaaatagaccgagatattaaaatatctctgcaatctgtttcccctgataccacgtttgaaggtgatacaacgacacggcgacacattgaatggtctttaatgtttgaattacagggctacctgtatccgcctgttaacgagattaaaggcgagatcagaacagtatacacggatttcttttccaatatgaacccgttggacaaagacaattttgaatccgttgatgctcaggtggatccggttgatatgcctatacaggattacacgggagaagaatacgttcaaacgtatgctaatgatatcccaattcctagcggtgatcaacctcctaaaccgaggggccaataatggaagaatttagcgtaaaacaactacttgatcttgaaaatctccctggtgctgaaactggggaagaaatggtcgtgtatgaaaaactcgaactcgttgatgtcgagtcacacccagcagatcgaaaacctgatttagaggaagactatgcacttgcgcgtaaaaccgcgcattacatgaatcagatgatcatggatatggcacaaattgccttgcataacgctaaaaactctgaatctccgagacacgttgaagtttttacaaccctgatgaatcagttaaacaattctaaccagggattgatgaaaattcataaagaaatgcgagaaattaccgaagaaacaacaaaaccaggatctgaaaaaggtaatggcggcggtaatgaaatgaacatagagaatgcaactgtatttgttggttcccctacggaattaatgcagaaatacggtagtgcatacgaaccaaaagaaggcttcattaatggtgaagcggtagaggtaaaccctgatggaaatggaaccaacgatcgatccgagtaaggaatcagatcacccaatcggattaatgcatcccgattatctgaaaaagaaaattgatgaatttgggatggagtggacgcaaagcgaacacgataaaaaatggtatccgacaaagtttagcgattacctgaaaattaacggtatccagaaagttgatattcaagcaaaagacagttcaaactttgcgacgtataaaaacaaaggaaacaagaaaacccgatataacggaaacccaaacctgaaacgtgcgtacatccaaactaaatggacgcaacagatgttgatggagtgggttaagtgtcgtgacgatattgtttattttgctgaaacatattgcgcgatcacccacattgactatggtacaattaaggttcagttgcgtgactatcagcgcgaaatgctgatcgaaatgcataaaaaccgtatggttgcctgtaacctgtctcgccagttgggtaaaacaaccgttgttgctatcttccttgcacactttgtgtgtttcaacgaggataaatatgttggcgttttggctcataaagcctctatgtctgcggaagttctggatcgtacaaaacaggcgattgaacttctccccgatttcttgcaacctggtatcgttgaatggaacaaaggttctattgaacttgataacaaatgtaaaattggtgcgtttgcatcttctcccgatgcggtgcgtggtaactccttcgcaatgatctacattgacgaatgcgcgtttattccaaactttattgatgcgtggttagcgattcagccagtaatttcttctggtcgtaaatcgaaaatccttatcacaacgacacctaacgggcttaaccacttctatgatatctggaacgctgctatagaagggaaatccggcttcgtaccatacacggcgatctggacatcggttaaagagcgtttgtatacagacggtgatgatggcgtatttgatgacggctattcatggtcttcgaagatgatcgccagttcaagtaaagaagcatttttacaggaacattgtgctgaattcatgggaaccaacggaaccctgatcgctggctggaaattgtcaaaactctcatgggttgatactgatgaaacggaaactaatttttatcagtataaagctcctgtagagggacataaatatattgcggtactcgacccagccgaagggcgcggtcaggactatcacgcgatgcatattatagatattacatctatgccgtttgaacaggttgctgtatatcattcaaacaaaacatcgcaccttattttgcctgatgtcctgttacgttatcttatgatgtacaacgaagcatgggtttatatcgagctaaatagcacaggccactcagtggctaaatctttgttttctgagttggattacgataacgttatttgtgatagctataatgatttggggatgaaacagagtaaacgatcgaaagcgattggctgctccaccctaaaagacttgatagagaaagataaactcatcataaataacaaaaagacaatacttgaatttcgtactttctcagaaaaaggtgtttcgtgggctgcggaagaaggtttccatgacgatctcgttatggcgctggtttgctttgcatggctaacaacacaaatgaaattcgcagaattttgcgagaaagacgatttgcggttggcaaatgaggtattcgcacgtgagcgcgaactgctttatgaagatatgttatgtcctgttatcgtaacgagtggcgacgaaacaatatctgtcggccaacacggtatttcgtttatataaatttagaggaaacttaataatggctttaatctctccaggcattgaaactaaagaaacatcggtacaatctaccgttgttcgaaattcaactggtcgtgctgctattgttggtaaattttcatgggggccagcttaccagatccgtcagatttctaacgaagtcgaactggtaaactattttggctccccagacaatgacaccgctgattatttcatgaacgctgtaaactttttacagttcggtcaggatctgcgtgttgttcgtgtcgtcgataaagaagccgcaaaaaacgcaaccgcgatctataatcagatcaaaaccacgatcaccgctgctggttctaactatgcagtagacgatcagatcaaagttaaacacaataacgttgttattgaagaagatggtgttgttaccagcgttgatgatcagggtaaaatcctgtctgtgttcattccgagcactaagatcatcgcacatgctaaacaggttggtgtatatccggatctgtctagtggctggactacagaaatcgtttccagttcttctggtgtttctgctacgattacaatcgacggcgtagaagttgatccgggtattactctgctcaaccttgacaccgcaaaagaaactattcaggcaactgctttccaggaactttgcaccaaataccagctaccgtctgttattgcaatttatcctggcgaaatgggtagcaccgtaacggttgaaattctgtctaaagctgcatacgattcttcggctgtcattaagtcttatccttctggtaagtctggtaaaaacagcggtcgcagttcgatgaactttggccctcagaatgataaccaatacgcgtttatcgttcgccgtggtggtattatccaagaaacgtttatcgtgtcaaccgctaagggtgataaagatatctacggttcaacgatctacatggatgatttctttgcaaacggtggttcgcagtatctgtatggtacgtccctaaactggcctgtcggattctccggcgttctggaactgggcggcggtacttctgcaaactccactgtaggcgctgatgaactcatggctggttgggatatgttcgcagatcgtgaatctctgcatgttcctctgctgattgcgggtgcttgtgctggcgaaactgccgaaatttcgtctactgtacagaaacacgctgtgtctatcggtgaaacccgttcagattgcgttgtattcgtttctccgccgcgttctgctctggttaacatcccactggctcaggccgttgataacctcgtagaatggcgtacaggctacaaaatcggtaatactaccccagttgataacaacatgaacgtaagttcaagttatgcgttcatcgacggtaactataagttccagtatgataaatacaacgatgttaaccgttggatcccgctcgcgggtgatatggctggcctctgtgtttataccgatcaggtatcgcaaccgtggatgtctccggctggctacaaccgtggtcaactgcgtaactgcatcaaactggctatcgaaccgactaacgcgcatcgcgattctatgtaccaggtacagattaacgcggttactggtttctctggtggtgccggatacattctgtacggtgataaaaccgcaacgactgttccaagcccgtttgaccgtatcaacgttcgtcgcttgttcaacatgatcaagaaagacattggcgataacgcaaaatataaactgtttgagaataacgatgatttcactcgttcttccttccgtatggatgcaggacagtatatgtctaacgttcgcgctctgggcggtgtatacgattaccgtgtggtttgtgacactacgaacaacacgccggatgttattgaccgcaatgagtttattgcatcaatctacgtcaaaccagcacgttctatcaactacatcacactgaacttcgtagcaacctcaactggtgcggatttcgatgagttgattggatcaacgtcagtataacatgtaaggggctgaaaagcccctataaatacacatagaggttagaaaatgcttactgatattgtacgcgcctttgaatccggtgatttcgcacgtccgaacctgttcgaagtagagatcccgtacctgggcaaaaactttaaattaaaatgtaaagccgctactatgccagcgtctaccgttgaaaaagttccggtaggttacatgaaccgcaaaattaacgttgctggtgaccgtacctatgatgactggacaatcacggtatataacgacgatgcacacacaacccgtgatgcaatcgtagcatggtcaaacatgctgcatggtatgggtgaagacattacaggggatatccctgcaaactacaaaaaaaccgctacggttaaacagaaaaaccgtaacgacgaagtaaccgccgaacataccatttatggcctgttcccgaccaacgtgggagaggttactttagactgggatagcaacaacgaagtgagcacttttgagtgtactttcgcgctagactggtgggtttaaacgctataaatacaggggtagcaataccccttatcattatttttcggagttgtaaatgaacttttttggattagacaatgtgttagggtttttcaaaaatttcgccaaacaggatgaaatggaatttgaagcccaattaaaagatgatacaggttcgattgcgcctccgaaaaataacgatggggcgcacgaaatcgaaacggacttatcaaaccagcgttattcttctgtgttccaacagttctattccggacaggatccgcgaattcagaacaaaacacagctaataaatacataccgtggtatcatgacatatccggaagtggaaaacgctgtttctgaaatcattaacgaagcgattgttaatgaacaaggaaaagatattgttacgatggatcttactaaaacgaattttagtaaaaatatccaagataagatcatggaagaactcgataccgtaatgaatattcacgatttcgataaccgaggatctcgtttattccgtgattggtatgttgattcgcgtatctatttccataaaatcatgcacaaaaatgaagctgacggcatcaaagaattgcgccagttagatccccgttgcatggaactgatccgagaatcggttacagaaaccctacccggtggggttaaaattttccgtggctatcgtgaatacttcgtatataccgcaccgaaaaacggttatagctacaacggacagatttatagtcacaatgacaaggtaaaaattcctcgctctgcgattgtttacgctcatagcggccttgaagattgcgacaacaacattataggctacctgcaccgcgcggtcaagccagctaaccagttgcgtttgctggaagatgctatggtgatttaccgtattacccgtgcgcctgaacgtcgtgtgttctatatcgacgtaggtcagatgggtggccctaaagctacacagtacgtaaataacattgcacagggcttaaaaaaccgtgttgtatatgacgcgagcactggtaaagttaagaatcagcaaaataacctgtcaatgacagaggactattggctgatgcgtcgtgatggtaaagcagttaccgaagtttcaacgcttcctggtggcactgccttctctgatatcgacgatgttaagtggtttaaccgtaagctgtatgaagcgttacgtattccgttaagccgtatgcctcgcgatgatggcggtatccagttgggtaacgatggcggtattacccgcgacgaattgaactttagcaaatttattcgcgaattgcaaattcaattcaaccctgttcttgcggatccgttaaaaactaacttgatcgcgaagaaaatcattacagaagatgaatgggatgaaaacgtaagtaagattgcttttgtatatcagcaagattcttactattccgaaatcaaagatattgagattttggaacgccgtttaaacctgatgggccaacttgaaggggtggtcggcaaatatatctcccataaatacgtaatgaaagaagttctccggatgtctgatgaggaaattcaaagcgaagccaaacagatagaagaagaatcaaaagaagaacgttttaaaaatccagaagcggaagaggaaaacttttgatgaaagaatttatcgaagcaatcaaaagcggtaatctggtggaagctaaaaaaactttttactccatcatggaagaccgcacagaagcgcttcgtcacgaattgcgcgttgaacttgccgaagctgtacgcatcgaaggcgaagaagacaaagaaaaagacgacgaaggcgctgataaagatgacgaaaagggcgataaaaagccagccgaggatgataaatccgataaagatgatgagtgaggtgtgtaatgcaacttgacatcgaaatcaccgccgaagatctccatgaacatttagacgaagcgaaagctcgtgtagatattctgggtatcgatgaaggcacggttaaaatcatcgaaaatttggcggtcaccgaaccaaatttagcccttgctatgatggcggttgttgaaggtttaacacttgatgaggtaattgtcaagcatgttgattcccgtggcaacgtagaacgcctcaaagacaggaaaacccgtgagcgtaatgcgtatcagacgaccggattaactaaatcccaacgtcgccagatcgcgcgtcgtgctctcaaaacaaaacgtgctaacccgtcaattgctactcgcgcacaacgtaagcgcaagaaagcattgcgtaaacgtgctgcactggggctataaatatgaatgaatcccaaatcaacgaaaacggcgatatgcttttaatcgaagaatggggtttaccttgcggtgacgtttcagaatctattttagaatctgttggggaatcaaaagacggtaaattacggatcgaaggtattttccttcaagccgaaaaggttaaccgtaaccgtcgtttgtatcctaaaaacgtacttgaagaagcagttaacgattatattagaactcaagttaacacccgtcaagcattaggtgaaatgaatcaccctccgcgtccgaatgtggatccgcgaaatgcttgcatcctgattgaaaaattgtggtggaagggtaacgatgtttggggccgcgctgttgttgttgaaggcgacggtggtgatggtgacaaactggcggcgttgattcgtgctggttgggttcctggtgtttcttcccgtggattaggtaagctctccgattccggcaaaggctacggcgttgtacaaaagggctttaaattagctgtaggcgttgatgtcgtctgggggccaagcgcacctgatgcatatgttaagcctatagtggaaaatcagcaaagcaaaccgcttgttgagaataatagtgctgatgacgcttttcgggaattgtccgagcgtttgaaaggtctataaatacattaaacaaaacaacaggaaaatcaaaaatgcttaaagaacaactgctggcggaagcccagaacctggatactccggtcgagttagacagcattttcgaatcagttgaactttctgatgacgtgaaagcgacattcaccactgtattcgaacaagctgtaaaagctggcgctgcaaaactcgctgaatcccacattacccagatcgcggaacgttccgacgaactggtcgaagctcaggtaactgaacgtgccgctgaaatcgaaactaagctgtacgaagatgctgataaatattttgcgcacatttccgaagaatggctgaaagaaaacaaagaagccgtttcccgtgacatcaaagccgatctgtttgaatccctgatcatgggcctcaaagaagttctggttgaacataacgttgtcattccggaagaacaggttgatgtagtcgccgaactggaagacgaactgactgagaatcagcaggaagttaaaaccctgtttgaagcgaatcaggaactgaccaaagaaatttcagaaatgaaacgcaatgcagtagtttcagagaaaactaaaggtttgaccgaatctcaggtcgaaaaagtagaatctctgattgaagggctggaatattccgcaaccttcgaaaataaactcagcgcaattgttgaaatggtagcaaccaaagctgaaaaacccgttgacgagtctgtaaatactccgcaaacgaaagatgactttgttccggtagtcgaaagtgttccggcagagaaatccaagatcaataaatatgtacaagcggcaaaagccctttcttaatttcaaaaggtaagaaacaatgtctaagaaaaacgaattgatggaaaaatggaacgatcttctggagtctcaggaaggcttaccggatatcgctaccaaatccaaaaaacaactgattgctgccattatggaagcacaggaaaaagacgcagaagttgatccggtttaccgcgacgagaaaatcgttgaatccttcggtggtttcctggcggaagctgaaattgctggtgaccacggttacgacgcaaccaaaatcgcttctggtaactcaagcggtgctatcaccaacatcggccctgctgtaatcggtatggttcgccgtgcgattcctaacctgatcgcgttcgatatctgcggtgttcagcctatgactggccctactggtcaggtgttcgctctccgcgcagtgtacggcaaagatccgctggcttccggtgctaaagaagcattccatccgatgttctctccggatagcatgtactccggtcagggcgcggctccgagcaacggctttaccgaactggcttccggtactgcgatcgctgacggtgctatcgtgttccacgatttcggtgaaactggtcgtgtgttcctccagaacgtttctggctctccggttactgtaactggttctaccgatgatgctctggatgctgctgttatcgccgaacaggaaaaaggtactctggctgaaatttcttacggtatggctaccagtgtagcagaactgcaagaacagttcaacggttctactggcaacccgtggaacgaaatgggcttccgtatcgataagcaggttatcgaagcacgtagccgccaactgaaagcacagtactctgtagaactggctcaggatctccgcgctgttcacggtatggacgctgacgccgaactgtctgctattctggcaaccgaaatcatgctggaaatcaaccgcgaaatcgttgacatgatcaactataccgcacaggttggtaaaactggtttcactcagaccgttggctctaaagctggtgcgtttgacttccaggatccgattgatgttcgtggcgctcgttgggctggtgaaagctacaaagctctgctgattcagatcgacaaagaagcaaacgaaatcgcacgtcaaactggtcgtggtgctggtaacttcatcatcgcttcccgtaacgtggtttccgctctggctcgtatcgatagcggtatcactccggcaggtcaaggtctccagaagactctgaacgttgacaccactaaagcagtattcgctggtgttctgggtggcgtgtacaaagtatacatcgaccagtatgcacgtggtgattacttcaccgtgggttacaaaggcgataacgaaatggatgctggtatctactacgctccgtatgttgcgctgaccccgctgcgtggttctgatccgaagaacttccagccagtaatgggcttcaaaactcgttacggtgtaggtatcaacccgtttgcgaactctcgctctcaggctccgtccgaccgtatcacttctggtatgattaccaaagaaatgttcggtaaaaacgcatacttccgccgcgtgtatgtgaaaggactttgatcctaagttattgaaaaataacgatattaaagggaaccttcgggttccctttttcatttctataaatagtgaaaacgattgaggctatattatgaaacatattatctacaaaataacaaatttggtcaataataaaatttacgttggtgctcattcaacagaagacatcaatgattcatacatgggttcagggattgcggttaaaaaagcacaaaagaaatatggaatgaataactttgtaaaagaaatattacatgttttcgatacccgtgaagaaatgtatgaaaaagaaagagagatcgtcaatctcgaattcataaatcgtccagatacgtataatgctggcataggtggtaaaggtgctcctatgtcattgattggttggtctgacgaacaaaggaaaaagatttctgaaaatactgcaaaggctatgcgaacaccagaactaagggagaagatgagacaatcccgtttaggtaaaccacagtccgaagaatccaacaggaagcgctcagagacgttaaaagctaaatatatgaatggacgtatagacagagagtataaacctctcacagaagcacacaaggcgaaattaggccgttctgtatcgatagatggagttgtatactcatccggatcggaggcggcaaaatcccttagtatgtcccactctggtttaaaatatcggattaatagcgacaaataccctacctggaaatttgttgcataaataccattatacactttacgcaggaacataaaatgagtgaaaaattttacacaattaacaagctggtgcgtcagtcacagctaccgcctggcctgtctaaaaaggttcttgatgaggcaaccggaacagaaacaattaacgtagctaatacccgtccggatctggtatctcttacccgtgcggtaaacaacctgatctacggtgaacttgtagcgattcaggaaactaatttgcctaccgcaaccctgttcggtgtgcgttatcgtaaccctaaaggcaatatgacgttttccagcgctgctacctattccggtaagtatgcaagccgtgatactattccagatggtgcggttggtactgcctataccaaaggccaagtttttaaacacccgacaagcgatgtcgtatacgaagcaactgatagcgtaactctcgcaggtgctgatattgatgaagcaattatggtcgcagtattcagcaataaattacgcctggcaagcgaagccgcgccaacaagtcagtatgaaaccagcgaagatattagcacaacttctttcgaaatggatcgttggaatatcaacgttcgttcccgtaaattcaaaactgaaatgaccgtggaacttatgcaggatctggaagcaaaccaattcaacgcagaaaatgtgattgaagatgttctgggtactgttgccagcgaagaagtaaacaaagatatcatccagactctgatcaacgtatcacatcgttacaacgttgatggtgtggtaacaaatggcattttcgatgctacaaccgcatacactgcaaaggatgctccggctttaggtcgtttcctgtatcaattagtgtgtgaaatggggcaggaaatgaatagaacgacttcatttgaagctacctatgtcctggcctcttctcgcgttgtaggcgttctggctgcgtctggttggatgcatgaaaccgatgaaacccacccgttagcgacagggcgacttaaaaacggttattatgtctatactgacaccaatacaccgtttgattacctgttgactggttgcaagtacgatctgggtgaaatggatcatgttggctctctgttctatacgccatacacagaagctgatcaggcaggttcgatcaagatttctgttgatcctcaatccttacagcctaaagttgctattctgatgcgctacggtttatcggttaacccatataccactgctgcaaacgaaagacttgtgaaaggtgatgactgggtaaacctctcaggtaaatctaagatgagtcagattgtgggtatcaaacttcctaaactgggttgatagtataacccaacggggataatattcaataggtggagtagggaaacttactccatcttttaataattattataattaatattaaattagatcttgaatttataaatgatttatgataaaatttattaattataattattatagatcaaataatttttgaaatcaagtaaaaataaatttgattttataaattagatcatgtataattattcttttaataatatattatattagatcaatttaaatttgactactaattaatatagtatattatagatcaactgggtaaattggtgagtatgttatgagtttgaaattagaagatctacaaaatgaacttgaaaaggatatgctgatagatcccctcaagttgcaatcagaatcagcggatatccctaagatttgggctaaatggcttcgttaccattcaaacgcgaagaaaaaactgatccaacttcatgctaaaaaagaagctgatgtgaaggatcgtatgttgtactacaccggaagacatgacaaagaaatgtgcgaagtggtgtatactgggactactgaaatcaaaatcgcgatcgctggggatccgaagattgtagaaaccaacaaactgatccagtattatgacatggtggtagatttcaccagtaaagcactggatatcgtcaaaaacaaaggatactctatcaaaaacatgttggagatccgtaaattagaaagtggtgcataatgtctactgaaaatgaaaaatgtgtagtgtgcaagtgtcctgttccttctactggttatgtgactgaatccgggcgcgtgtgtagcactatctgtgctgactacatcgcagaaaaaacaaaaagcggcgagatcaacgaatccgatgatctgaatgaagttcaaatgttgctgtaggagaatcttatgattggatacggtgaaggaattacagatcgtgatgaacgtccggatctgttagaatctgacgaacatcctgatttttaggataggtaaaactatgccataggcatgacaaaccgattatgcgtaatgaatgaggcttgtacggggttctttgcctggatctcatagttccccattacggaggcaaaacgggcgatggaggcaacaaaatcgcgtcctaaatacatgtgtacccgaaaggggcttgataaaagaatgctggatgataggcgtactcttttgcgccgtccgatggagtttaccttcggcggggtgattgataatataccttcgatcaagggcatgtgaatagaatagccagaatagtacagcactggcgttaagcaaatgtacaaaagccccttcctttcggttggggcttctttttagaacttttcttcttctccgctttcgagttcggcctttaattcttcggctcgacctttcagcgcatcgcgcatagaaatatcgtctgacggcgcaacatcaacttcttttacacgatttttgtaatatttttcaagctctttaaggccgtccatagtacggcaagaggcgaccttgctcatgaaatcatcaatagccgcctcataaagtcgaaaatcgttgaaactcttcattttgacctctaaatttcgatttgtttgatcacgtagtcaaacttttcttcattgtaaatgcgtactcgttcgattgcgtgtttcataccatagtttttgtatgaatatttatttttagcatttttggactttgccagcgttgctaagttatcaaccaaatcccaaacagtagcaagagatttagaatcatgtttacgcagtacgcgcccaattgactgtttgactataacagcagatttgcacggatgcccgaagatgatgtgatgaaggttcttaacagaaatacctgtactcagtacgccaatagaaccgattacgatcaaccccttcgttgactccgcgatccgtttcatttcgtttcgctcatcaatccccgtttccccagaaatgtatacaacgttgtcatatacctttttgagttgctcatacagccatttaccatgtttgatctgattgaacatcacaaacacgttttcatctttttcccttgccagtttcaacgccagcttacatatccatgcgttacgcctggtatgcgatgttatatacttgatttcgctttggtaatcggcccccttcattttcttaatctcatcctctttgtatctcatgaagatggtattaattcgaaggttggtaacttgaccttcctgcatcaaccgatttgtatcaactggcttgaagatttgaccaaaagcgccaatgtattgcatcatgtttgctttgccttctttcagagaaccagaaaggccaaacttgaaaatacactgatccattgtattgatgatcttctgtatgctttgtcctgttgatttgtggcattcgtccaccatcaaacacatgaactgttgaaaccactcaggaggcattttaacagccgattgccacgtagacacgtagatcaatgcattactgtttttagcagttcctgaacgtattccaagcattgcctcgcgaggtaaaaggcgatagttgacaatatcaccgatcatctgatcaacaagggcggttgttgggacaatgattagtactttgcctgtgtaattttccagacaccaacgagatatcaacccctgaataagagatttacccgctgacgttgggaggttaagcacagcacggcggtttttaatcgcatggaacaccgattgtttttgataccaatacggatcaatctgcttgtttccgtcgtatactgggtgttcttctaaccacttgtcaaaatctggctgggtaatttcttctgtttcgtggatcttaggatccatccagatagaatacccgcgagactccgcgaattttgttacaagataggctaaaccgtagggcagtttcccgttatagtccatcaagtatatgtagccgttccatccaccatatttgtattttgcctggtactgataacctggcggctggaagctgaaatagtcgcgcaattcatagactatgttagcctctgcctgaatctgcacatgactagtgttaaggaatttgacttcgatatccactatgtgtatcctatatacggtttatatgaatatttataggctaaataatgataaacattggagaactacaatgagtattgattacgaaaaggttgaaggtttcaaagccttagaacaaaaagaagccaaattacagcttgctacctacgcgcaagaaacgtttgatgtcaaactgaaccgtcagaagtcattcgaaaatatgcttgctgatctggaagctgccgtaccggaagaaaaaccggaactgttgatcgactcccctgatccggaaattgttacatacgaaggtgaaccatctgttcctgatgttgctccggaaattgccgaccagattgaaattgttcccgacgctctacaagctcctacaagcgattctgagacggtttctgatgaactggcatggatggaagggtttaccccgtctatcatcatgatgggccgctctgtttcgaatactggcttttatacgtgtccgtattggatctatgattggatgaaacaaaatccggattggtacaagcaccctgacagttgtcctcattattcagcgcgtcaaaccctcaagtcgctggcatggtacatgcatcgtgatgggatggttactgtaagggaaacccgaaacagccagttctacacgttcaaaaaataattttaaaaagtagttgaccttgccctgctattcgagtatatttgtattcgaaggcgggggaatggctctcgcagtgaagaaggaaatacaaaatgaacatgatgaaaaatgcttactacccagttctgtttgtttgggctaacggtgaagttaagaaaatcgtcaattctaaagctccttattacactgttggtgaagcacttcgccacgctgcggaagcgaattatcctgttcatgccgaacctggttatgctcgttggaacggttctaaatgggttgctgatacctgggacaactacgaagaagaaagaatggagtgtgatcctgattacgtatctcgtcagatggaagctcatatgattgcagatcgtagactggataatgaagctcgcggattctattgattaacaaggggctacggccccttttcttttaggtgaaatatgaacttaaatcacgaatgtttaaaagatttgagcgacggtaacgagattggtaacgttatttttcttgatatcgatggcgttctaaataatatgcggtgcatgaaatttggtgaacatatggacatcgaatgcgcacgacacttacgccggatagtgaatcacgctaattgtgatatcgtcatttcctctacgtggagaatcggcaacagtacccataatctacgtgaaatattttatccgtggggattgtatcggatcattggtaaaacttgcactaacttccctcatagcactggaatgcgtggtgatgaaatcaaggcatggatcgatactttcggatgtaaaaactatctcattcttgatgatgataccgatatgctttcttcacaaaaagatcattttattaaaactgatgggttcgttgggttgaccgaggaacaatccacttatgcgatccgtaacattttcggggttactactccgttttgtcctgaatgtaatgggtatgggcgtgttaacagctacgataaatgcggaacgtgtaacggtaaaatactccggctataaataccaataaacataagaggttaaatttatggcaattccttctgtaacaattagcgccaacaaaaacgaacttttgattggcgaaactttgaccttagaggttgaaaatactgaactagatccgggtgatgtgtttctggcctaccgttggcaaaaagatggtgtagatattccaggcgcaaccgccgatacttacacaactacggttgacggtacaactgctggcgattataccctgatcttaaaacacggtgctgatgaagaatcagcaacagaaaccacgtctgatacaatcaccgtgaccacttatcctgtaatcgcatttggtactgatttacctgcaacaaaatctgttgtcactggtaaagaacttaccctgactgttgcggtaactggcggtaaagccccgtatacctacgtatggaaacgcggttctactgttgttagtggtgattctgcaaccttaacaattagcgctgctgcaagtggtgatgctggttcatatacggtagaagtgacggattcactgggtaacagaaaaacttctggtgcttgtgctgttagcgttacacctgctcttgcgtttgataaaaatctaagcccgaccgcttccgtaacacaggattctgcattgatccttagtgtaactgtattgggtggtacttctccttattcttatgcatggactaaggatgattctccggttggagacgatgcggatactcttacagtggcaagtgcggctctggatgatgcaggttcgtataaagttgtagtcactgatgcgaattcagataccatcacatcaactgtatgtgtcgtaactgttaatcaaaattatgatgatctcgtttctaaatggacggttcacccgattccgtggcgtgataccagctttaccccgatcggttattgggtacttgatgaaattctgtatcaaaaagcacagggtaaagattggaaaactgattatgctgattacaagtatagtgaggaagtacaaacgatcctgaaagcgttcatggaaaacggtgaatgtgagatccaggattcacgaaacggctatattcataaaatgagtgaaatctaagaggctttaaatggcaactgaaaaatggactacggttcatcctattccgtggagaaataccagttttacatatcttccatactggctatacgatattatcgttgatgcttttgagaaaggcgacgactggcgcgattatgcggaagaaaaatataaattagagtttgatactctgaaagaggcgtttgaagattatggtgatattcatgtaatcgaatctcgtaatggtaaactggttagtctgttgtcattgactcctgctcctgaaccagatcctgaccaataaaataaggcaaacaatgaatacacttctttttgatttcgacgacactttagcagaattttctcaggctttttatgataagttcggtgtacgtccggaaggaacgccaaaagaacgatatgacgaaatggcggcttctttggtgcgtactgatttttataaaaaccttccccgtattcaggctgggattgacctccttcaatggagtttccaacgccgaatcggtgatcctgctactttgctgcttcgcgcggaagcggtcagccctctttgggttatgaaagaaaaactgaactatacagataagatttgcgctgaactgggggtctctcgtctcgattttagtcgcattgactatccggaacagttcgcagaacatgcctatcgtggtgttctgatttcccgcaaccagaaacatcttgaaatctggaacaattctcatctagctaataaagttcctggtattttccttgcggaaaccctggaagaaaatattcagctagtcacggaagcgcttgcaaaggctaatcaataacaaaaaagggaaccgcaatggttccctttcttttacaatctttttaattcatcaagcgctgttttcttatcaccaacaaagaggattgctttacctcctgcttttctgaaaggcaacaccgcttttgcccgatcgtcaaacaggattcctttaccagcgaatgctgctttttcatggctacttttaacgtagtggaattccggaacgtaacccaatactttttgtaatgctttacgtttttgttcggcaacaccgtcagaattgaatttaccgacactggttagtattgctacatcaccaagtgttcttaaatgatggaataattcaaatccttctttgattggttccagattttcgtagaaatcagttttggcaatttttgctttgcactttttcaactcatcttctgtcatcatcgagggttcgccatacattggcacaaatgaaccttcccagtcgaacaatacaccatccatatcaaagaaaaacttattcatatcaattcctcagtttgtgtatgcatactataatgtttaatcattaatgtcaaccccaagtgtcagttttcggtgcgtatgctgcaactttagccacaatttccttatccagttcagctacagatttctgaggcttaccacgggctttaactttgatgtagtttgacttaacaacaaacatccctttgttacctgatttcttgatctcgctatcaacaccaactttgttaaagctgatccaaatgtcgccgtccatatactgtttaagagaatcacccatgttcaggatcttcgccatagtaagggccgcgccttcgtgggtatccatgagaatttctttaggaactacacgatcgcgtttctggttctgctgcatagcaatatgcacatcgttcataacccatacgatatgtacgttttcttttttgtatcccagcgtttcgacatcacgcgcgatgcttgccagcttgctcatgccttttaacgttacgtcaaagatgaggttaggtttacgatcttctggtgctgccataataccggaataaacacggttttggtttttgttggaaatgttgaaaacgtcggcgatcacatgatggagggtagatacgttttctgggtttttgaggttcattgttttgacatcatgacccgtttgtttcttgatctctgctgcgagtttatcgctacccattacaagttttttcagggcgtcaacgtccagggtaataccttcgatgcctagcagtttttccagtgtgaatcctttaccggaaccagcaccgccagcaagaataacaacctgaccgaacttaggataagcacggcctccgaaggtgatcagcgcttcggttaaggtgctttctgtgaattgtttaaatgacttcatgtaaaattctccagtttattttctattatttattgacatgatttctgacagtggtgtatggttatggtgttcgacggataggccggaagaactttaaaccataaggtatacgatatgaaaatcaatttacatcgcttcattgcagaattttcccgcgaccgcgacatggactcttacaactattactcccgtgaaattgaagatcgttttgcggctcatgttgggttccgtcgccaccatactcctaaaatgcgccctgaccacgatccgaagtatagccctatcacatggcaagccccgatcaatggttacgttgaagggatccggatcatgacttttaacgcgatgtatggaaacgctttgatccatattgcgcgtgagaaaaaggcagaattccctaacggctggcgtattgatgaagtgattcaaacccttatgcagttacgacgtgaatacaaagctggtatgtgtctgcgtaatgaacagtatccgatgtataaaacgtatgcctatatctctaagcatctaattaattccatgttttacatcgttggtaatcatggttccgctatagatatcggttcttatgaaatcgtggcttatgctcgcgaacaaggaaaggccgctgcactgaaaatcattgaatctggtgctatcattcttaaccatcgcattgatactattgcttactatggcgatcaggttgaggttgaaggcgtacaccatgaacgattcaacaaagccgtatttgctaaaaatggttatgcttatggtaatgacattataacttctgctattcctttcgttcgtctaactgttgaaggatttggagaaaggttgccttataaactgtcagaagctcaaatgtgtgcggctgctgaaagaatcgccaaaaagcggaaaatgtataccgatgaatacctggcgtatgtcaacaaaacaaaagaagatgtagatcgagaaatttcttgcatggatttgtgcctttgatataatgtaagcatcttttaaagggaggatgcatgaaaacgatacattgcagaaatgaaaacgttgtttactatcacggttcgtgtactgctgctggtattgaaagcatgttattgcctccctgtgattctgatactctgtctgaaaaagacaggaagaaaaatttagaccgtgttttctttaccgctgatatcgggttagctcgtatatacgctggaagggccgcgcgttctataggtggggatcctgttctgtacagggttgtgtgtccggttgatgttgtatgcatgaacgaagacaaaggcgcgagcgtttaccatgcagcatgggcgttttgtgaggaattatgaatgataaagtgttggcgtatctcgttttcttgctgggatatcgcttagaagtgatgggcgcgtattcatcaatgtatggtgatttaacggctatctggatggttgggttaggggttgcttttacattcctttcctttgcaattgttaatgaatcggaaaaggatattgtatgaaactatatcatgtgatctactctggtgttttaggcattgacaaacaaatgttagttgatgtaatgtgtaaaaaactcgatgagcgaattggaacccgatacaaaaatcatgtatcggaaagtatcttcatcaacgttgaccatccaaatgacatggaagaaatggttaatactcttgatgatcagcagatcccgtttgttgacaatttcaacatgagcgctggagtgtatacggtagtaacttttgttctaaaaaatgttgacagccgaaacgatagcgtgttgaatgtagttgcaaaaatcgattctaccaaaggaaaataatatgaaaattgtacaccgtagcatttccgaactgtctcaagctgaaaaagtgcaaattcatttcaaattcaatgatttgcgtaaaggttatgccgaaattgcccgtgaacatgggttagataacggcgatatttaccaggtagtacaggaaattgaacgtatccgcgcgttccgttctgcaaatctccctgttaaaaatgcaatgcgccgcgaagcgatcgaaatccatcgtaagcgtgtgtacaatttagaacgtgctaaacgtccgatgaagaaagaaaagaaacctcgcccgtttaaacgcgaacatcttaacacctctatggcgctggcgtttcaagatgcggggattatctaatgcgtaaatctgcgatggatcgttgggctagtattgctacttcaaacgtaaaaccaaaccaagccgcacctgatgtagaagcggttcgtaaagcaaaagaacctgagattgtggcccttagccccgaactcattgagcatcgccgccgtgcgtctgctattgaactggatctgcgtattgcgcgttcatataatctcaagcatgaacacgccgcaaagaacaaccattcttttgaccttactctggaagattggaaagtattgatgacaactgaacgttgtcagtattccggcaagatgtttagcaataaaccaggtagcccgtatgcccgtacaatggaacgtattaatccacgtctgggatatacacaagaaaatacaatagcggttatcaatgccgctaatgcagaaaaatcacagcttgatgcattcgttaagggtgatgtcattctggatgaagtaaaagtgaagttgctgcgtaaagcactttatcaagtcgaaaaacgtgtgaaaatgaaaggttaaattatgtttaagaaatattcttctctgactaaccattatgaaggtaagttcatcaatggtgtaattatgaacgggcttactggcggtgtgtgggttgcgcgtgaaaagatccacggtgctaactttagttttatcaccgatgacggcgttaccgttacccccgcaaagcgtactgatgttgtgaagccagccgaagatttttatggctgttcagcagtagttgcaaagtattcaccagggatccgtaagatgtgggaaaccctcaaaaagaccggaacgtatgatgatttggttattcaagtctacggtgaatttgcggggcgcggtgtacagaaagatgttgattacggcgaaaaagatttctacgtattcgatatccgtgtaaatggtgaattccttccggataacctgtgctcgctgatctctcgatctcatggcctgaaaatggccccgctgttgggatacggtacttttgaagagatcaaagaactgccgatcacgtttgaatctgttgtgaataaagcaaatagcggcattggtagcgataacacagtatatggcgaattcgtatatcctatcatggacgttgaagagggcaacattgcagaaggttttgtaatgaaacctgtttcacctgcttttatgccaaacggtgaacgcgttgcaatcaaatgcaaaacaaccaaattcactgagaagaaagcgaagaaagcaacccgctttaatgctccgatttcattgtcagaaaaagacaaaaaccaactcgatgagtttgtttgttaccttacagagaaccgtgtgaaaaacgttctttcgaaactggatctggcttcgatcactgcgaaagatttcggtcgcattatgggcttaactgttcaggatgctatcgaagaaatcagccgtaatcatgggcctttcctcgaacagttcgaagacccagcaatggctaaaaagctgtttgtaaccgaagcccaaaacatgattcgccctgtatggggcaaaatcctgaatcatgaattttaatcagattctggttgatgcaaaagcggctaccctgattggtagccgtaaacctcctgaacgtatcgcaaacattgctgttaaaatcggacgtgctttgaacgaacgcgggatcagggcttattctggcggcgctcctggtatggatagtcactttctgtttgactatagtccggataacaggtgtataatccttcctgagaacgggtttaacggccttttttcaaacggaaaggatatcatcgactttcaagatttaaacacacagaaagccgctgacgaagccagaaaggtagcaggtaacttcgatacacagaatgaatacgttcaaagaaggtatgcacgaaacacgattcaagttcttcgtgaaaatcttgacaatccaactgattttgttttattttgggcggaagaacgtgaaggatgtgttaaaggtggaaccgcgatcgctgtaagattggctaggttgtacagggttccatgtttcaatctcttcaaagaaagtgtattgaacgatgtgtgtgatacgttagggatcaatatcaaacccccaacgttggattttttatggtaattgaacatgcgcccttacttcgtgaaacatacgaaagatgggctgttaataacgcaataggtgaaaatatgattcatgtacgtagtatcggtactgacggcgaaactccggtagaaggccgatcacccactctcgcagaacgagcaagagaaattatcaacgatcagaatactaagatgatcgaacatgcgcgggatacaatcacaaaaggtgttctgaaacacgcgacaaaacaaaaccttatctatgatatgaagcacgatatcggctcttgtctgggtattgaatgtactcgctatgcattccaacgagtttctgaatggttggaagaagaagggctaaaattcgatacagaagaaaaacgcaacgccgctaagatcacaaattctctggctagtaagtacaatcaaacgtatcgaaaccatgaagaacgcgaagtgttcggtttcaacattcctgaaaggaaaacagatcgccgtgtaagtgaattcactttttacattagttggtaaaaaggtgttgacgggggttggttatagtagtattctaactcccgtagacaagacactaactcagaaggataaacatcatggaaatcgtaatgaaagcaacttatgctggatactgcctggaagtaaaaggtgttgctaacaacggcaaaggcttacgggccaatgttgaagcaatgctggatgaattacatgcaatgtacgaatacgacaacgtagcgggtagcgttcttatccaggcgttggaagttgatggtgttgattgtgctggttggtgggatgcttacattgactacaacgataaccgggtttacctgttgagcaacaaagattatttctaaggaaccactatgagcgatgaagctgaggatttagaagattgggctgattttgatgacgaagaagacggtgaatatttctgcgttaatcgtggtgcttataaagaccgtttagaactccgtaaacttttatcgggttcctctcaaatatcaggatccaaacgaaaaagtagtaaacaaaaagttcagtatagtgatggttctgtacgtgatgaaactgttgttgctgaattccgtggtcgggttatcacaaaagaaagacaaattgatgtaaagaacttgtatgaagtggctaaggctgctaaaataggttctgtgattgtttgccctgtgtgcaaagaaaaacacacaaagacaacgtatcacaaagttttctgttcgaatggcagaaaaaccagtaaggattgtaagtctaaatatcacaatacaatccatcccgaacgactggatcgggtattttaaaataaacctaaaacgtggagtacgtttatgaacaacaaaactttcgaagaactgaacagcatcatcacttccgtagattcctataaggtttctcactggtcgcaatatccaactggctccgaagaggcgctgttttatattgaatctcgtggtggtaaatttgatcaagtagttacggctggctgtaaccgccttgcgcaaatcctatcacgtccggtgactatggaaaacgtagattttgctaatcggttgtacaaaatgcactttgggcgcgaaatcttcaactacaaaggttggaaagaaattgcagaactgggttacatccctcttgaattcagagcgattccggaaggaaccccagtagcggttaaaaatccggttgcaactttccatgctgggaaaaatgcgctgtggttagcaggacacgtagaaaccctggcgatcaggggagtatggttcccttcaaccgtagcaactctatcccgcgaatgtaaaaaagtgttgaagaaatatctcaagaaaacctcagatctcgaaggtgaagcatttgatatggtattacgtacccgtttgcatgacttcggcgcacgtggaacctcttctgctgaatctgctggtattggtggccttgctcatctgtataacttcctcggtactgataccgtagaagcgctgattatggctatctctctgtttgaagattgtcagaaagcgtttgatgatggtgaaatggcggctggtatttcaattcctgctcgcgaacattccactaccgtttcttacggcaaagaaaacgaagaccttgcatacaaaaacagtattgagatcttcggtgaagggatgtatgcatgtgtgtatgattcctgggattttaaagcggcggttcgccgtatcgcagaatataaagattctattctttctaagggcggtactctggtagttcgtccggattctggcgatatggtagacaatatcatgtacgctcttgaagaactgggccgtatctttggctatacagtgaactcaaaagggtataaagtactacacccagcagtaaggatcattcaaggcgatgaaattcatggccctgaaacaatcaatcgggtgttgaactggatggagtctaaccgttgggcgtctgaaaacatcgcgtttggtatgggcggcggattgcttcaagaagttacccgcgacactcaaaaatatgcgatgaaaatgtgcgcaatcaaaattaacggtgtgtggactggtgtgtataaatgtccaaaaggcgctgaatggaaaaagagtaaaaaagggttgttgatgactatcactgatggtgttaactttaaaaccattgatactctggaacagaaagtgccggaaggctggaaagatgctatgatcacatactatgtcaacggaaagattactgcccgtgacactttagaggaaattaggaaccgtgccgggatttagtatccgcaaaaacgacaaaggaaccgtgattttctatgacaacatgccccttgtagctcgcaaggggctttttgctaaaatcgctgggtattcctttaaactggaagaagtcaacgacgaaacactaaaagagatcgtaagaattgccttacaattaagaggtaagaaagacgaacaaagagctattgacatgatcaataaattgggtgaaactcaatgcttcatagtgaatcgtggttacaagtacgataccattgcaaaatttgaaaaagggctttgtgaattatgagttattatggtgtgatcccatacacaggaaacaagcaaaagctacttcctgaactgttcaaattatttccagacagaaacagctatatgcgattcatcgactgtttttgtggtggtttgagtgtgtccctaaacgtccctaaacccgttctaagcaacgattacgatcggacgttgattgatatgtataagcgccttcaaatgcttcctgacctctctccggtgcgagaattgattaaacagtatggtctgggtaagaacgagaaagaagcgtatctcacatttcgtgatgcatataataagaacaaggatccgctatggctctatgttctgatcctgcattcgtttagtaatgttaatcgaaccaacgataaaggcgattttaacgccaattttggttgtagaacgttgaatgattctaccgttaaacggtttgaacacttcaaaaataatgttcggggaattgaattctctagcgcatcgtttaaggatcttgatatctgcttaaatgattttgtgtactgcgatccgccgtacctgatcactgatgcagtttataacaagttctggaacgaagaacgcgagcatgaattatatgattttctcgataatttaaactctgatggtatcaagtttggtttatcaaacgttacacatcatgcaggaaagcaaaatgatatcctgatcgagtggatgcaaaaatataatgtgcataacctcgataaaaagtatctgttaggccagcatactgattcttacgaacaaaataaaacgcaagaagtctacgtgtgcaactatcagaaacgcgacgtaaatacataccctgaaacactggatgacttaatgtaaggtaacatatgtttaagatttttggttatatcccttctgtttacaattgcgctccatgcctgaattctaaacgtctcctggacgcaaaacgaaaagaatatgagtttgtttctgtagccgatgaaaaagacgcagacggcaaaccgatcctgaatgaaacggtcatttctgaactcgaaagcctgttaggtactcgtagactgaccatgcctcaaattttccacgatggtaagcacatcggcggctttgaccaactgcgtgagtacgttcgcacgttgggataaatattaacacctttatttgattggtgttattatgctcactaaacgtattactaagaaagattatccatccattaaacaagctctttttgaacagcaaaacggcttgtgcgcgttatgtggtcgccctttagagggtgaccttgaaaaacatcaccttgaccatgatcatgctctatctggctctaatgccggacgtgtgcgcggcctcctatgtaacctatgcaacggtacagaaggtattgtaaagcacaaatttaatcgttctggtctggtttcccgtgatgttgattacattgaatggctagaaagcctggtagcatacctcaaacgcgactattcacaaaaccgtatgcacgacaaatttatacccgataaggttaaatggtttacacgccttactaaatcggatatgatagccgaaatgatttctatgggctttgagtactcagaaactgaggatcgcaaggctttagcaaagagctatagaagacaattaatgaaggcaaccaaatgaaagtagaaaaacgcgacggaacaatcgtcgatttcgataaagaaaaaattcgtaatgctgtgtataaagctggcggtacgatgacggatgaagacagtgcgattatgcttgtgttgcgtagtcagatccgcaacggtaaagcaatgaagatttcacaaattcaagaacttgttgaagaatctttaatgaagacaaatccgactgttgcccgtgcatatatcgaatatcgtcatgatcgtgatatcgcccgtgaacaaaacggaaaattattccgtgatatcaagggtttgatgactcttagtaacaaagaattaaccaacgaaaacgcaaacaaagattctcgcgtattcccgactaaacgcgatcttctggctggtatcgtttctaaacatatggcgcgtaaccatattctaccgaaacatattgttgcggcgcatgattccggtgatattcattatcacgatctggattacagcccgttcaccccatacactaactgctgtcttgttgacctgaaaggcatgttagaaaacgggttccgtatgggtaacgctgatatcgaacctcctaaatcaatcggtgttgctactgctcttatggctcagatcaccgcacagattgcttctcaccagtacggcgggacaacctttgcaaatgtagatcaggtgctggccccttacgttgaaatgacgtacaacaaacactttaaagatgctgtttggtacggggttcctaaatcaaaacagtatgcgatggaaaaaacggaaaaggatgtattcgatgcgttccagtcatacgaatatgaagtaaacaccttacatactgcaaatggacagacgccttttgtcacgatcactttcggtatgggtactggttggcgcgaacgcatgatccagaaagcaattctgaaaaaccgtattcgtggactgggtaaaaaaggcattactcctgtattcccaaaactggttatgtttatggaaaaagggattaaccttaatccggaagacagaaactatgatattaagaaattggccctggaatgttcttcaaagcgtatgtatccggatattattagcgcggctaataaccgtcgtattactggctctagcattcctgtatctcctatgggttgtcgtagtttccttagtgtgtggcatgatgagcacggtaatgaaattcttgatggacgtaataacctgggcgttgtgacgatcaaccttcctcgtattgcgattgaagccgaagcacaggaagatgaagacgcgcatgatgcattttggcgtatccttgatgaacgtctggaactgtgttttgaagccctgatgactcgtattgatagtctcagaggtgttaaagccagtgtagccccgatcctttatacagaaggtgcgtttggtgtacggttgaaacccgatgatgaaattctggaactgttcaaaaatgggcgtagttctatcagtctgggatacatcggattgcatgaaactctgatgcttttcggatctggacagcacccattcgaccggatcggttctcagaacatgggtagactgattctggaatatctacgcgctgcgaccgaagcatggaaaaagaaaaccggatttgggtttagtctgtattcaacccctgctgaatctctatgtcatcgtttctgcaaactagactatgagaaattcggaagtatcaaagggatcacagataaaggctggtacactaacagttttcatctggacgttgaccgcaaggtaacaccgttcgagaaaatcgactatgaagccgattatcattacattgcaactgctggacatatcagctatgtagaattccctgatatgaaaaacaacctggaagcccttgaaaaagtctgggattatgcaatggataaactggactacttcggaactaaccttccggtcgataaatgctttgaatgtggctctgatgatgaatttaagccaacagaagacggttttcattgtacccattgtgggaatcaggatccggaaaaaatgagcgtcacgcgccgtacatgcggctatttgggtgctcccgctgtccgtgggttcaacgaaggtaagaacaaagaaatgatgcatcgcactaagcatcaaaattaatcaaaaagcccttgacttcggttgagggcttttgttatattgggcctatcgaaaaaggagacagattatgaaactgactaagaaaatgaccgatgtagtagcatgtgcgtttgcattaggctacaaagttgaaaatcatccaactcgcgttgaagtcatcaaccctatcaagggccgtcctggtttggttctgtgtgaagacggcacagcatatcgtaatgatgtctctttagaactggcaactactatccgcaccgcaaaacaaatgaaagatgttctcattagcggcgcaaaattgagggctttatgatgtattggacaaaagataaatttgtttttcgtgatgatacgtgctttgggactgcataccgaaacttggctattcgtggcggttcgttttcggctaatgatttgtctaaggtagtatttcctattaaagttactgagtatgacgtattcggtgttaaaggatttactgattactttggtacaaagtttgaatcagaatcctacatttttactaatagcgatcgtgaattgttcaaaaaacacgttgttgttaaagaaaaaccgctattaccaaaagaagatgaagcaaaggaaatctatgatctcctgaacatgcttgacaatctcggtacttgtcatctgttcggtaaacgcgcccgtaaagcgaaagatgttctcaacttgttgcgctctcgccggaattacctgatccgggaagctgaacgcaatctgaaaaattcagaaaaacaggctgaaatccataaatccacccttgctaaattaaaggctttgtgatgtttccgttatacgctaaagtgcgtcgaaatgtcgggaattcatatcaggaatggagtgaatggctacgtgaaacaaagtcattctacatttcaaaagcaactgatatgaaaggccgtaacattcgctatcgtaaacccagtggtaaacgagtgaatgggatagattacattgttcttgattcgattcgggatgatatacgataatttaactttgaggcaatattatgattttcaacaaaacaaattcacgtaatttgaactatctacgctgtgaactggaagctaacgaaattgaactgtttttctgtggggctacagatccggaacacaaattgcattgggtatcaggtgagattgtaagcctaaccgaccagattgttgaagaggctacccgtcgcgatgcaatagttaaaattggtgctgttgatgtgaactacgaaggacatccttcatttttcattcaatattatccataaaagtattgacctgtatatctgaatgtagtaacatccttcttgtcaactaaggaggatgttatgaaaatcaaaaacactgctactgaaactctttgcaacgaaattgcagaaatgtactggagtaaaggtcacttagaggctatgaaagagtttcaaaagtggtgtgatacccaaaagttagctaaatgggaatacatcgttattgttgaacggatcaaagaactgatcctcgtgaagaaaggtaacatgaaatgattcaactgaaattagacacaaatgcggtgttaagcctgtttccggaaggttcaaccgcccgcgtagatctccaatctgctatcatcaaaaacgtggtgaatagcgtagttggtaagcgtgttagcgaagaaatcaacaaacggatccaggaacagttagctgttctaatgccgaactcatccgaaattacacagatcatcaaatctgaattctcggattacgtcgaaaaacgttatgggtattccaatgtttttgatgtcaactatggcaatgttcgcgaactgtctggtaaaatcaaagaatcggtaaaacagcaatgccaaaccattcttaaagatatcgagaaagaggcgattgctcatgcaacagaaaacattattgcagacgaagccgcgtttatcgctcgcgtctcgaataacctggaagttactgtacgcaaagcagtaatgcaacgggttaacactcagttcccagacattattgacgaagcgatcagagaacgtctgtttggtgaaaaagcatgaattacgaccgcatctataatatggatgtggtcaacggaaaagggatccgtgttgttttgtttgtgactggatgcaatcataaatgcgaaggttgttataacaaatcgacgtggaatccttgcaacggaacaccgtacacggaagagacagaaaaccatctgatttctctgttgagtaatccgcatgttgatggacttacattaactggcggcgatccgctttaccgtgacaactatcctactatcctaaaactgcttgagcgcgtttctaaggaacttccaaagaaaaacgtatggttatggacaggatataccctggaggctttacaggccgacccagaacgttctaagctacttccttacattgatgttctgattgatggtaagtatgaaaaagatttaccaactaaaaagccgtttcgcggttcagataatcaacgtatgatcgaattcgctaaaaaatcgatagaaattaaaaatatttcttgacctaatgtgtaactatggtaatcttaccacatcgtaaatgacgattaactttaattgagagataatatcatgatcctgaatttcaaaacccgtaaagaagcgcgtaactactgctggaagtggaacattcccctgaaaaccatccgtaatacagggcgcggttcttgtccgtggacagttcaagcaaatgaactgaaaacgttcgtggttggtaaaacttacaaactggttgaccgtgaagggtttactaccaattcacacggtggatctaacaccgcaaacactatccaggcgacacagatcgaaaaattcctgaataacgaggtaaaaattatctcgaaaatcaattcagatactttcaaaattgatcatactccggaaatgacttttagctctctgcgttcgtgggaagctcgttatttcgtcgaagttggcgcggctccagctaagaaaaagaaagccaaaccgaaaaaagccaacgttacggctccggttgcgcctgttgcaccagcaaccgcagatcttgatcaaatgcttgatggcggttcggcaatgtcggttgaactggatccgactaaatttgttgaaggccgttcgtatgttctggttaaaccgcagcaatttaaaaatcgttgtggcgctaaccacgggatcaaatcatataccgatgaacacagtaatggtgtatacaccgtttaccatacgacttcactcggtcaccatcaattgagcaaaacggtagaaaccattgattcccagaccggaaaagttggttactatctgcttgattctgaacgttcgttcttccgtgaactggcgaccggaactgttgatgaacctgttagcgtttccggtaatagcgctatcgctatcaacgtagacgaagcggctaagaaagaagaaatcgcaaaagcaatggcacagcttgaagaagcggttaaagcccatgacgacgcgcttcaaaatctgcgtactgcttccgacctggttcgcaaagctgctcgaaaagtagcagaagtaagcaagtaaattaaactgggtgctccggcacccttttttatgaggtgacacatggaattattagaaggtaaatcttataccctgaacatcgacgctaaagaatttgcagaaaaaacctggcgaaatgctttagctgaattgatcaaaaacaacggctatatcacaatcgatcgtattgcgattggggatactgaggacattgcttatgttctgcaagatgatttcgaatatgagatccctagccatatctggaaatacttcaaagcatatgatttgccggaagaagaaccgaagatcgctactaaagaagaagtcgccgctcctgttttaaatttcgtatcttccgatcctaaaatgtggatgactgtaaaacctgttcaacaagatatcaatgatctgcgatttgattatccttttgtcaagcggatcacttcgatttctgtactaccagcgccgacggattcacaggcacttgaatttgcattacagcatgttttcggtgataataagctgtacgcgattgacaaggaagctgctattgatgaacagaaaaaggaaatcatcaaccttctttctctgcatcaacaacttgaagcggtggaattgattgagcgtatgctttctgatacaaagaaagatatcattagcaaaatcactccggcacgaaggaaagtaattgatgaaaatcgagatttacggtattcccgaatcgcttcataaatgttatggttgtattgaagctcggaaattacttgatgagcatggattagaatacgaattttattctgttctaaagccagcaaataacagtgttgggtttgattacgatcggccccgcattgaagagttagcgaaacgtgttcgtagtcgaagcatggcatttacttaccctcggatctttgtagatggtaattttattggcggttatatgcaattgaaagagtatttgggtgaagcatgaataaagaatacattcgcaaagtagcaaacgctattcacgcaacaacgattgattttctggaagggtttgatcatattatccatcccgaaacgttggatagttgggaagccaaactgtttaaaagtatcaatgaacagtttccggaaaaggttaagcgctggtttatcagacaggaaatcgtagcaacgatccttaatgaacgtggtgttgaggcgttcggtgtaacccctctatataagcgaaaccagattacagacgaaacaatcaagaaatataaaaagatggttcggaagtaataaataatcagttaaatggccttcgggccattttttgtatataaatattggtattgaatacaatataggaaaaaagataatggtagctaaatcattccgcgcacgaagtggccttgatgctgctggtgaaaaagttatcaacgttgggaaggctgatcgtaatacgctgagtgacggcgttaacgttgactttttcaatgaatttaacggaatccagcagtatgacccgacccgtggttattctcaagacatggcgatcatttatgcgcgtcgtatctggtacgcaaaacagaatattgcttcccctgctggggctttcgacgaatccaaatggatcgcaactcgtaatgacccgaaatgggtttatagtaacgtaaccactccagatggtagcattattgaatctggtagttacattatggctgatggacgctttactgaacttctgtacctgctgccggacaacccgacagagggcgacgtaatcacgtttaaagattgtggtggtttagtaggtgtgaacagtatccttgttaagtctaacacccgtcagatccgtttacgtactgtacaatcggcacagtatcgactgacccacccgtacatgatcgcaacgtttatctataacggtaacgtatggcgtgttgctgaaactctggataaccgcgattctgagatcgtgaacgcaaccggaacaggttcattccagttacaatctggcatgacagttttccgtaacagtgctacaggtaaaatcactctccagttgccgaaatatgcaaatgatggtgatgtgatcacaacctatgacgctgataaaatgaactctatcaacgtagccgttttgcagatttatccaggtagtggacacactattactgatggtgcaagtactggtgttacttcggtaagtagccagaaatccggctttggtatgttcatctttgatgcacagaatagccaatggaaagtatatgatgctgataaccgtgttcgtctgcgtcgtatctatagtgatttaaacgcagttcctaacgattacgtttttgttactgcaaacccttctgggactataccaaacgttactgttacccttccaactgatgttgctgatggtgatcgcgtttacgtatccctttatatgatgggtaaaaaccagaactgtacaatcaaagttaaagatggtacaacggacaagatccgcaccaacaaaaatatgatgcagttcccgcagcgcaaagattatccgcctaatgattggtttagtgtaacttcattagcttttaatgctggcagtgattacctcccgtatatcgagttttcttatctgaaagctacgaaagaatgggttgttgctaattatcgtccaatcgttgaacgtgttgatgcaactaacagatcgcgtactggtgttattgctctggctgcacaggcagaagtaaacaaaaacttggaagataaccctaacgacgaaaccgctattactccgatgacgttagcaaataaaactgctactgaaacccgtcgtggtattgcgcgtttagcgacaactgctgaggttaacaaactttcaaccgatacctatctggatgatgtgattgttactcctaagaagctgaacgaaagaacagcaactgaaacccgtcgtggattggcagaaatcgcaactcaggcagaaacaaacggaagcaccgatgatattacgattgtaacccctaaaaagttgcataaccgtattgcatcgccgaccttaactggtatccttgcccttgttgctactggtggtgctcctaacaccaatacggatcgttctcaggcgggtactggggtttatgatcattcagattatcagaaagcggtaacgcctaaaactcttcgtgagtataaagcgactcagttacaatctggtgttgtatggctggcgtctgaaaccgaagttattaacggtactgttgcaagttcaaacgttccgaccgttgttactccggaaatgctgcacaagaaaacctctactgatggtcgtattggtttgatcgagattgctacccagacagaaaccaacgcagggactgattacacgcgagcggtaacgcctaaaacgcttaacgatcgtgctgcaacggaaacgctgacaggtatcattgcaattgcaaccactgccgaagtatcagcaggtactgtaacgaataaagcgatcgtaccgtctaaactgaaaggttatctggacaatacaagtcatattaccgttgctactgctgacgggttaactcaatctgggactatttggactacggttaacatcggtattcaatcagcaactgaaactcaacgtggtactttacgcgttgctacgcagtctgagacgaacgcagggacattagatacagtatttgtcacccctaagaagttacacgctaagaaagcgactgagagcgcagaaggtatcattcaggtggctacggctgctgaaactaccgctggcaccgttgcaaacaaggcggtttctcctaagaacttgaaaaatacaattcaggttgatacttcatggcaagctaccgatctggtacgtggtactgtgaagctgtctaaggggcttggtacttggtctggtaatgatgtggctggttctactcttccggatgatggttatgccgctgtaggtgttgctgtttctccgtatgaactgaacttaacactgaaacactatctgccgatcggggctaaagcggttgatgctgataagctggataacctggattcttcccagttcattcgtcgtgatgttaatcagacggttaacggggcattgactctaacgaaagcaaccactgtacaggctgacattaactcaacagccgacgcaagtttccgggtaatgaatgttagtggagatctgaacgttggtgatggttcatcgatgggtaaacttcgtttgaatggtggttcatctaacgactggtcaattcaagcaagttcagcctctgggcgtattgcaatgatctcaacgggtaatactggcacagttcatctttctgtgtataatgatactcgcggcgttgtagctaacgttaaattccaggctcctgaaattcaggcgattagcaaagtgactctgggtaatgatacagtgatcactgctgctggttctgttctctctatgggtactaaaaacaagacaactaagatcctgacttctgatgctggcaacatcgtagcggaagaatctgcgaactcttataaagtctttactgagaagaacgcgcaaaccttgctgaatcctacgtatgtacgtaaagcaggtgatacgatgtctgggcgcttgacggtaagcaacagttcaattatcattgcaggtcaagcggcttggtcaacgctggatgcagtaacagaagcatccaggggcaactggacggctgagatcacagcatcggcacaatacaacttgcttcctggttatgcggttccggttcttgaaccagatccgattaatccagaaatcatgattgtgacccgttatacctatgttaaagcaccgggtactttaacgcagtttggtaacggaactgcattcacttatcagatttgggcacctcgtccgacctctggtactggtgttaatgcgctggcgcaatccttctggatccgtcaaatgaacccgatcacgggtaaatttgatgagtggggccgcatgtataccagcaacaacccgcctactgctggtgagattggtgcaacgtctgctgttggtactacggttaaaaacatgactgttaccgattggatcaaagttggtaatgttaagatttacccagatccggttactcagacagttaaatttgagtgggtggcataatgtcaaacttaatggcggggttcggccccgattttgtagaaacgcaaattctatcggaaacaaacagcgtaacttacagaataaccgcaaaggcaacacatcccaatgcggttcctaatcagtatgagtttacactaaatcaaaaggcggtagggacaccgcctagtgttgggatcaacgtatggagaattaacaatgctgtagttgatccaattaaaaccttcacattatcgaatgataattcagcaactgcaaacaaagcgtttgttgaatatatggatgctcaaccttctgggctgtatttgataatgactaacggtgaatacaaaacaagccaaatcgttgatgattggtttgctaaaaacagatccgttatgtggcaaggcgctgatttcgctcagagattcccaaattctgcatatgttgcattgtatggggcttcaaaatctcgtatactgattgaatcgttttacgcgaacgatggagttttaaaagaagattcacgcgcatcaatcgatcttgtctatgataacgttggtgatgttgggcgaactggtgtacctttccgatctgttgaagatacggaagaatacaattcaaccaatggatctgaatataaagtatatcctgttgcaaacccagtgatctctaaactggctgattatggtatggctcctggattagctatgatgattgctggtgatttttacgccagcaaagcattattggatgctggatcaacaacaagggttactgttcgatggtttacgggtactgctcaaacttcatcatcggtgattgaagttcctgcaaataaacctgatgagtggttacgatttgaacagttctatacgatccctagtggttgtgatggatttaacgttgctgtatctcgttatcctaaacccgctacggatagtttatctgcgatccgtaactttgtgatggttcaggtatctgctgccgaagctgatcaaaactttgctgcacagtttggggttaacggtatcagaatgaacaacatgatcgatggcggaacaccgtatatatttgaattgcctaatactaaggtttatccaggtggtgattattctgcttccgaattccgtgaagttgatgcataaacaaaggcccggaacatcgggccttataaatatgtaaaaaggggttattatggcagatttaaaagctggttctacagtcgggggtttacctatttggcactccggcacatttccgctggttccggttggtaatactctaacctatcgcggatataaggtttatactgaaaacgataaaccgcaagcatcaaataacgacttcgtttctaaagcaagcggtggtcaatatttgggtgtagttgcctttaaacaggggctacaaattaacgctactttcacaggcggaagtgaccagaacggtttatattctggtgatggtgatggcgcgacattatcaaaagccaacattgatcttgtatcatggtatggtattggtattcgttcatcttccggtactaatggtcgcgtattagtcatcaacgctcgaaatggtgatttaaacactcagggtaatattacggttgagaaacaaatcagtattacaaccgctaaccctactgacgcaagtcatgcaacacgaaaaagttatgttgatggacagataaatactgtcacaacaaatgctaatagcagggtattacgcgctggcgatacaatgacagggctattaactgccccgcaattcgcgagcacaggcgcggcttcccgtcccgaacacgtaccacggctcgaccaggtaattactaaagggactatcatagattttggatcttattaaggtgaaacatggctgatttagcaaaaattcaattcctacgtagcacagttgcggggaaaacacctactacaagtcagcttgcagatggtgaactggcgatcaacatggctgattatgccatttacacgaaaaatggttcttcgatcgttcagttagcgggtaaaggtatcccagaaacaaataccaaaaaattaacagtaaatgggcctagtgctcttaatgataccgttaccgtagcggaaggtaaaactattactttcaccaacgcggatttgagcgggggtgtggttcgtcatatcactggtaaaaacgctcttaacgatggttggtacattggttctggcggtgagagtaataaagggtttttagaaatcggtacaattgatgacggtgatgaagagatccgtttcgtttcccgtggttctggtgatactgttcgccgtactctgaaacttattgattccggtggtaacactcgcgtaccaggtaacatctatattgatgaagctatgggcggcggtggttctgcttttatttcaaaaaacaaagcatatttcggcgctggtggtgctgatatctatatgcgtaacacggctggcggtgcgacaaatcagttaacgatcactgatggcggtgaattgctgtttcaagcaaaacctgtatactgggacggtcgtaaaccgactttaaccgaattggggatcgggcgggttgaaaacgcgcgtcaacttgagcaagataattttcctgtaactacaggcaacgaaactcgttggattaaagttgctctgttaaaagatccgggttccggtcagagtcgcttgcaactgatggtgactaacggcggtaactatggttctacgcgtagttctatcgactttatcgattgtagtgctcgaaacattccatcgacattaacaagcggtaacgttcgttcttacctgcaagttcgacgtttaggagatactgcaattgataatactaaccagatgcgttatagcctggttcgtacctccgaaggtttagaactgtggtttactcaacgcgcattcattggtggtgttaaagttgctctgctgtctatcgctggcggtgctgctactgaatattatctgcctactggttacacaatctctgcaactgctccggaagggttagttgaaagtgtggttattcgtatctatgacgaaatgaacaaacctaaccttgacgatggtactgatggtattctgtctgttgctaaaggtggtacaggcgcaagtacagcggctgctgctcgcacaaacttaggtttgggtactgctgcaacccgtgatgttggtacaggttccggacaagtaatgcttgttggtgcttacggtttaggcggtaagggtacatcatacaccgtttctaacgctcgcgactatctgaaacaactgcgaactgatggttctcagttcatgcgaaatacgcttggtactgaaattaactatggtatgggcgcaagtttttatagttccgtatcagatgttcatgcggtgatctcggtcgattggaatactggacgcgttaaagttggtgcaactaatgatgctaacttaaactcagataccggaaaaatcagctctcaggaactgtacggtactgcatttaaaccaactccggatgacgtaggggctgttgctcgtactggtgatggtatgacaggtgatctgtctattaccaaagcgtctcccggattccatttgaatgctgagagcggaaactcagtaatttggtttaagtataaagggaatgaaactggtgctgtgtgggcgttgcctaatactgcctcttctggtgaagttcgcattcgtgccagaacgtcgggtggaacgacaggtggagaattctcgtttaaatctgacggtacgtttacatcacctggtgatgtaaatatcactagcggcgctttcaacggtaaaagtgtcaatactcagtatgcgaactttaataacacaagttcaaccacaaccgaacaaaccgtttctattagtggttcgcagcacactccgctgttactgaatagaccgactaactcgaacttgtctatcgggtttaaactttccggaatgaacatgaaacgtttgggtattgatgtaaacggtgatattcgttacggtgaagcagaaaaccagacacaaaactcatggttgttgacttcggatacgataaacagatggactgttaacttcggtcgtgatattaacgttgctggtgtggttaattcaactggtggatttactggccctgttactgcatatgatttgactggggtaactcaggatcttgatgctttaacattgaacaataccgaaccaggtcatattaaagtttatacgtgccgtagtatgggtggcggtgataacatcaccaacaaaccttctggcgtaggtggtaactttattgttatcgttgaatgtctccgtaaagtaagtgataccgattacactaaccgtcaagtattacgcgcatcggacaataaacgcagttgggaacgttggctaactgttagcggtactgctaaaacctggtcaccgtggagaatgaacgttgttagcggaaacgatgacgatgtatcatttaaatctgttaccacgactacaggaaacctgaacagcggaaatgatctgattgttgctaacaacgctcgcgtaggtggtaacttagggttaggtggtgcttcttcaacgaaatacgctgataaaggtgttgtgattggcaaaggtagtgctctgttagaaactactgatggtcgtgtgattattggtagttctggtggtggtaatgctgttgaattgcgtcctggtggcccaactcaaaccaacaacaggatcaaagtaactgctacctctggaagtggtggtgatactgcgatcgagtatgaacaaggggcgaaaattcgttctaataatggtggcgatttgattgtttctgctaaagcaggtcaagcaatttatctgcgaccgcaaggtgatgcatccagcacaaacgaaacccgtattgatgcaaacggtagtatcacgattaacggcaatattaacgccaacggtacattaacttgtactggtggttctgttaacggaaacttgactgtatcaggaaacgtagatatcactggaaaccagttaaaaagtacatcgctctgggttactggagacgctgctgttaatggtggtttaacggttgatggaaaatctagatttaatcaagaatttagtgtatccacctcagttaacgttcagaacgacggtaacagccatgtgttcttccgtaaagcagatggtacagaaaaaggacttatttggactgatgacccaggtaatgttagtataagagcaggcggtggttctggtccggtatggaacttctggaacagtggttcttgccaattcccaggtgctattagtaactacaacggaattaacagcactactaattaccctggtggcggaaacggtgcgtatttaaataccgctggcttaacaagtagatttagtaatggtgcttatgtttccttatacttccaagaatatgtaggaaactaccaccaagctattcttaacgtcaacgggtatggccaggacaatagtttttactttagagctggcggtgacttcttctgtactcgtaacggttcttttgataacgttgagattcgttctgaccttagagctaaatccgatgttaaagttatcgaaaacgctttggaaaaagtagaaaccttatctggtaatacttacgttcttcataacacctctggcggtactactcgttctgctggtttaatcgcgcaggaagttcaagaagttcttcccgaagcagttactcaggatattgaagcagacggaggtttattgcgtctgaattacaactcagtaattgcacttctcgttgaatctgttaaagagctttctgctgaggttaaagagcttaaatctaaactgagataatgtaaggggcttcggccccttttaggagaaataactatggcagtaacagggccgtgggtaggaagttcggcaaaggctgaaactggcgaagcatggatggcgcaagctggggccaaattaagaatagggacaccgttttggatgtctaatatgattggacaaagcgtattccatttaattttcagaattaactatgcgcaaggttcttctggcgatccatctagatatagaggattctttaaaagagggttagcagtaaacataggagactcggcaaaccaaccaacgttaaatgcatttcctggtggcgaagtagggtcattagtagccattacaaacattaaaggtgatccttattgtttgtctattttaaatggggctgatagacgagttaaagtgtctatatttaatgcagcaggtggagaccagtatgatgtttatttcagcggaactactatgagtgatggttggagaagatataggtgcgaaaacgctggcggtcttaatgggtattttgaggctagaatggataaccagtttggtgctttattagaatatgtttgatagataaaccaacaaactcacctcataatattaaatagattaaaaggctaccatataggtagcctttttgttgtatcctaaatatacgtatagtaacctaagaagagtcttataaaaaatggctgagagaaatcccgtagataaactagccttatttgatcgggtaatctcgtttgtgatgggtgtgaaaacatggaaacaattgctgataaaaataattctaataatggttatgtttcttatgatagtaacttggtacaaatggactgatatattcccgatgataaaaggtgcccttgtagtcgatacaagggctatcgaaatggaaagaactgaaaagtttaatcaatccgcgttggaacagttgagcatagttcatcttacttccaacgcggatttttcagcggtattggcattcagaccaaagaatataaactattttgttgacattgtagaatatcagggaaaattaccatcccagatcgatcctaaaaacctcggcggttatccgatcgataaaacatccgaagagtacacgaatcatataaatggcttgtattattcatccactaaagcaagttcctacctaccgacacgtgattttgtgccagtagcttatacttttagttgcccttattttaatcttgataactactattctggatcggttttgatggaatggtacgcaaagcggcctaatataccagatatgaagctaaacatcatatgtggacaggccgcgcgtattttaggtcgagtgaggtgattaacgtaatgctggtgttaaattgtgtgttcttccaatagcccgtttgattgctttaaagaagttcatcaccgggctatttttctcgtaaatatcccaaactttcaatttgtcccacggatccggaacataatcttcattccttgccgaaacccccaacgtaacccgcctgtatccagcgctgtcgtgataatacacgaagaatggcctacctattggcgcaactttacaacctctcttagcggctctcatagcctcatcgaacgtcattgatacccccaaaaatttctatgcatgaatggtcgaattccgatagtttcactcaaaatgaatatcggatgatctagctcatcgtggttttcttcgtcaatgacgatatcccaatcagtagccttttgttcttctaccgtggcaatgaacacctggtttacttcacacttgcggtgtgtacgtctgatgattgtatccccttcacgaaacacaatcatatcagggttggtagtgcggtgcgcggttttacccgcgcacacttcattaagcatatcttcgtatgtcattataaaacctttacacgttgaacgatggtttgtttaacgtctttgtattctccgtgctctttaacggttgctttgaaagtgatttcatcaccttcgtttgcaatgttattaccgaagtaaacaacaacattaccatcaacattaattttggtcatgaatctttctacagaagtgtagtaagaaacttgagtatatcccagtgaaatcactttctcaacggttccggtcatttccagacgttgtttgatttcaccgatgtggttagctttagaaatgcgttcctgacgctcttgttcccactgttcgcggatttcttcgcgtttggcgatataatccttctccagtgcaacacccatgcagtaagcgcacacggcgtcaaatacagggctgtttttgttgtcttctttagactggtcagcccaccaaagaacagtaaacattggcatttctgcaattacttcgcctttacgcttgccaatcggcatgatccctttttccagcagttccagtttttcagtatcgaacactgacagtttaccgcgacgttcgaacagatcgaaatctgcaaagccctggaataccattttgaaagtatcagtttcagttaaacgggctgaaacacggtcgaaatactcacgcgctttcgcttccgctttctccggatcggtagataagttgcagatatagttatcagaagtataaccgccacctctacgctcaacacgcaaggtatacattgcatttttacgaccagaagaaatgaagtaagtggtagtaactacggttgcgttagtcatggtatttctccttaaagggtatctcgtttcgatatggctaatatagcaaaagcccttgaccgaagtcaagggctttttaatcattcattcgaatctttcattgttttatgaagatgaatatcaaaaattttccagtacgcctttccgcgaggataaatttttgctttgtcaatatcgttgttgcttccccatgtgttgtttgggccacgacatcgattttttatataatctgtatgccagaataagcgctgaaccgatgattccgtacctaatggatcttctttactgaacagaatttgtatactcataagaagaacccagtgcgaacaatcagatcgattttcttttctggttcaaacggtgatttgctatcgatgttacactgatagaacataccaacatacttttcaggaatgttggattcacgcgcccatttcaggttatcatcggtattcggccccagcataaggttaacaacatcaacagcataatcctgttctttggtgttgccggaaccgtttacataatgcccgtgggcggttttgaggatctcaattacttcgctatcgtcagtttcgactttgtaaagcgttgtattttcaggaatttcttcaagaatgatcaaagcggttttcatcacacttacctttgtgtttctgtttacgttttgcttctttaaatgctcgcttgcgatcgcggtgagtagaagcgcggttgaaatcatgtttcgctaccaaattattcatataagccccttaaagaaaaatatttaggggctttcgcccctgtatcaatccagcagtttgcggatcttgtctgcgatacgtccggcgcgggttgcacttgcagtatgatcgctttcttttgaagccagttccgccagcttacgctgatgttcttcttctgctgcttggcgatctgctgcaacctgtgcaacctgctcattatcgtgagcaatacgcgcttccagttcagacagggttttgtcgaaagttgctacgatttcatctacagaacgaattttattaaacagtttcataatttatctcaattggttagttttaatcagtatacatcaatatggttgaaattcaaaatcataaatgtcattcagtgcgcggttccactcggtgtagttttcaccagcaccataacgcatttgaatagcactttcgaacgttgatccgttgaggttcgggaaaccgaacaggtttttgattttgtcatgtgctacatagtacagagaagcactttccagcatcgcaaccatcgcagacggttcgtgttcgcggcgcttgatacgtaacagagtacgactagcaccagttttacggcgttgatttggtgctacgtagaaacggaatactacgcgccctgttttatcatcaactaccaggtaaaacccgttttctttcagatccacgccttcgaatttcttgaaggttccgcgtttcatgtcaccaattttaattgcatatttatgaatgtcaagtcttgtcagaattcttttcatattttttagataccagtttgcctaattttgtaatttcgcctgtttttacgttaacaaacaaggcgatgctcagaaatgggatgctaatcactacgctgatcaatgtaaacagaaaacgtatcacaaaaagaacagcacgttcaagatatcgttgcatccacgcgattcctaaacaactataccccactataaaggttgatgcaatataaaattcaccaaatcctttacgaaatatgtaacctttcccggattctatccggtcgtcggcccacatttcacgggcagttttcagaatagattcaccactagcgcgggtttcgttagccgaaggcatgtttttaaatttcatgatagtctcctatgcgcccagaactctccaggcgcggttgtttagttagtaatggctaaaaccatatgtaacatcaatcatgactttataacggcatacacgcatttttgcgttattgtaatccactgggatcgctaccacgtcagcaggatccacctttacctgaatgactctaccaataccgcccccgtagtgtggaaggtatgatttagccgcaacgtgtaggccagtagaacaggtgcgcgttttatcttcgtctaccatgtttcgaggcatggagacagtcacaccaggactattatcaaatttgccagtagcgagatctttatagttatcgcgtacacgtttccaggcaaggaaacaaccatcatcggtcagttcaatgtcattatgtacaaggaacccgtaaagctggtatacagcatcgcgtgaagggtttcgcatcaaccgttcaaagaagttcaccagatgttcatacggacgatcgttatacatttcgcgaatgattcgttgagtgatatcagaatcaaacactacatctttatatagaagctgatgaccaatgattttaatgttgcctttgctatatgttcggatcgcttcttgagtatccaaacaagttacagcacctttgacatcaccagctttcagcatttcatgcgctttcttaaagttcggatgtgtttcacccgccatgaaaacgcgcccttcgtatacaaccgtaatgaacgattcagatccgatcatacgcggtacagtgtctgatactttaggcttttgttttacatcccttttcttagggaattccgctaacttgtggttgataacgcgcccaatggttcgggcgcttacgttgaactgttgggccagtgctgttttacttgcccccgtcaaccatccattatagatagctttctgttgtacttcgtcaagaattttgaccattatttccaccgtattaatttcttaaactcactgagattcttttcgttgttgtaaatcggacgaattgaataagaatcgctatgttcaacaagtgaagccagtaacgggtttagtgatttaaagatttcccatgcctgatcaacacgttttttcatattgctgcgtttaacgcgcattgatgctacagattcacgcagaatcggacaacgcgccctggaaagatttttaccatctttctcatacccttccagacacactatacgttcgagggtatcaacaatcttatacagtttttcattatatcggtttttcacaatccgatcaagcgatacaccaaaacggctatgcaatgcgtctgtttctgttgagtgttccttgccaatccatccaggcaagcaattatctttcaatgccttttcggatttaacatactgcttgcacagcatatcatcaaagcataccagatttgaatctgggatccacttccagaggctgttacggatagcaaacacaacagggatcccagtatggcgcatgatacgcgataaagtagattctttcattgctgaatccatagacaacctggaattttcaccatctaagcggctatattcatcaataccatacaaccgaacacctggggctttatccagtgataaaaactctgattttgtcataaacagagaagtttttgccagattgccgttactatccaactcataacgatatacggtcggggtttttgggcgcggttctgaatttttcggtgcatatagcgcttttgatttttcgcgatctgcatcatagatctctttttcttttgtcatttcactggtacggagatacacaatttccgattcatcaaaatgacctttccgaacgatatcattaacaatctcacgctttgaatcactatcgtaatatgcaacaaagctaacacggcttaggttatgcattttagcatacccgacgatatacggtttaaccgtgttggtatccacttttaacagaattagtttcttctgtttccacggataataaatgcgtgtgatgtcctggcgtttggttgtttctggcttatacttgctccagcggcctccgctacccgttacctgataccatgcatctttaccgtcgtattcgttcgcccaatacccagcaacataatcatcattatatttgttgggtttgactagttcgctatggatccagccaatagaatcaccgttgatgcgaaaattagcatctttaccaacaaagttttgtaccattgaaggcagagaatggaaccacgtcagtttatcacgaacggtttgtaacttatcgaattctgatttaactcgattgaaatacacccggctgatttgtttcagacgttctttaacaatccctactgtcattttatccatactcaactcttcgcgagaaggcatgaaatcaagttcaccgattgggaagtcaataatatacgtatactggctttctgtatagcaatagaacatcgaggtatcatacaaatctttatccagaggataaatgatgttacccatgcgagcatatacaccgctagtgtatgctgatttatgacggatcaccccgctatcgttggttgcttctttcggctgatagttgattttgagaatagaagcaccaacaaagttaggacgaatatcagtaaatgattcgtatacccttgctgcttcgttttcccattctttgatatcttcaaccttaaccggaacggtgatagtaaccccgttaggttcgtcgctttcaatctcatacagaggatcgcagaacggttccccatcatccatatagattgtgtaaccgcatttgataccgtcttttacagattcaactgtgaacgcatcggcatagcaaagcggagatttgcaacccagacccatagaaccgatcaggtcgtttgaatcatttttagttgattcgaagtaaacggtaaacgcatcactaacgaaatcaggagacataccgatcccgtagtcacgaataacaaaacgaggatcaacagcagttggcaactggacatcaaacgggttctgatttcccgcttctttgtgtccatcgatcgcattacaagacagttcgcgaatgattgcgcggatcttgtatttgtatactgtcgaagaaaggatcttatacgctttcttgtttgcgcgtagagatagtttgtttcgtcccttgctggtatctgtaccaactcggtagattgtttgcggtgtatcttcgcgtaatttcattgtttatttctcacttaacattaaaaataacttggtcacaagagtacttcgttggctttttgttcagaccatattctactacttcgcaataagtgtcaaggaattttaccaatttttcttcctcgacctgctgtttcttcatatcaaggataccccacacgatagccccgataatgatagaaaagaacgcacaaaatccgaatatggtcagatattttcccaatctaggcgcattataacgtgtcataccttacccctctttgcgaatgtatgcaagttcttcatgggttactggacggatatacagacggccttttgtatatgccttgcgcccactgatccaaatgtttttcatatccttaacaccgttcatcacatcgttgtaaaacttcttatcagctttagcctgatagacttcacggccttgataatctttcatgaacaaacaataaaggatctcattcttatcaactagattagcatcctttgtagttgttttacttggtgaaggtttagcacccaggcgcaaggccatagcttgccacactttaccatgttcataacctcgcccgacaagagcatgagcgatttcgtgtaaaagagtgtctaaaatatcctcgtagatatcttccgcaacatgacgaccagatagttcgatcagttttttggcataactgcaacggcccagagtttttgtaatgcgtccattgatccggaatgtccaaccattactgaccaaaccgtgtttttccatcatggtacgcgcccagtgggttacttccattgcactacgagttttcaacattttagaatctcctttgcttggtacaaaaccaatatagcaaaaagccccctgcattgcaagaggctttgtaattatttcaatttcttagaaagttcttttaaatcattgagatactcaattttaggggttgtttcttcccagtatttcaactgtttacgcaattcttcggcttcgtcttccagctttttgctttcgtccgtggttagatggtagatgttcatagccactaacatttcggcatgattctcgcaacctatccacgtagacacaaatttaaccgcttcgctgcgactaagaccacgtagagaatcaggagattctaccatttgagcaataaacgcaacctttgccagtgctttatctaacgcttccttagtttcctggatacgcttattgatacgctgttgatatacattcatacgaatatcaacgaaatcctttagaagcgtttcagggcgttcgtatgagtatagtttgccctcaaagataacgttaatgtttgggtttgaattttcaatcaacccgaaatcttttaggatcttttcgcgggttaacccgttggcatactctcgcttgagcgttacttcataacgaaaatcttctttcgatagatccttgtagctaacgataacgcctttttcttccagcttgtcaaggattgcaatgtatttcacacggtcatatttcactgggatctcggtgatcaccaatttggttttaccttgcaattcatacgtgccgtaaattgtaccgtctgtgatttcacctttaaagtaagggtatttcagatccagtgtgaaatctttatcattcagatatgcaatgcacccgttaacaaccgatttaggatcatgaggcggaatgtttgttgcatatgcttttgcaatcccgctaaacccgttaaccagtaccatcggaatgatcgggagatagtacgctggcggtacatgttccggatcttcatgaactggcgttaaatcaccatccatataaattgctttgaatattggcgatagtttacacttgatgtaacgaggtgcgccaggtttcttaaccaaacgggaaccaaagaacccatcacggtcgaataacggaatgttattgcaccagtgcgccgccataagggataacgcttcttctacagaggtttccccgtggtgatacccatacatagcaacaccgccagcgatagaagctactttctgaaatcccgttccgccctgcatagcagagtgaataaagaaacggtgaacgggtttaaacccgtctaccaggtgcgggatcgcacgtgaataaatcgtgtaaagggcaaacgttagcccttccacctgtacaacatctttaatacttctttccattagtcaaccttagaaaatttgtgttttccattaacccaatctttacgcggatcagattcgtcgccgaagcatagttctaacacttctttgtattcgtcgtcaagtacgatgacatcatacttcaactgatcacccagaacacgatcgtaatcttctttgcgtaaagaacccagccccttgatatatcgtacatcttttgctttatcgcgtaacggtgcaaactcatcaagagaatagaaccatttttcttcgcgcccaactttagcgataacgatcggggttcgaatatatcggatccgtttctctgtgaacaaagaaggccaacggctaaagaatgcaagcaacagggttaagatatcaccgccgtcaacgtcagcatcgaccatgataccgatattatcataagtcattccggaagtatcaccaggatgaatattgaggatagccattagttcaaacagttctttgtttttgataatgtctgtaaaactcataccccatgtattcagaggcttaccacgtagcgggaaagcgccttgtgtttcttcattacggcattcgatgaactgaccaacagcggaatcaccttctgtcagaaacaatgttgtttctacccctggagtatcgataccggaagccggaacgtgtttagcaatctttgcctttttcgctttctttttcgctttggtgatcgcggcggcttctgctgcttgtttacgaatcaatgcggattcaatgatcggagtaatgatttctggagtatccataatcatttttgcgatctttttgtagttcaaattcgcatgattgttaaactcacctgctgtatttgctaatcgctcttttgtttggctatcgaatgcaggtgcattaaagttatgcaggaataccacaagagttaagcattcttttacacgtgctttcgggatctcgatactatgctttttcttgatcatcggttcaagttcagaatagataccatcgatcatacactcaacatgaacaccgccatttttcgtatccagaccgttaacaaaggatttctgtttaaacccgtcctcagtgctcgccagaatgaagctgagacgattatttgtctgaacaatggttttatccccatacatggaagcatacagcgggaagcgattagagagcgtttcgccgttatatgtgaatttcacggacgggaaagcaacggcaagggccattaagcgatccttaatcacttctttggtttcttcatcgataccagttacaccaaacatagagaagtctggagtaaacttaacagtagtaccctgttctttactggggctggttcggtaatcgatgttctgtgcgccgtccgtacagttaatggttactttgcgtttcccgtttgcagtctcgccaataaaaatcgagctataacagtttgtcaggaaagaaccaacaccattcatacccatcgttacgcggtttttatcatcgaagttagaacccgattttgccatagtccatgccgcaactggtttaggaactattttcccatctggggtttttacatcatcctggggaataccgcgcccattatcagagattttaaccagattatgatcaatggttacatcaatcttattagcatgtttgaattcagttcggatcgcttcatcaatcgagttatcaaggatttcgttgattattttaaccaacccttccacgtactcaaccttgcgatattggcccattatgaaacgttcatgcgcttctttgttaaccgacccgacgtacatatttggacgcaaccgaatatgatcgcgatcgctcatacaaaatgattcgtcaacctttgcgccctttttggctggttgtggtttctgttctggttcatcatctgccagaagaaaatctaaactcatattcacctctttgtttaatcactgacattatatagggttctatgaaaaagaaaacccctttcggggtttacttgttgtaagggaaaccatcccgaaccatttgcggtttgtccaccgttcgttttgcttcgcccccgcaatcacactctttcggttcgtcgcggcttgcgatgcttgacatcttcgggaattctttttcgcacttggtgcatttataggtataggtaggcattaataaatctcttttaaacttaacatcttaactaaacgggctttgtctatgtcaaaaacacattgacgtgcgcccggatacaacttttcaacttcgtataccatgcagacgaaaccaacattgtgcatgtactcgcgttcatatgcattgaaccaacgagaaaggcgctgtattgactgaaacccaaaatataacccagccgcttgaaagtctatgttatctttttcaaggttgcgcatcaatcgattatcgtcatccggcgctggatgtcggttatcatccatatcaatatagatatcaggattcatacagaattgatccagccattcagcagtatccattgacaaataacgattgacatatgggccgctttttgtttgccatttttctgtacaatcattccagaaagaacaagaaaattccacacgatatacgaacataatataatcctcacaagtaaactcaaggtttacaagtacgataccacttatctaatttttctgcaagagtatcgttgataatttttgcaatttcgtaccgtccgtgagtagtacccagttccaggtaaatcacatcaagtgcgcacacaatcgcatcaatactttcttcaacgatattaccgccgcgttgaggctgaatgagacattcgctgatctcgccaacttccgctgataagtgatgaaccacatcactcttcgtgcgtttcttcactttatgagcgatttcaaaaaacttatcaagtacgatcgccgtttcttctcgcgttgcagtattctcggatgtcgtctccgtttgttgaacaacgtattttgtaaaatagttttcaaacacgttgaaagggatcacatgaggaacaccattcaaaaacaccccttctttacaaacatactggatttggcgcggaatagacaacccgccgctgcgttccaaatgtcgtttaacgcttgctacaaaatcgaactctttcccgtatccagccgacatactgtgatacgtgagtaggccaaatgcagaaacatagagatcattttctttatacagattcatttacaatacctttatggtagccaaaaatataacaatcaattgaaggacgttcaccagggaagtgaatgcattgcatgattcgttcagccattagatcttctcccatgtataccgaagtagtttcttcgttgtaatgggtatcatacgacgttttaagcgtcatgcccggaagccctgcaatgtgcatgaatttagaattggtgcaaggttttcctacttcaccgttaatcatcaacactgcattagttttacgtgcttttctcatttgaatttcaccccgatttgcgatacgttccattcttttacttcatcaacaatatcataatggttgatgtatggtaaagcaatttttaaattactcgcgtcttgaatgttgcgtaagaaacgagtaggagaaagaagacacaaccgctcggatccgttgtttcctttagcggcaaatgatagggtttctcccccgtcaatcttcatatcaacagaaatcgttttgaattctggtgcgtatgacgtgattttgccgttgtctctcggcgtactatagaaacatacactttgtgggacattataacgatctgtttcaatgtacatgtaatcgccgtcagtcattccccacgcggtataaagggatccggtatagtcaccaaaggaatttttaaaatcttccttcgtggtatatcccagcgagcgcaattgcataagctggttatgctgttcgattgcgtcggctttttgttgttcctgtacttgcgcatcaatcgtttcttgccaggaattatacgcatagtaacccacaacagcgattacagccataacccctacagctttccagattttagcgtcttcgtttttgttactcatgctatattccttttaagaaaaagggccgaagcccctttgttaacgaagataaaccacataaccgctttggtcaatcgcgcggtctgcgtcattgaagatattaccacgaatgccttttgctggtgctttccagcttgcaggtttcaggatattaccatcattatcgatgaaggcggcaacagaacgctgattgaacatttcaccagtttctttgttgcgagtatcctgaacaacacgatgatatttgcggcctttctccagaaagaaaacagtttcgaaaggagaatcttggaaacgagcgttacgcgctttgtacattgcttccatgaaaggggctgctttttctgcgaggatttcgaaagtgttcatggtatatctcctaaagtgtgtttcgtttcgatgtaagtactatatcaaagatggttattctatgcaaggcttttttcgttatccatcaaatattttaagtgttcttttaatgcagggagttcgttcaaatggcgttgcttaactttctcgtactctttgcgttcccagttttcaagattgcttgccaacgcttcatcacaataagcgatcccgcgttctgcatcctgaactttctgtttccattgtgcaactgcttgttgataaagagaaccgttaaccatcataataatttcctcccttgtttcgatggggtaactataccaaagctaccccagaatgttttaacaaaaagtgctattagtaggtatccagtttatacattttgcaccagttcatgaattcttcgaaagtctgagtattaacacgtttttccttcttcactttcttagtgattacaggacggttagtaaaacgtttttgcattttcacagtgattgctactttatcgcccaggtcttcaaccttttcaaccagcgcccactgagaaccgatttcagcaccgaaagtcaaaccaacaatctcacctgctttaacgtgtgctgcatattttactttaaccattttcgtattcctttctctgtttcgtttcgatgaatacaagataccaaaaagcctcccgcaatgcaagaggcttctttaacaaaaaatgctattttatttctttgagtaatttacggatcccgccgccctgtgtcttatcaaagattttctttgcatcaataacagaagtgattatgtggtagttgttcccttttccgtcaaactcaaactcgaccttgtagtcactacgaaatttcacaaaaacaaattcacctgcaaagtgcttacgaaactgtttttcgttaatgtccaaccattcctgtgtatcatctaactgatacatgcgacaaaacaggatcgaacccattacagcaatcacgacaaggatagctaacgcgaattctgacatcatttacccctgtttactgattgacggtgcaatgatttaggcacaaccggatttcggtatggtttgactttatggatcgtgggttcttccccaaccaaattaggaaattggttgttccattccatcgaaaatggatagggtgatgactttaactcttcgatcatacagtttactaaacggtcgccgattacacccaaagccgccccaataatcgctatacgcataaatcaccccttaattgtgtcaagtacagtaaaccagtcatgaagccatatcgttgttcttacagcgatatacgttaacaaactaatcaatgataccgctccgcaaatagccagagtaatcaacagccggatttcaaatttagtaaaattcatatcaatctcctttctaagaacccaatataacaaaagccctcaaccgaagtcaagggctttgttttaaatttttactagttttggcaatcgaagaactataccaggatggatcagacgtgcatccggaatagaatcacggttgattttagcgatatcaggccaaagttcaccaacaccatacagtttctttgctatagaatataggctatcacctggttgcacgacatagcgatcagattcaatcttaaccagatcctggttaatgatatcatcaaaggcttttgcttttgcttcgttaatcgtgttcccgtagtaatggcgatccataatagttaatgtgatcatcgtttctttcctatgctgttttcgtctgtctcttctaaggatggaggttcttccagccccagggcataacgtttagcatagattagcatcaatgcatctttagcgcaatcatgaatcgaatcatgctgaatgaatccatctaacatgcctttacgcagtggacacgtggtcactccgcgagtcagtaaacggttttcaatagctgtacgcacatcacggctattccagaacacggtcggcatatcttcaaacgtgtcaagtttccctgtcatagttcgtacaacatcggttagcatagaacgatcgaattcagggccgcgcgtataatcgtatgactgccaacgactcacaccgtcagccgctaaatcagcaaagaattgtcgatgaccttcgtacaaatccatgtcgatatcggaagggaacaaaaccctttgcgcttctttagattgctgtttccaccattcgatcgttttttcatctttgatgcgttctggttgtttccggatgtcaaatttgtactttcttcctttagcaatcagttcctgaaaggtaggcggatcataaggatcatcaacaaacggaacatagctaagttcagctagttttccttttggaaacgggccaatactttcataatcaaatacgaaatctacgggtaaatgactcattcgcgaccccgcttatacgattccatgaaataggccaatgatagcgcgacttccggagtaacatcaacggattcgatcatgcctggagttaccgccatcatcccgaactgacgaagcccacaacgagcaatcgatttttccagtcggatcatgttttctacagcctctgcgaaattgtccagatgttcccaatcgtggtaatcttccattgtagaacgatcacttttcaaaatcagatcggcaaccaattcagcataaaggcgcggaaggtgaatattcatttaaaacccctcaagcatgtttttgttttcacgaatgttacgacccattttcaaagtatcaatgatcactgcatactcttcaaaagtgaattcgatatcttgtgaaatgtttccccacgtgtaggtcggcccgttaggacagtataacccaacttctttgtttgcgttgacaacgcagcgcaattttgcaaacaacaaattgatatcgatagaattgaacccttcgagataatcaagcccctctctaccaatacggtcaacttctcgcaaaatcttttctacatctttgactttaacaataattttcataataacctcaaagggccgaagcccttagacataatcaacagtgaatcgtgcgcgggtagttcctacataaagcaactgcttacacaattcataatcggcgtatgcgtatgcatcgcgcgtatacatgtatgaatgatcatacgtgcttccctgacctttgtgatacgtacaaaccggaagcgccttaaccgtctggaacttgtttttgatttgccagaacgaataccagggtgctttgtatccggtttcctgtttcatcttcttatactgaaacgcgacgtagttcaaataatcgcctaaacgttcctgcataaccggatccgcgataacctgaatatccgctttcgtatcctcgaacatcgattctgttttcatcaagaaataatcgatttgcaccggatcgcatcggtcagctttgatagtatcagaacgcgggatgatttcaaggattttaatttgctcgttgttgttatagataacttcaacaaacgaaaccccattcacacggccttctgtcactaacggttcttgcatcacaaccacttcaccaacaatgaacggctgatcagttttgtacaagtgtttgcggatcactgcgtttaacttgtctacgtttgcgttagtgtaagcaaacatacggttattattcaggtcatccggagtcttaacacggctaaaataacgtctcaggaagtcaccagcgttttcgtgcttcattacccctagttcaccattcatgaggggcattaacggcttaccgtcgcgtatagcgcgtgatacctggatgattgggtttccttctgcctgacgcataatcttatccatgcgaatgacatcaaaaatttcctcatcaaagaacggtgaaagctcggtgatcccttcggtattaacaggacggatctgatccttatcacccaatcccaggatcaccgcacaactcggaatagtacgcttgatgatacggaatagttctttgtcaaccatcgatacttcttcaaccacaaacacacgacattcagacagatcagcggcctttttgcctttttgctgttcaaatactcgtaactcttcgttggtcacggggctgattttcagtgctgagtgaatggtcgttgcatccatacccaccgcctcagagagaacgtttttagcctggtgtgtcggcgctgtcaaccagatcccactaatacccagttttttcaatgtctcaaacacaaattttaccagagtagttttaccaacacccggcccacctgtgatagtagtatggattttgtttctgatatttttaatcactcgatcatgtgcgtttttctggtcttcgctcagatcgtcaaaagttaattcgctcatactttaatcaataccccttgaatacttgcgtgttcaataaaccaacgcatatctttctttttcttttcggttacggtttccacttcttcctttcgaaagaatcggctaagaccactttgtttaactggattcatcttatcattatattctttgataatcgaatttttatactcgttagcatcgtccggagatagaaacaacaaaggtgttaactctccttccttaatgaaggggattttaaacccgtctttatccttactaacgacgatataatattttgtaatcattctcgcccctcataacaaacgtagaatattccaacaaaccaaaacactgatagtataatcagtaaaagttttctttcaacgccatttacgtgaaacacacaccaaccgaaaagatatgtgatcatcgcgcaaacaccataagaaagaaccccaacagctactagcatcaaaaagtgccattgatcgatactataaatataataaaggagattatacatgatatcgaccgtaagcacaatagttgttcatgctcattatacaacaactcccgtatttgaaggagatatctacacgttcaaatacacttttcctatcgaacagatagttcaattaatgaaaaatagacatcctatcggatggattaccccagcaacaaaacatctactaaggaacaccatcgatggactaccgtaaaatttacaccaatcttatagaaaaagcaagagatagaacactaaattgttacacagaaaagcatcatatcatcccccgatgtatgggaggttgtgacgatcatgataatttagtagaacttaccgcagaagaacattatgtagcccatcaacttcttgtcaagatgtatccacacaataataagttgatatatgctgctaatatgatgtgcgtcaacgcaacacagagaaataataaagcatatggatggatccgcagaaagtggatatctcagatatcaaaagacagaacagggacaaaggcaacagaagaacaacgcaaaaagatgtcagaatcccataggggagacaaaaactctatgtatgggttacgcggtaataatcatcctgcttatggtcaaaaaccctggagaaatcaaataacaatgaaaggaaagcatgaatggaggtatgctgggattttctatgactggtatattaacgatattaaagctggaatctataaaagacaaggacacaagagaatgctacaagaattgcaaattgcaacaatctcccgtgttcctagaacatcaatcgagttattcaaaaaggggtggaacccttacgaagataccgattgggttgagtgggctaataatcaatagctgttggcccaacgacgaagattttcggcttgtttaagagcgtacatcttataaattgtttctgcatccatacccaatgcaataaacttacatagtacaaagtggaattggtcgatcatttcaaacagaacttctaaacgatcctcttcactcagatccgcaaatttagtattgcgcaattcctggtgatttgctttccacggtttccaaacaccggacgcaggtttaacaccgcgagacattccacccagagcggtatacaattcgcgggtttcatcggcgatcgcgtcgtcttgcagtttcagccaatcaaggatttctccgcaagtttccagattatccggacgcggaacccaatgcagggtatcagacaggctttgttgtgcatggttttgtaaatccagcatggattgtaaaggatcgccattacgggccagaaccttttgatattcggaatctacaaattccagatcttccgggttaaccaggtgcgcacatgaattaaatacaggagttttatcagtagtcatatcaatctcattttttcggtgatttgtcccacgacttaaatcgaagttttgccgtgagtccagaaacagtattctctttcaaatactgcataatttcaagtttagttgcgccgtccgtttttatcatttcgttgatatctttggaaggccacgggcatttatcccacattacaaccttttctccagcctcaatcaatttaaagaggcggtgagtagtatccggatgacgtgcttcattgtcaagaacccagacacgcatatttttataaggaacctcagaaagtgcaagctgtccaccagtgatagcaccagcattatcaacaaacaggctatctaatggcccctcaagaagataaaccgtttttagcggatctatcgtatcctgtccgtaaatcttggttgattcttcacaggctttgattgtgatatatttcgactttgccccgtcgcgtaaagcacgaccctggaaagattcaattttccctttcttatcgaagatagggatcactaatctcggttctggttttgcgatcggataggtatccggattcaccgtattaaccagttgttgccattcgcgagtaaaccacaaccgatcccacttgtcacgggggatacaacgattctgcacatattttatgatcggatgttcatccggcaaggtatctaacctttcgcagaattgaagagtaggaataaatttcttctcttccttcggttgttctgtatgcgttggctttaacgaattgcgatccttaaacgattccatgagataatcacggtaatcgtctggataatattctttcaggaatacgctaaacggtacaccataaccacagttaaaacaaccacaattcatatgatcaccctttttagaagggtagatccaaaatcgttttttgtacttgtctttcattgagtcgccgcaaatagggcaacgcgcattgatgcttaatgcccccgatttacgaacgatttcgctttgaggcagtgatcccatgattcgggttgcaaattctatatcaagatacatttcttacctcagttgactatctttagatcctcgtcgattataccccgcgctgatcatttcgtcatgttctttttggcattcaatacaataacggcaacccttcacgataaccctacgtttttcgggtatcggatccccacaatcaaaacaatgcgttaatgattctccgtttctgatttgagaacgtgcaaaatctatcgcattgtctattgttgcctgaatggtatcttgaacaccgtcagcagggccaaatccaaccgccattgtaaatcctcctaatcaaatgatttcaatatcatagactaagaggatttttctgtcaagaacttacttgcttttctgttccgtcaagcattaacttccaaccacgaaatgcctgtttaaacgaataatttattgcaatatcaattttatcagaaccttttcgacgattctgataaacggtcgcgttgtcactcatatacatgatacaaattggaaaccatgtataatcgttagcagtagcccagatagtgatattcagcggaggaattatcatttctttttccttttccctgcacgggtaacgcctaatactttcggcccgatgttggttactgctccagtagtcacaccagaagcaatcttttctgtatcgccgccagaatcacccgcgaccatatcctctaacatgcgccccttatcataatattctttgaggcgtggaacgttcaacatgatttcttcatgctcttgttctgtcagattgtagcgattgcgtaaggtatcatatgaactggttaagttcataaatccagtcatatacggaacagaattcattcgacgcttgatatggcgtactgaacgatgaaaaggagaatacgcttctaactcttcttttgttttggggttgcgaattacttcgccttgtccatcaaggatccccagcttgtaagcagtccattcagtccagggctttttgagtagccggatcatccggacgctatatgttaaatccatatttttaactaattgatcactcatgattattactctattgtgaaagtgaataaatcagatttggtttcaggttcaaactccatacaaacaacctcgcatagtggtttaacccctttccaatcctccaggtaatacccagtatctataccgcatccaggattcataacaaggccagtttcatcaagaaactttttgcatttacttgatgtggtgctgtcatcttgtcggaaacagtgtgttttcgaataccggaaatttgcagacatttgagggattatgaaagttccctgacgcgcgatctgtgatgcacgttcgattactttatactcaaattctgcccctgtatacttacccttaaaatcagaggttttgattttaccaaaaggcggattactgatcgccatatcaaacacctgattaaattcagttgttaaggcgtctccatgcacccaggaggcttctggtacgatacgcttacctaactcatagtatgtgtgatttaactcaacacagacgatttcacgcggcgtattgtacatcatgtaatgaaccatagcgaaagataatccaccgataccagcacacaggtcaataacgcttccacctgtgcaagcatcgattgtgaaatcgcgagcaagtccaataggggtaaagaacgcccctaattcagagttgtttgtaaacgcgccttcatgaaagttttcgataatgaacaacttctcttcgtaagttagcgctttgtcagagtgaaccagatccattatctgattgtgtttcttggtttccgctttcgttaactttgccattgtcccagctatacaataatgttgattcattcggatagaattcccatccgtccacgtatccggtttcccagtcagtagtttgttcaaaaccacagatccattcatacacacccggaggcatttcgatagaatcaggaagcccgatatcttccgcgctgcgtccacattcaaagaatgcatcgtgaatgaatggtcgagataataccgtaacataaccttcatcgtcaacagctacgatccagcgcgaactgtgaggactatcgaacttcggttcttcgtccatatccgcttttatttcagccttacaaaaatcaatattcatttcaaaccctctttaacaccctctttcatggctttccaggtagaacccgcttcaccattcagggcggcgaatacaaatagtaagatagcaaggacaagattcacgccagcaatcaccatgattttgctatacacgaaaatgtaaggcattgccaccacccaccaactaaaagaattaccagttacgatgttgagtgctgcaagtaagaaagtgataacgaatgcgattttcataatgtcctcctttgttatgattaaggtatcatcttttgtgaaagaatgcaatacctacagatacaaaaaagcccctttcggggcttaatttttatgcgttattgatgagataccgaagaacgtttttcgcttgttcctcattacaaccaactttgaaaccaggttcgatagggaggaagttccagaggaaatcaacacttccttcaacgtcatctttgccttgttccagcatcgctaacagtaaacctttgtttttgatgctgtttacgattgcgtcaaaataaccatcgctgaaatcaacattcgggttcagcatttcgttgtaagggttgttgaatacgttcattttgaatctcctttgtttaactcagtatcttgtctacgtgagttatattaccacaatggagattcaggtcaatacctttttacgattttttgaaaaatttttcgtatttggcttttacccagcgatacatatcttcggccttgtcactggcaatcagtgagaacagcagatagatcgcaacacccaccaacacaacgcctactacaatgtagacgggtaatagaactgggaagagaacccagaaccatgacatatgcgagaagccgaacactttagcggctgcaaaaatcagagttagtccagttagcagtttgatagccggaatcggaatcgttatagtcttagtcatttcattaccttacattttttgcaataaacagtgttaaacgcgggaatacgtttgatagaatgatcattctcagtacaaaaccacctactaacaccaacagcggagaacaaaccaaccaccaggaagcagtagccataacgccgattgctgctaattttaggtataccatcacaccaaacaaaataattaatataagtttcattttagattccattgtaggggctttttcgcccccagtcaattaaaattgaatgtcagattttgcaatctgtgccattttatcacgtcgggtagattcagcctgtttaatcatcgggccttgtgtctgttctactgttttaggcatagtgttgccgtggtagtcagatttaaacccgtattcgctgttgtcggtatccatccagcgctgattacccttgcgaacttccaacttgaacttgttgaaagtgttcttatcgccataacgggatttgatttgcttgaacagttgcataccctgatcagctaactcttccgtctcgattacagctaacataaaatcagccgtagcaggtaaaccagcggattccgcaacatcacccatactcacatccgaactatcccatgcagaacgaccaacctgtgcgcctgtccacattacggtattagtttcaacagcaagaccgcgtagttcttcggcaattgctttaaccagaatataggtattctcagcacctttaacacgggttgaagtacagatccccaggtaatcgacaatgatcacatccggaacaaactgtttcttcaatttaagctctttcacaagcgctctaaagtggtttgcacctgcacccgatgtagggtactgcttaaccaccaaacgcccaaccttacccgctttaaggcgctccattttgttcttatagtctgcgtatgtaatgttcccttcgtcgatgtcatccatagtcacatcaagaaggttagcatcgatacgcttagagcaaacatgctctgccatttccatagaaatgtaaagaacgtttttaccctgttgcagataatcagccgcaagagaacataagcccagtgatttaccaacgttaacaccagccatgatgatattcagtgtaccacgttccgcgccgcctttggtgattgcgttcaggatcgggataccaaacggaattttcatcgccttcgattggtaaagcatccaccgtttttcataatcttcgaaatagtcatgacctactgaactatcgaatgaaattgctaatgcttcctccatgatttcagggatagccccaacaccaggaagtttcttgttctgttctgccagtggtttttctgcgttcgcctggatttcgattgcacgagaaagagcacgatacattgctttatctttgcaatatgtttccgtttccttcattagccaatctaaatcttctggcgcatttttcagcgactgaatcgcctttttcgtgtcttcgtagactacatcacttagatttcgtttgtcaagcgcaacctctaaagcagtttttgacggaatgccgttgaattcctgtacatgtttatcaatgaggtcaaacaaaacttgcgcattgccttcgaaatattcctttttcagatggggccatgcttggacaaaatatgtcccgttataaatcaggttagaaaatattgtatcaacgatcattgtattgccttataccaggttgctgaacatcatgaaaaagttgtaaaccttttgtttgaatacatcccataatgtcagtttaggctttgggacaactgaacccttttcaagctctttaatctgtgcataaattgcatcatgcaccagcgggatcaacgcttctttgtcttcgtctggggtactgaattctactttcagcccatgatcccaaaacaccttatgaatataaaccagatgcgcaacacctttttcatcgttaatcagaagttcctgaataacatctttcatcgcttcatcaatataattctttgctttgctctcgatatccatacattgcctcggttatggggccgaagccccatatttttataaaatttcgtcgttttcttcgatatcatcaaatgattctgggatatcgtcatcatccagatcaggatctgggatgctatcagtgctgtataaatcttccagcgcggaaccatcgctgatttcacgatctgggatcttatacttttcttcgatagctttcaagaatggttgatgagtaaacagaggacgccagaattcaacgctatttgtttctgactcacgccatttcttttcttcaacttcgagttcgccagtctcagtattcaggaaagcgcggttgcgccagcctttggttacggtctgtacaaagttcatttccattgccagatccaaaaggccagaatacatactaataccgccttcataggtaacatgcagcgggaattttgatttctctttcacgaatcgagatttttcgatattcatgatgaaatcataacccaccacctcagtaccttctttcacctgttgtttacccaggatgatcgcagtatcagcggaatacattaaaccagtaccaccggaaataactttcttgctgtacatttcttgtgtgtcataggtatgacagatacaaaccatcgggatatccaggtcagccagataaggcgtaaccatacggaacataccttttaatgcttttgctcgcgtcatatcctgtttatcgttatcagacagcgcgtcagcaagttcttttttacttgccgtgttgcctactgagtcaacgaatacaatcaccttatcaccgcgttcaagcgcgttaagctggcttacaacgtcattacgcaactgctcgaccgtcgtgatacgagtatacacaacacgatccggatcaacacccattgatttcagataggatttagtaacacctttttctgaatcgtagaacaggcacacagcatcttcatacgttttgagataagccgctacagtcagcaaacctaagttggatttgaagtgtttggacgggccagcgaaaagggtaagaccagaagttaggccaccgttaaacgcaccggacaacgccagattcagaatcggcacacgggttcgcgtgatggtaatattgttgaatacgtcgctttcagaaagtacagatgcagtttggctattcgagtttttgatcagtttttttagtagtgctttgtttgacatttaatttttccgatttattcattgtcattctatatatctcactagttaatgaaaggggccgaagcccctagagtttaccagtcaccaaacaggtcgtttaaactggcacgtttttcataatcaattttacatacttctgtgatgttagtcaatggactaataacatgtttttcaaacatacccggataatctacccatgcgagaatatcactttcgatctctgctggtagtttatttccggattgccacgcgatgcaatcagcttgccacgggtttttatcccttagtggtagaaccattaccttttcaccttccatgattggcgtaacaccatcaataccagcagtgaaacggttaaagaacagcacccctttaatatggtttggtgttccttttattggatatccagccccatcacgatatttcgaaatgttgttggcagatgatacaccagcaatttccctgtagtcaagtgccttatattcttcttcgaactttttataatgttcgtgcaaagataattcaccttcttgcaggatacggcggatcgcttctttcaggaatactttcacagaggtcggagtactcgatcgctgtgtttccatacccatgattttcaatttcggtttttcatagcgggttccttcggagtcccacacgttagccgcatatcgttttttagcagtccagaaacttcccaacccttcggaacccaacggaggcccagaaatgatttcacgatccataaacatcaggtgttccacgttgttcatgtattcgcaaagttcacgataccctttatcgatcatcggttccattctttctttagcaaagcgatccaggaagtcaacccaatggttattatccttaaatttagcctcaccgccaacttttgcaatcacattatccatgcaaacataaatggagtcagtatcacagtatcgaacgtatgcatgatccgtagtaccgcacaggtcgttaaggtattcgtttaccttacgttcaatccactggatagccaactgcccgaacatggtgatcgcgctggcgtttcgtagatcgaagtatcggaagtgttcattacccaacgcaccataaagggagttgatagaaatcttacggttaagctgtgctgtgttcgcttgtgcgatcttcttctcacacacgcgcttaactgctttaagcatttgttttgtaagagttttcagaactgctttcgattcatcactgaaatctgtatagaaatcaaagtcaggatcaaccatttggttatgtgcgtctgttaagtgttcgagttcgtgcttgatgagttcaagatttcgctcacccgccatcattcgttttttccacatcttacgctgatcaaatactttcttgatctctacggggatcacgcctttgatatcacggcggaacatccacccgttaggagaacagctaaattcatcgctagggcgcggcgcggtcttattaatatactcttcaagagcacgtaccgcaaaacttcccataatcgtttcagggcttatattcacctgtcggatgatggaagggtacaggcttgttaagtcaaacgataccatgtatttgtaaggcccaggaactggatccttcacaaatgccccagggtaaggggttttagtatggcgtctgttttccggaataacaaccttatcttcacgcagagagttataaatgatcgcgtcccacgttttcagcggagacataacccctgggaagttaatttttgcatagtacgctacagacagaaccagttcaataaagtttcgtttaccgtcaatatcaagtacgcggataacgtcaacaatgttgtacgtgatgtacagttggtgatctcgctggcgtagttcagacagtgaaccttcatactcaactttatttttaccagtttcgtattccgcgatcgcgtccagacggtaagatggttgtggggtaaaactgaatttcttatacagcgccataccatccatttgagcaacgccggaaatgtcatatcctaattgttcgttgccgtaagcgtcggtagtggttctggcggttactttaccaaatgggctaaaatgccttaccacgttttgaccgaaaatgttcaggtatcgcgtgatgatatatgcaatatcgaatttgtcagagttccatccggttacaataacaggggttcgctctttccaatctttgatatacgcagacaataacgacttctcggtctggaaagaccgataaacaattttgtttaaatcttcttcgctaatgtcttttcgatcaacgtttgccgcgcaccattccgcaaggccaccctcaaccagatcgtatacatagaatttatcttcaatgctatcgtaatgggtaatcgcatcgattggatattttgcttcacgcggatccggaaattctggggcggtcacctcgatatcgatagaagcaatgcgaatgtgttcgcggttgtattcgatttcattccggtacatgtcagaaatgtaagccagtcgataatcgtccatacctagcgcttccatcccaacatcgcgcatacgctgcatccagtttttagcttctttgatgctgtcaaactgttttttgaggcaaggcttgccataaatgtctttgtatggggtttctacgccattcatagcgtgttgatacattacgggcgcatatttcgtcttacgtacctgttcggtgccgttagagtcaacgaagcgctcataaatggtatctcccatttgttcaactgataggtaaaattcattcattggatcttgtcttctccattaatataatgttccattgtaacaccacctacagcaaattcaagtttactcgatgttctaaaaccaacaaaccttctgctaacaagtcacggatctttctcagttgaacaagctggcgttcaagtttaaacccgtcgaataacatgctgaaaatactggaattgacactatgatattttgcttctgcaattccctggttaaccatcatgatagctttgttaaccattagtttcctttccgttactgtatgttcatccagttgacaggttgcaagggaaaccaaatcatcataagcacgttggtcaataacgttatccatacgggccgcgaaaatcttattcatgtaagtgcggatcattgcgcgtcctccattcttttcataaagacttcttttgcttgttggatcaagcccagagattttttaatacgctcatagaaatgagtggtttcaacttgattgcataacaatgtgtactctgaaatgttacgatcgtaaaatccaggaaagtagtgttgtgcatagctgtaagtgcgggtatctgacagattgcaagttaacgataacaagatgtcatcttttacaatcgggatgatcaaagtttcgttggatttgattgaatccatgatttcgttaatagtcataatatatccctctcaatggtgtacaccaaatataacaaagcccctgcacgaatgcaagggctttttgattagtgaccgatccggtacttgtacttgaggatccaatctgctttttgcgagtgagtcagtacgcggaagttgttttcttctgcaaacttcaacccagtggttacgatcttaaccatgccccactcttcgagaagtcgcgcaatgttgttccggcgtagttcgtcttcttccgtcatatcgacttgacgaccatcaagtttcaacagttctttaaaatgcacgataaaatacttaccttgctttttcagaatgtggcacgattgccagagcattttctttttgttgttcgcaataccaatacgggttagcgtttcacggatctttaaaaaagaatcgtcgctgattagttgaatttctaacatacatcaccattgtttaatcaatttttccaatttcttttgttcagctttgtttttcacaatacccaacaaagacagagcgacctttgcgtgttttcttttccaatcctcgaacattccgaggtctttaagttcctgcaaatattccatcgctgtacgtgtatttacactgtatttttcgcgaaggatttcgataataattttctcttcaaaatcttccgatagtttagcccatgcaccgaagcgtttagccttcctaacagagttgagataatagttatagtgcatttggtcagagatactaccgcctaccagattcatcacataagcgttatatatcgtgtctatgtgctggctcattgcgttgtctacaaagtacttatcatacacatcatcgataaccaacggagttttaccgttgttgatttcgtctatgatgttaaacaaggtgttttctttatccttgccgtactctttgaccagttcttcaaccttatcccaatctttagaaagccaagcggattcatgcggggataactcttcttcatccagaaattccgccaggctcatgattacgcctcccagaccatagaaagcatcaggttcatcaacagatattgcagatgaatttctttattcatcgccagcccgtattgcgcgttgttttcgcctacaatctggatcagtgcgattttcgaatcctgattcacgatagggtaaatcgtatcagtcaattttccgataaaggtatcgtattctgacgcatatttaataacctcagagcgcaaccctttatagttcttttctttcaacagggtaatgatatgagacacatcagaaccaacgatctcatttaggatccctgcatcaatttcaccacgtttcgagtagaacccgatcgctttgataatagaacgcgcatccggataatgctctttaacaaacgctgcaatgactttaggatcatacttgatattctcgatttcaaggataccgaaacaacgcttgattaactgtttcatcagttcgatacgttcagcatcagacggaacaccgaatttaataggaggacaacgagaaagcagagcactatgcacaccgttaatgttgttcgccgttacaatcacagacacgtttttactgtatgcttcgataaagctacgtaagtgtttctgtgcttccgccataccagaacgatcgaattcatcaatgatgataatctttccgcctggtttctgcgtcattgatgaagcaaaacgatccagttcattacgaatgaagtttacaccacagttcgaaccgttgacaaagaacacctcagcatcaacctcacgggccaatacaagcgctagggtcgttttaccagtgccaggggaatcagatacaagggtcatgttctcaacgcgcccagatttgattatgccccgcatagcggctttgtcgccagaaggtaaaatacactcttcaatcgttgttggtcgatagcgctgatcccatgcaaattcatcaggagatcgagagattttaccgtatttggtttcgatgatttcaatattttcactaagttccataatataccttcaaaataaatggtgtaaaagaaaggggccgtagccccttaaaactatcttacttgaatgtgctacttgcttcaagtactacgacgtaagcaacgccgttatcagaagagaattttgcggcccctttggaggaaatctctactttgtaatcgctgttgatgaactgcatgttatcaatcttcatatcaaaattgaaaacattgtcgccttcatactcaccgacttcaacagagaaagttgattgactttctttgcttttcgcggtgatgaccagtttaccatcaatcggttcaacggacaggtcggtcagtttcatcatgcgagacgctttgatcagtttttcgaaatcgttagccgtaatctggaaaatcagatctgctactggcataaccagacgttttttcggtttcgggatcgtggttgcgtctgctgaacgttcgatgatcttcatcttgtcaccgcgaatcacgatttcaccagtggaaatatcatgagtgatttccgcgtcagtgccgacgatgttcagcatgttcaggaatgagttgagatcgtagataccaacatcttcatcaatcacatcagcaatttcagcttctgcgtatacaacgctgttgattgatttcgtcatgatgaatgaacctttggtcagcatgatcgaagagttgatttgagaaaagtttttcaggatatcaatagtttgtttagagaatttcatattcagcctttagttttcaataagtgttacttaataagtgattttacaacggtttccgctgctgtgtcaagcatatcagccatttctttaacggttgtacgcttaggatcttcgcggcgttcgctggtaagtttacgatgttccgcaaccactttttcatcaatgtcacgataatgtttaaaacgttcctcttgaggcatagctttaaacagttcttttgtttcgtccgagagtttagcaacccaggatttacggacgcggttcatgtagtcaacaaaaacattactttcattcatatatttcttctctaacttagaattctttgggtgggggccgaagcccccgcttgtattacatgtctaacagtttatccaggtcgtcatcaccggagctaacagaatcatccaggtcgaacggtacgccgtcatcttcgcctaccggaaccgatgatacaccaccagatgatttcacatcagatgtctgattgtcaaacttagccatttcgttatcgaagttgctcagttcgctatcaaggtcagcggaagcgctggaaccagcagaaccgatcgaactacccataactttattgaagcgagtagtcaggtcagccagcggtttgaattcgctttcggcggtgatcgggcggagatcgctcataccttcgaaaattgctttctgaacttcttcatcgtcgatgtttttgatcttagccggaacaccaaacgaactatcgtcatagttaggccaatcaccaacttttttcgctttcagggtgaagttagcaccatcaaacggacaggttacagcaatacccggttcatcaagttctggattaccgttaattgcggcggtgatcttgtccatgattttcttaccgaagcggtatttgaacaccttaccttcgttttccggagcgcctgggtctttgacgatcaggacgttagcccagaaactttgtttacgaccgatctggctcagtagcttatcttctggcccgtttttgttggctttagccttctcatacagatcgttttcggaaatgtacttacatgcaggacagccgtcataatcgccgtgggtagaggaacagttctcaatgtaccactggttgtttttcttgaaagagtggctcacgatacggacgaacgccagttcatcatcggaacgtgctgggaggaatcgaataacggcggaaccgtttttctgtgcgtccagggtcagtttccattctttctcatctttctggaagccggaaccacctttcagatttgctacctgtgcctggagtttagcgggatcttgacgtttaaaaatgctgctcatattctgttttctcgtttagtttagtttgattaacgtttgtttcattaagtttcgatattttatgatatctttttcagtaaggtcaaatatttttctgtatgcctttaacttaatgctaaagtcagaccaaataatatcatcagctacttgatcgtgtttatttatgatacctaaaaatgagtcaaaaatcaaaaacgattcgtaagatatcacatttgacaggacaagtttgcttatgtaggacgttgatgatttttcgctgtacttgaacaccagagacacggggatctctttcattttggcgaattcgtacacgtttttaacgtcatccacaaacacgttatctagtctttgtaactttcctatgtactgcctgtaaaagacaatactatcttcatcaacatcgcctacccagaaatccggattggctacgaagttggagaggaatataaaatagatttctttgaatgtaaagcgttgagctaattttacaaagaaatatctatcctttcgcttgttaaaggcgttttcactaactttgatctgccagttgtattgaaggacatcaaaacgcccctggaaatgagttttcatcgccagatataacttgtatacagacaaaggcacaagccgtgaattcgcctcactatcagcaaacggagctttaaatctcacatgaagccgtccagagtggttgatgaactatgttcaagcgcaaccgatgggcgaagcatgtttcctttgatcgcttcgtcgctaatcttatcaaggatcgcgcgaggaaccgttttattcagcatcgcataatcaatggaattttcatccatccattgtagcgttgcttccatgtatgttgccccctcagaggcaaccagattttcgatatacaaaccgacttcggtcttatttccgatcatgctttacgccttatcgatcatatcatacagttcgatcagttcgttgttttcttcttcgaaagcggtacgggcctgttcgtgatacagtttgaacagtttcccgaaggtttttccgtcgataccgaaatcagtttttgctttggatttaatatccttgaaagtaccgttgaagatctcaacttgagttttcacgttggatgcttctttgatcagttcttttacctgttttgctacatcagggtttgtttgtaaaaattctacactcattttgttacctcaaaaatcactcagtttttcgaacatacgggaaagtttgttatccatgaagtaacgttccattttggctttacttccggattttggagtattatacgcttcaataatcgaattttcaatatcttttggtataaattcgaaatcgcgtagttcctcattttctttgtaacgagcggcccattcaggggtcatcaacgttgtcgggtcgtctgcctccagccatgcctctaactcagaggattttaccgctggggcgcgttcgccttcaaccttcgtcacaatataatcatttctaattttaatacaagcgatactatcttttttatcgcctttgatatttttgtatcgcagatcgttacgtggcgaaccgtacttaggcgttacccattttttctggggaggcgaccattgacgaacaccgttatatttctgtagttgtgtaaagtcgctatcagcggaaaccactaatactcgtctaccttcaccaacagcttttttcgtaacaacagcaattatatcatcagcttccgcgaattcaacctttaatccaagataaggcatattctgacggatttcttcgaacactgggttcaggaagttgttcagacgatcccaatcccattctgattcttcatgttcgatctgacgacgttttttgtagtaccaggctttttgcctacgccagtaatttctgtcatcgaaggcaatcacgatttctggatactcacctttaaattttacaacgttaaaccgtaaagtgtcaagcaccagatgacgaatcatttcgatcgtgatggatgcttgttcctttggtttgaagttgttcatcagtgtagcgatggaaatgttagagatatcgatgaccatagtatcatcgggttccccttcatcttgcatcagcttgttcaagttaaacatgcttgcaaaactgctcatacatacctcaatttttcaaagaacggggttattgtagtaacttacgaaatgaagtcaatacaaaagaccataaaaattttgatcaataatacttgatctgatcaaatttatgatctataatttattaattaataattattttactacaatgatcattgtaggtcaagtactaaaatcaataaattttatataatttagatctgatctatagatcattagatctactttaaccttaaataatatagaatgaaatttgattttgtctacagttattatataatattcttaacttcaaagaggaaatatgaatactatgactaaagaaacaaccaatatctacgcagacaatgaaaaactataccctatcctctgtgcatggaaaaagcaaatcgccgaaacaggtgatcgcaaaatgcctaatgagttgggggctgctattatggatattgcaaacgggctatcacgtcgttacaacttcaaccgttattccgaagattggaaaatggatatgatcgatgacggaatttccgctgcaatctcaggactgcataacttcgatgaaactcgttataccaacgtttacggttacattaacaaagcatgttggcaagcattcgtaacacgtattctgtacgagaaaaaagagaacgcgaagaaatataaattcttccttgagcacgtttacgactgcgaagattcagatatggttagtattgcagacgaaggtttcattcaagatctacatgacaaactatctcagtacgaggcttccgccaccaaaaccaaagacaaggaagcggaagtattcccaacattggaagattttctatgaaagcaataattgacttaaacaaaatattaactgatatcgattacgaaattgacttgctaccctacttcgtaaaattggagttgcaaaacgtgggaatcccggttatcatcgatccaactgacgtaagaaaccccgatttcgaagtagaagaaggggttttgtcttatatgataaacgccgaaactatgatcatggagatcacttatgattgatgaagagaaagaagtactaaccagtgtggaagaagtggatccggaagaggaaattcgacaaaagatccaggcacgtgtagaagccgacgcattgaagcgagcacaaaaattcattaagaagaaccggactgagatcaaacgcctccgtagacacgcagaggaagccctattcaggggtaataaggttcagtatgtgtatgcggttaagaaacttcgtgatatgctcaaacagccgtatacagaggatttcattgatacgatgtggaacacttcactggcatcaattcgaaatatcgtagcttcacaacagaagcactaacaaacaagtagccccgaaaggggctatgagggtcttatgagaaagtacttaatgatcggggatacacacgctggcttgcgtcaggacaacccctggaatgaagaaaacctatacaatgtattcgtgcaaatcgtagaacactgcaaagcaaacggcattaccgaggctttccatgctggtgatttctttgatgtgcgaaaggccaccacacaaaccacgatgaaattcattcgtgaacgtattgtgccactactggaagaagccggattacatatctatgttctggttgggaaccacgattgccagtttaaagacaagatccgccctaactcaccgcgagagattcttgatcagtatgattgctttactgttgttgatgaaccgatgacagtaaatcttgatacttctccgctacaatcaatcgatttgatcccgtggatttgtcaagaaaatacacagcagatttttgatttcatcaaaaagtcaaaatctcaatactgcttaggacactttgaactgtccggatactatttctataagaacagtaaagcggatcatgggcttgaaccggatttcttaaagaaatatgatatcgtgtattcaggccactatcatcacgctaacgaaggcgctaacgttttctatatcggtacacctcttaccatgagcgcgaacgatgaggacgaaaccaggggcttctatgagctatcttatggcgaaggtaaacgtgaattaactttcattgctaacccagtatgccaccatcgccggatcacctatccggatcaaaaagatgttgatgttgccgattacaaaaattgctctgttcgtttgattgttcgcgaagttgataacgatttgcctaagtttcaaacaaaactggaagaaacagtttatgagttgaacattgtcgatcgtgtgatcactgattcagaagttgatactgactttgaaatcaaaagcgtatctggattgattagtgagtacatcaacaacatgcagatcactccagaagaaaagaccgaagtatctgcaataatgagtgcattgtatgcagaggttacgagcaatggaaatagttgattacgttaatattttaaacgaagaagggcgatataaagccctttataaaatgtttggatttgatgtgattgttgcagtacagcaggattcctataatgagtatgtgtcattggggttcactctgattaaagacaactatcacgaaacaaaggtttggacatttactgtcctgaatagcatggatgaagattccgtgatatactgctttgatagcacgattacaaacatgattagtgatatatcccaaaggataattgatgaaactcaaatttaaaacattgacttatcaaaatatcttgtcggtcggtaacgtaccgatcgtcattgattttgattcagcaaagaaaaccctcattacgggtaaaaacggcggtggtaaatccaccatgatcgaagcgcttacatatgctctctttggtaagtcatttcgcgatctgaaagtcgggcaactggtgaacagtatcaacaagaaaaaatgtctggttgaactgttgatcgaatacggcaatgatgaatataaaatcatccgtggacaaaagccgaaagtatttgagatctggaagaatggcgaaaaactgccggaagattcagccgctggtgattatcagtcacagcttgaatcaatgttgaatattaacctggtgggctttaaacaggttatcgttctgggtactgctggttatgtacctttcatggaactgaaaacaccagatcgccgtaaattggttgaagatttgctttctctgtctattatcagtgaaatggacaaactaaacaaatcatacatccgtggtgttaaccgtgaactggatacgctttcaatgcagattggacacgtacaacagcagatcgcaacacatcaaaagttcattgacgaacaacgggcaaaagcaaatcagaatacggcgcgttaccaggatatctacgattcccacgtagaaacagcaaaacagattaaagcgcaattagttgaacttcaaacccagatcgcagaatgcgtgatcaatggtgaagaccaaacagcaaatattcaaaaactgcgtgatggctatacacgcctctcaatgaacgtagaacagttgcagcgtcttgaggtgatgtatcgcaagggtggtgaatgtccggcctgtaaacagccaattagccccactcctgaacgcatggaagaaattgccgagaacattaaaaacggtactcagaaacttacgctgattaagaacaagcaagatcagctacagaaaatcatggatgatttactaacacaacaacgtacactaaatgggctgaaatccaaatacgaatcactacgcggtacacttcaaaatgaagttgcagcggctaaacgtgttcgggctgtcatggataaagcacaggaagacgtggtgatcgacgaatccccagttgaaaaactccgtgaagatgaaaaggaacttgattctaaacgttctggatttgtcaaggaaaaatattttagaggtattgttacggatctgctgaaagattccggcgttaaagcgagcatcgttaaacgttatattccttacttcaataaacagattgcgtactatctggatctgttgggtgctgattatcagttcactctggatgacgaatttaacgaatcgattaaatcgctgggtcgtaatgattttagttacgcatcgttcagtcaaggcgaaagagcacgtattaaccttgctttattgttcacctggcgcgatgtaaccagtaaaatttctggtgttgatttatcccttctgatcctggatgaagtgtacgatggtgcaattgatcgtgatggtagttttgctgtaaaagcactattggatgggataaatggtaacgtaattgttatcagtcatcaggatttggatccggaagatttcgaccgacatattgttatgtcaaaagtcggtcgattctctaaaatggaagttaagaagtcttaaacttgcagttatcaaaatgccagcgattcatattgctggcatcaccagatttattgcaatatggacaaatcaactgcttcctttttgctggcgtctttctatttgggttatttctgcaatatggtatatgtgaacgcagataatgtaatgacgattctgttccgcaatatggacaattgccccgttctttaggtacgtttccgttcttatgggaacacgggataccctcgaacttatgtttcaacccttcattacctggtttcagtttgcagttgtcgaagtgccaacgagtcatatttccaattatacccgattttccgcaatgaggacatacaaccctttcttgttgctttttggctttactcattcgctgtctggtttcttcggtgaactctctgttcctatgtgcttctgacgcctttttctttaaccattcatagcgacggttagctgttctttcctttgacctattggaaccaactgttaacatatgtgctgcaaaaacaagtttgttgtttcctgggtgcatcttgactaataacagatgtgcaatataatgttgacgtgctgtaagattaaccaaattatcatcagaatctgttccacctatgcacttaggtatgatatggtgtgattctgtatatccatcatactgcgtttgtttagcatgttctatgatagagttataaattttgttatagttcataaacatatctcttgtttgatgggccgttagatacccctatttaagaggatgaaattatgttattagaaaaatcttttgaattagaaaccgctccggaaatagagcggttttatctccacaacaattttcttgaagaaaaacatatagttactatgaaagatgttgaagaagcattcaaagataaccctatagagttgacgcgaatcaagaacaacaaaagttctgtttggttcctcgaaaaaatctattgaccgaaatccataaatacagtaaagtagcccatgtaacgaaacgtgggctttgtttttatttgaggaacaataaatgatcactgaatccaaaatgacttatcaggaagcactgaaagttttgggcgcaactggtagcgaaaccagcgctgaaatgtccagactcttcaaacgtgcatccttacgcaatcaccccgaccgtggtggtagcaatgaattaatgcagaaaattaaccaggcttacgacgtagttacaaaaactgggcctagtggcgcacgttctgagactgctggtgatgttcgcgcacgttatgcacgtcaaaagaaagaatgggaagaaaaagttgatgcttactttgtagtggcgaaaaactatttcagcaccaaatttaacgcacaggaatttgcggaatacttcaccaaatacactggattgcctaccactttcaaacaggaagtaacaaaaggtagtcacggtgtttatgcttcgttccgtttcacttctggtgatgcttactttgatttcggtttcaactgcacccctccgaatggacaagggttagccgctccggattcatctgcactgggtaacgtttctgttagtacctttgtactggttggaactaaaaaacataaaatggcaagccgtgattatcaatggggcaaaaacccagacaagatcactccggaaagcctgttcccgtctaaaaaactggaaagcattttcagccctgtacagaaaaatatcaaatacaaacgtgctgactacctggcgtcattccgtaagctgttaggcgctgacgttagcggaaacgatatctttgttgaagttggtacactgaaagttcgtttctatcgtcacgtattcatgcgtaaaggtgcgtatgtgtttagcgcggtgtatgatcctgctgtatctaagtatcgtccggctgcacaacttcgcggaactatgttcgaagatgaggacggcgcttgcctggatatgatcgttgatacgttcaaagagttgcagaaactgaaaccgagtgttcaaggcgttgtgaacgcgatcgataagatgaacgcagagtttgcagcgggacatcgttcagcatcttttgttaaacgtgtagctgctcaggaagccgcaccaaaaccagaagagaagccgaagcgcacagttaaccgtattggtaaagaggaatacttcgcagcactcaaagatattggtgctcgtgtaatgcctaccagcggttatgttgaatttgataacggcgctggtgttactatcaacttcaagcgtattgttgtaaaccgtaaagcatactactcattcagtagctttgatttcatgtactctggtcagaaacacattgagtggttgaaaggaatcgatatcgcagaagataccaaaggcgcaagcattagcctactcactgatactctgaaatctttacgtgggatctctgactggaacactgttaagagcgctttagatcaaatgaattctaacttcaaggcgggtaaattctccgcacctcatgtgaagaaggaagcagagcaaaaagcaccgaaacagaaagacgaaatcggcgcacagcctaccaaaccacaggcggctaagaaagatacaccggaagtggaaaaatcacaggctgttcatgcagcacgtgagaaagcgaatatgaacaacactattcgtaaaatgatgactatgttagtcaaagcacagcgcaaagacactccggaagatatcaagaaggaagttgatgcagcaattcaattgtggcgcttgacttattaatcaaatgaactataatgggaactgttaacgcagttccctttttatttgaggaaaatattatgagttgtccaacatggttacgtttggaaaatctgaaagaaggtacacaaaaacggatttatattaatcttggttgggttcctcctaccgattttcaaatggctgagattttaatcaatgctgttaaagaagtaagcgacacttacgaatgggaaaggctctattttcctttgattggtttgtatatgacgcgaaataaatttgaagaaatgaaacttgctgttattcgcgctacgattattaattcccaacaaagatttactttgaaaaatgcatggagttctgaatgattattcaagtatctgtacagggtgacactctgactgtcaccgaatccatcaataccgctcttgctgtatgtcgtgaccatatctcacaaaatcctccagtgactgagatcctggaaattgatgtttgggatcagattgggatgatcgacgcatcatatggatttaccccgcgagatgaagaactatctcgtatcgaatcatggctgaatgaacaggaaacggaatgaaactccctaagaacacaacactactaacccgcgaaaaacttcactctgttgattggtgtcctctggatatcatgatttttgatattgaatctcgcgtgatcaatgcaaaatatcaggggtgtagtattttctctgttgaattcgagaagattcgcggatatgatgagaagtacaaagaaaaactgaaagttatgattgaagcattaggctatattgtaactgttgaagacaacaaaatgtggatcgcaatatgagcatagtaaaagcggtgtttgcattgggaattgatatctatcacgatgatttcgcttttggatatcagcaagggttgccgtggggccactgtaaagaagatttgcagaacttcaaagaagaaaccgcagatagcgttttgatcatgggtgcaaatacgtttacctctcttccgggtaaacttcctggtaggatccattgtgttctgtctggttcaggtagttttttgaaaaccaaaaaaggcgacgttgctgattacgtgatccacggtggcgggttgtctgctgctattggtacaatgcaagcaacacacccagataaaaatgtatgtgtcatcggtggtaaggggttgcttttagattcaatcaataataaaatggttgatgaagtaattttgacaaacatttacggacatcatgtgtataacgcaccagcgtttaaacgtgatgttgcatttactctttctgaactgggtggcgcattattaaaatatgaattttctgatttaaaaactcagtacataaaagaacatgaacgcattgaaaaaatcgtagttgaacgatataaaaaggtataaaatgaaacaatatctggatattattaaacttgtacttgataacggtgttgaatcaactgatcgcactggtgtaggtactattcgtattttcggcgcacaagcccgatgggatctaaacagaggtttccccgcaactacctgtaaaaaactattcttcaaaccgtgcaagcatgaattgcaatggttcctgtccggttcaaccaacgttgaagaacttcgccggatgacctggggtgaaaatagcgataagcgcacaatctgggatgataactatgaaaaacaagctattgatttaggatacgattctggttatctggggccaatctacggtcatcaatggcgttcgtttggttctctttatggggatgatgatagttattatggcggtagtggtgttgaccagatcgcaaaagtcattgaacaactgaaatcaaccccagacgatcgcgggatcatcgtttcggcatggaaccctgttgatcttgatgatatggcattgcgtccgtgtcactgtttctttcagttcgttgtaatcaacggtaaactgtctctacagtggtatcagcgttcagttgatgtcttcttagggttgccgttcaatatcgcctcctatgctctcctgacgcatattatcgctgatatttgcgggtacgaagtgggcgatctggtttggactggtggtgatgtccatatctataaaaatgcggttgaacaggcaaaagaacttttacagcctaaccgttcaccaatgccattaccgattctaaaaatgccgaaggtaaatagcttacttgatttagatcaagaattctttgactcgataaccttagaagggtatcataatcacggctctctaaaagctgaaatggcagtatgaaaaatggggcttcggcccctttcttaacaaggtaagagaatgaatgacattaaagtagtagtaaaatcctctggtgtacgccagccgtttgacaaagaaaaaatatacaaagtgctcaagtgggcctgtgatggtcataatatcgatgttcgtgcattccttgaaaatgtattagaactgatccgcgatggtatgactaccaaacaaattcaacgtatcgctatcaagtatgcagcagatcatatttctgttaaagaaccagattggcaatacgtagcatcgaatcttgaaatgtttgcattgcgtaaagacgtttacggtcagttcgatcctatcccgttctacgatcacatcgttaaaatggttgaagcgggtaaatacgataaagagatcctggaaaaatacagcaaacaagatattcaagttttcgaacgtgcaattgatcatgataaagattttgaattttcgtatgctggttcccaacagttaatcgggaaatatctggttcaggatcgcgatactggcgaaatctttgaaacccctcagtatgcgtttatgcttattgcaatgtgtctgcatcaggaagaaactgggttagcacaggttacgcatatcattgatttttataacgcgatttccgatcgcaaactgtctctaccaactccaattatggcgggtgtacgtactcctacgcgccagttctccagttgtgtagtaattgaatcgggtgattctcttggttctcttaacgctgtaacctctgcgatcgtgaagtatatttcacaacgtgctggtattggggttaacgcgggacatattcgcgcaatgggttctaaaatccgtggtggtgaagctgttcatactggtgtgattcctttctggaaacatatccaaaccgctgttaaatcctgttcacagggtggcgttcgtggtggtgctgcaacactgtattatcctttctggcatctggaagttgaaaaccttctggtgttgaagaacaacaaaggcgtagaagaaaaccgcgttcgtcatcttgattatggtgtacagcttaaccagttgatgtataaacgcttaatgaatcgtgattacattacgctgtttagtccggatgttgctaacgatcgcctgtatgatctgttctatgaagctgatcagactgcatttgaagaactgtatgaaagcctggaaaaagatccaactgttcgtaaaaaacgcatcaaagcggttgacctgttccaacttttagcacaggaacgcgcacagacaggacgcaaatacattttcaacactcatcacgtcaaccaacagggtagttttacggttcctgtccgtatgtctaacctgtgttgtgagattgcgatcccaacgtcgccgctggatgacgatgataaaatggctggtgaaatcggattgtgtacgctaatggctatcgttctggataacgctgatatcagcgaattcccgaaactcacacgtattgcagtacgtgcgcttgataacctgctggattaccagaactaccctgtaaaagccgctctgaaagctaaacagcgccgctctctgggtgttggtatcaccaactatgcatcatggttagcaagcaactattgcgactactcagaagcgtatacagacaaagttcatgagctaatggaagcgtttcagtttaaccttctcgttgcttctatggaactggcgaaagaacgtggtgcatgtggattgtacaacgataccaaatacgctcgcgggttactgcctatcgattggtattgcaaaaccgttgatgaactggtagcacctgtttataattgcgattgggaatggttacgtagccagattaagaaatacggcttgcgcaactctactctttctgctttaatgccttgtgaaagtagttcacaggttagtaactctaccaacgggatcgaacctccgcgcggtttagtgagtatcaaatcttcgaaagaaggacactataaccaggttgtgccgaaccagaataaccagattgatttctatgatctgctctgggatatggctaaacgcggtaacaaagggtatctgtctcacgtagcagttatgcagaagtttgtagatcagtctatttctgcaaacaccaactatgacccggcaaactatgaagacgggaaagttaaaacagaagacatcattgatgatctgctgtatgctaactactacggtgttaaaaccctgtactatcataatacgcgtgatggtgctggtgatgaagatgaagccgccgacgattgcgcgggttgtaagatttgattaatgccccttcgggggctttttaaaggtaaagacatgttaacagtaatgaatacaaacccagatcataaccacttagatcaacctatgttttttggtgaagatactggtgttgcacgttatgaatcgcagaaacacaaagttttcgaaagcctgacgcaaaaacaactttctttcttctggcgtccggaagaagtcgatctgtctactgaccgtatgcagtatgcaaaacttcctgaacatgaaaaaatcattttcgattctaacctacagtatcaaaccctgttagataccattcagggacgtgggcctaacctcgcatttttgccaattgcatccgatgtgagcatggaaacctggatcgaaacgtgggcgtttagtgaaaccatccacagccgtagttacacgcatattcaacgtaacttacacatcgatccttctgtacagttcgaccaaatccttcgcaatgaagcgattatgaaacgttccgcatcaatgacacggtattatgatactctgattgatgaatgtcataagctgaaaaccatcatgatgctacaggaacaggttagcggttataaaccaaatgatccggctgtcgtgtattataacgagcaatacgctaaacaggccactaagtgcaaagaagcgctgtacctgtgtatgcacgctgtgaacgctctggaagcgatccgtttctatgtgtcgtttagtttcacctttaactttgctgaacagggcaagatggaaggcaacgctaaaattatgcgcctgattgcgcgtgatgaagcattgcatcagaaaggtactcagagtaaaatccgtttgtggcaaatgggtaaagatgatccagaaatggttgaaatctcccgtaggctgaaaaaagaagcaacggcgattttcctggaagtatatgaacaggaaaaagaatgggctgaacatttattctctgttggtgatgtagaaggtgtatcgctgaaaagcactatcgcttatattgaacaccttacagatcagcgtatgcgagcggtagggcttgattcaccattcaccccgatccctaacccgtatccgtggatgaataaatggctcaaaagtgataacgtacaggttgccccgcaagaggttgaagtaagttcttacctcgtcggaaacttgaatactgaaatcagtgatgaagcgtatgcaaaatgggccagcaaatacgcgtgattgtcgggtagtaaacaagtacaaaactgattgggatgtcgatattcaaagaggtacgaagttcggcaacccttatcacacaggaacaaggggagaaaacattttagcgtttatcccctggttccagaatcaggttcgtactggggcgatcacgattgaagaattgaaagaacttgatggtaagaggcttggttgtacttgtgcgcctcttccctgtcacggtgattacatcgcgcatgtggttaatgttttgtgtggtaagaaaagatcacttgactttttggatatataatgtatgaaatctgaattcaacttaacccttgataaatgtggtcgcatcgatcgaagttttgttaagtgtggtgaacttaggcattgtgtttattttattgcaattaacgatgaaatagtatatgttggtaaatgtcgggatatgtggaagcgtttagacacatatcgcaatgcaaagtattggagagaagccaaccccagcaacatcttaaaaacgtgtcgattggaaatggctatcaaaaaacgaaaaactgtgaaacttatcgtgactactcacgatgaaaatacatatcatgattatgaaatcaacatgatacgaaaatacaaccctgaatggaataaacagcactatgacaaaggcacaaactaaaattatcaataccctttacaaacaactcatgcagttgtgtggtgaatccgaaacatttttcttcgttgatcaagtaaccgtgatgggtacacctgttcgaatctttaactatcgcatggcctcatatacagactggctaaagcctggtgctctggaatgtcgcggtatcatgtttgaaatggatggagatacccccgtatcaatcatcagccgccctatggagaagttttttaactatgccgaggtaaaggcatgggaagcgcttaacgagtctcctattgaattaggcgaagttttagacgtgatgattaaagaagatggttccttgatctcaactttccttgacggtggatttctggcggtcaagtctaaaggttcggttaaatcagaacaagctatggatgcacaaagtgtgttaatggcaaaccgtgaattgctgacccgcttaactgagatcgcaaaagaaaactatacggtgaacatggaatacgtttccccgaaaaaccgtattgtcgttggttatgattctcctgatctgcgtatcctgaacgttcgtcacaacatcacgggtgaatacatcccttatgatgaactctttgctgacgcgctgttacgtgcgtatctggttaagcgtgagaatatcgaagtactggatctggatgcattcgcaaaagaagcatatcagaatgaaggattcgaaggctatgttgttctgacaacgaaagggtttgtaaaaatcaaaacaaactggtatgtcaatctgcatcgcacaaaagatagcattaccaacaataaggatcttttcctaaatattgttgagaatacggtcgatgacctgaaacagctattcagttcggatctggtctctctgaaaaagattgacgatttcgaaaaacttttccttgatagtctcaatcgtttgagtgcaaaagcgttcaaagccattgaagataataaagggaaatcgcgtaaagattttgctatcagtctaagcgcggatttgtcaaacgacggtcggatcatcttcgggcctcttatgaagtacttcgaagaaaccgatccacaaaaactggtcgatcgcatcattgaaatgatggttaaaaattacgatcagttcattcctgaacaatataaatgaggttcataatgcctaagatatcatcttgggtatggcctgtaatcgtggggctatctttgatagcccttttttacattgcagtcgataccaaaatcgaaaacgcatcgttacgtaaggatatcaaatctttgcaagatgatgtgaagaaagtaaaagagacaaatacaagcaatactgttatctacgtggaacaaaaatccaaagatcagcagttagtcaaggatgcagggcgcaaacaccttttgtttgagaaacctggattgattgaaatcaaaatcaacaaatccttcgacgaatacatgcaggaatttgaaaaatgaaattagcaatgatagtattacttggtgtttttctcgttggttgtgctgaacagccacctgttaaggtacttcctacgctacccgcaaaggttaacccagtgaaggtaaaatggaaagtaattgcagacgttagagaaatcgacgggaaacaatacctcgtaatgccatatgatggtaatccttatgttgcattgacatatccagattcattgattttacgtagctggatgaatgacgttaaaagacaaaaggatcaaaccgataatgttctgtgtacgttgggataccctgagaaatgcaaatcaaaataaccaaaacgttttttcgtgacataacagaaggaaaagtttatactgcgaaaaaggataaagaaggtctatggatagaaaacgattggaaccgtgatatgtggctcaatcttacgaatgagtataacaaagaactaattgaatatgagatagtgaaatgaatctgtttatgactattggcgttccgggtagtggaaaaactacctgggcgcatgagaaagcccgtgaattgggtaatactgttacgatctctcgcgatgatctgcgtagctctttgtataatgctggtaaaggtgctggcggatacaaatacaccaaagcgaaagaagaaatgattgcagaaatgcaggatcacgttgttatctccactctgaaagatggtaaaaacgtgatcatccacaacacgcatctgaaagaaagtgataaaaatcactggcgtgaaattgcattggaacacaaggcagattttcatattgaatattttgatgtgtccattgttgaattgcttcgccgtaaccacaaacgcggtcgtgatgcattacccgtttcgcgtgtttgggaaatgtttaaccagtatcgtaagatccgtgggttcgtaccagcaatggaaatcgtcaatacccacaatcagaagtgtgtgatctttgatgttgacggtacgctaacaaaagtagggcaacgtagcccgtatgactttaccaaagtgatcaatgatccgccaaacatcccgattcaacaactgtttcacctgtacaaaaatgcagggtataaatgcatcgttgtatctgggcgtgaaggtaatccgcaatgcgcacatgatacatgggttagcctgttaagttatggtgttgaaccggatgaaatttttatgcgtcaagaaggcgataccaggacagattttgaagtaaaagaagaaattttgtttgacaagattttagataagtattatcctgttattgcagtggacgatagagacactccggtcggaatgtggcgagcaaacgggattccgtgcttacaagtcgattatggtgatttctgattgacatataatgtgggtatgttaaagtacccacacaaaagaggattacattatgaacgttattcgtgaagataaaggcatcatggttgaacttggcgatcgcattcgcgtagaaaatctgggcgattttaatcaaaaagttcgtttgttgtgccaaaaaattgctaacaaaatccaggaacagagaaaagcaccaggcgggtttgaagttagcgccactccggtttctcagtactcgtacattgtgtatattcatgacgtggatactaacagcacccaatctttcgggctggtgttaaatcctattactggctacgttacatgggcggttgtattatgaacgtaaaaattattgatagagcgatgatcacggacgaatctgtatacccggatcctcgttattatggcggcgttttcggatacatcaaaggaactgatattgatgtagtaacaagtccgatcgctgaatatgatatcaacaaaaatcaaacagaagttcgcgttactacaatcaacggttcagaatatatcgttgaagcgactcctgattttatcaaacagttactaaaggtgatgaaagatgcttgatcatcctggctctatgagcatggttctcctggaagcattaaaggcatatgatatcccttgtcatttcggtgaagtaaatgttaatactattgttgacgaaatcgacaacccaaatactttcattgcttgtcttgttcgaaaattcacaagttgttttcgtccgagtccagaaaaagtagtgattagttctgtttctgcacatcatcgagtgttggatgatagaaagattcaagtttactggaaagttctttatcacgtggtgtatcatgaagattgatgatattatgtttatgcttagagcaataagcgcttctaagttctctcaatgtgtctccgttaatgttggtgctgcgttgagaaatggtaacgggcgtgtgtttgtaggcgcaaataatacggttgatcctagtcatcgttgtacagatcagtgcaatcacttattagatgataacgggaaactgagtgaagaaaagcgccctgaacattcacaatggtcagatcgcaacgaagtacacgcagaaatgcgcgttattatgctggcggcgtctcatgaacaaatcaaagacgcaactttgtatacaactcattccccttgctcacaatgtgcgaaaaatatcgaattttgtgttgcaacaggtatgattaagcgtgtagtatatctacataaatacgatcgtggtggcatcgagtggatatggcgtctacagcaatacggtgccgaagtagtacaacttgaccccgaagaaatgaataaacatttccggatcaaataaccaatgagtaaatgtatgtctgaactgagtgtaaaagcatcctttgaatatgttctgattgaaaccaacgctaaagcggctggaactgaaattgtatcaccttctggtattgtgactggtgttcgtcaacacggcgaggaaccgatctacggcacagtgttatcatgtgggccggatgtaccggaagaatataaaaccctgcttatgggtaagcgcgtaccgcttcctcatgcacaaatggcaaacgtgccggatcctgaactgattgcaggaaaggcaacaaaagaagaagctcgcaagtatccggttaaatatgtaaccgcacactataaagcgattcaagcaatttacgaataagagatccaacatggctaaacaaattcaagcaatcatcgccgataccgtcgcaaaatccaaaaaacttttcgacaaaggcgacatcctcgaagcaccgacccgcatcgatgtaatgacttcaatgatcattgatgctcaccagggaaaactgaattcccgtgcttcggaagtaatggaatacatcgtacagttcgaggatgtatgcaaatacgccaaagctgttgatccggctgttcgcgaaatctaccgcaaacagttctaaaaatattggccccttagctcaataggtagagctaatcactcataatggttaggttcccggttcaagtcacgggaggggccaccaaacaaggcaaggcacttagagaagcgggaggaacagaatctgattctgttggttgtaggtgcaaatcctacccttgccaccaaatttgggtgcgtagcgcaatgccgttaaatggttcggaatatgcaaccttatccacgggaaaggctctgttggtatccggtaataggttccccggaatgcggggtgaagtaaagaaactcccagcccactaattttaatgaggtttatatgaaatttcgtgaaactgtgaaataccataacgcggtcgaatatacacagatttttgttgatatgtctcccgcaaaattcaaagaacgttatggcatgacatttaatgaatggaaagatggattgcccgatggggactaccgaaaaaacttcaaattcaatgaatgttatgtggatgatgatccttacgatctggatatttttggtaaaacaacgcctctcattgagaattcgccagaacagctttacgaatcttgtattgactctgcatacgaaatttaaagagataacatgaaaaatttacaaaaactgtttaaaatgtctccgacaattagaaaaatcatcggagaaagcaatccaacgaatcgcaataaaaagttgatggaactttttgtaaaagagttcgatgattttgattctgaacttcataaagcgcttgaggcatattccaaacaagggttctttgcatcgccgcaagtgaatagtaagaaagagtatagcgaacgattctttgattgggagattgtcaacctcgttcgtagaacaaatatatctccgagcaatcaccaattgatttctcttgatacttcggtattctttatccagtatcttatcagtggtggtttcaaaaatcctgaaattccgtttacaaatgaagcagttagcagtgaatttgatgaatcatttgtatacatcagcacaaacaaataatcaaatggctatcttcggatagccttatttttggggtgtctatgcgctttttaaagtatgcaagttggatcgtactcgtccctcttgacattattactggagtattagcaattctgtttgccccgtttgttgtaccgttctacaacgagaaaacagggcatcttcctaaaggcttccggtggatggaaaccttcgataaccctattgatggtgatggtggacatatccgccgttgggcgtctatacgctatcatctggggggttttggggtatacatgcagcgtgttggctggttgtggagaaacaaggcttataacttcgcatatcacgttttaggacgtgaagcgacaagcaaattcaactggaaaggcaacccaaaaacagaaggtgggccaaaccccgtaaatcatggatatctgctcatgtggaacgaatcagcatggggtttgtacgtttacaaaccgtggctacggatccacaaagtgcaattctgtttgcgcgtttatgctggatggaaactgaaacaagaagttagcgacccagttaacctggatcgtgcaatgctggcgtttcatttcaacccgttcaggtattatgtaatcaagtaaaggtaatacaatgaaagcatttcaaattttagaaggtttgcatactggtacgatctatctggaagaaggtaacgacgttcggatcgtagtatcaaaaacattaactatggattctgtgatcggtaaagctcgcgttactccgtttgaaaagcgagagattgagatcgaatatcaaccaactgttaaggtggaaggtggacagcatttaaacgtaaacgtgttgcgccgcgaaactctcctggatgcggttgaacatcctgaaaaatacccacagttaacgatccgtgtttctggttatgcagtgcgttttaactcactgacccctgaacagcaacgcgacgttatcgcccgaacctttacagagagtctataatggcaatttctgatattacgggttataaaccccatactgataaaaaagtagaaacagtaaaccgtatcaaagatgctgaaaatgcattaggtgcaatcctggaagatatcgaacagcgcctatcaaattcagatattgattcgctgatagatgaagaattagatgaggtgcttgaacgtatccatcaaattcaactggcgaaagaccgactgaaagaagcctctatgtgggcgtgtcgtgcggtgtttcagcctgacgaaaagtattaaaaatcaagccgttgccgaaaggtagcggcttttcttttttggtgtaaaaagttgttgactcccttctcacattcccttatagttaatcccgtagacaagaaaacacttttatgaggatgacattatgaaacgctcttacaacatgaatgaactggttttcttcaaaactcgtcgtgaagcacgtgcttacgttctggcggctggtaaaaatacttctgctgctatcgatatgggtactgataaagctgttggtgctcgttgggccgctgttatcgttatcgctgctccggttactccggttaaaactctggtacttggtgcgcgtcacgccgaaactcttaacactgctgcaagcggtaggggccacgaagttaaagtgttcaagaagcgttcttatctttcatgtgcaaggggttaactatggcacgattcatatataaagtggaatacgaaaatactgagttatctgatacctttttgaaaatgattcgtgatcacgggcaacgtctggaaagagtaacgattgatactgcgtttgattgtcctgttgggttggttctaacattatcttgcagccccgcaaaagaatcagcccgtgtcgaaatgttacataaactaaatgcattttatgaaggtggtagtgtatggcgagtattgtaaaatttttcaccgactcagtgaaagaaattaaaagcgctctggaacaatggaacactcgttgtgatgtatccattaaatcagagtacgaaacaacttatgatcgttatgatccggcccgtggtttgcacaataacccccatgaggtggaagtgtgaaatactacggattcaaaacgagtcattttggtaaagcgtatcgtacagaaaacatcgatcgcaaacgtccgtactatgattctttagtacgcgcgggacgcaaacgcgctcgccaggaagggaagaaagaaggtgaagatcgtggataattggaaaacatgggtatcaattatcgttggtgttatcatcggtcgcggtttgtatgatttaatattttcggcgggggttcattatggacattggttcgggtagtcagtacccatcatgcgcgttaagcaacttcgctccgcatccgtttacgtttgacggggtagaatgtgcatcaatggagggctttttacaaagccttaaattcagcaacccagatatgcaagcccatgtatgtactctggtaggcaaggccgcaaagttcaaaggcaaaaagaaaaaatggtggactaaccagaccttatactggaaaggtatccctattcatcgttcctctgaggcgtatcaaatcctgattgaaaacgcatataatgcgttattccttaatgaagggtttcgccgtgcgctggcagcaaccggaaaaagtaccttgacacattcaatgggaaagaataagatgaatgaaacggtgctcactgaacgtgagtttgtccgaaatttaacccgattgagagatctgttatgagtgaaaaagaaagagtagaatgcgtgttcctgttcaaaggcgcgattaatccattagcgttaatgtatgcgcaacatgcattacgttcaacgttgattcagagtgttatctataaagcaggtgtgtattatgttaccatcggcgcaaataacatggttgttattgaatcctacgttaaggaatgtgcatcaaacggcgttgtctttgataaagtcgattttgatgcaggggtagacgctgtttatatgtataagggttgatatgagttacgtagtttatttcgattgttcggatctcgatccgttcgtgcttcaacaggcaaagaaatatcatcaggatgtcgttggcattggtgtaacaaatgatgatatgttgtgcatcgaatttgaatattatcggacatttgagcgtgaacaattcctgggtgaattgaacgcattcaaaagtacccttttctttgatcgttatgaggttatatcttgaaacctgttattcttaccgatattgacgggatcgccgtaaaatggcaaagcggcctcccgttctttttgtctaagcacaacatgcctactgatattgcattagaaatggttacggatgaaaaatttcgtgatatgactgaaatcttcggatgtgatcagcagttggctaaaatccttatggaagaatacaataacagttctttcattcgttatctgaacgcgtatgatgatgcattgattgtgatcaaccgtctgaaaacgcaatatgatttcgttgccgttaccgctctgggaacaacaccaacagcaagccttaaccgaattgctaacctgaatactctttttccttctgcgtttaaagaggtgatggtcgtgggccacggtgaaacaaaaactcatcgttacctggaagcgaaagcaaagtatggtaatcgtctggtttgctttgtcgatgatctcgcgataaacttaaacgaatgtcataacgtcattagtcagttgccgttattccatatgttacgtggtgaacgtgaagaaacaaatgcacctcaccagttagtaaaatcgtggtttgaaattgaagagaaactaaatgatcttgtcaatccttaatgaacttgcttctactctgaaaactaaagagaaagaagcaattttaaaacgtaatgcagataatgaattgttgaaagaagttttccgcattacgtatacaaaacaaattatgttttatgtgcgccagttccctttagtagaagggaaaccaggaacaacaccgctttccgatgcaatcaaagcattgctagaagatttagcaagccggaaatatacaggcaatgcagcgcgtgatcgtttactggatattgtatcatcagtgaacattaacgatcgtgaagtgctacgccgtatcattaaccgcgatctggaatgtggtgctggtacaaccttaccaaacagggtatggaagaaactcattcctgaacagcctcaatgcctcgctacgccgtttagtgaaaaggctttacgtcgcatcattttccctgcttactcgcagcttaaagccgatggtgcgcgttgtatggctgatttgctggaagcattaaaccgtaaggtatcgagagcgggtaacgagtacgaagggttaactcagcttgatatcgatctgaaaaagattcgcgattatctgggatatgatgtagttctggatggagaattgatttatgttccttccggaaccgtaccaacattacctgaacctgaaacagacatgcctttttctttatctgctttcatggacgatgatgataacgacattgcgttatttgcggaagaagttcgcaaagtatcgaccccagaagaagaacaggccgaagcaaaacgcgaagaagggaacgggatcgtaaacaaatctctgaaagggacgatcaccgaagaagaacagcgaaacattgtttatgttgtttgggatattattccatatgaggtgtattacggcgaagctgaaagtgttcagacttatgatgagcggtttagcctgttgcgtgatatcctcctggatctttctcttccttctgttcgtttgattcagtctaagctggttaataacattgcagaagcgaagcaggactataacaattaccgcaatgacggtaaagaaggttctattctcaaaaacagaaacttcaaatggaaagattcgcgagtagccgatcaggttaagctgaaaaacaaaaccccgattgaactacggatcattgatatctacgcgcacactaaagaagaccataaggtcggcgggtttgtggtggaagatttatccggaatggctcgaacgaataccggatctgggttaactgataccgattatcgttacgatgatgatggtattacccgtgtatacattccattagatgaacgtggtgaactggatcgcgaatacatcatggcgcataaagatgaatacattggggccattgtagaaatggaagttgacggcctccagaagtcgaaaacgcgtaagaaaggggaaccggaatacagtttcttccttcctattatcaagaagataagacgcgataagaccgaaccagacgatattcatgttgtctttgcagatctattttaataaaaagcccttgactccggtcgggggctttgttatattgggcctatcgaaacgtaaatcactaagagaatatattatgactagtagttatcagaaacacaaaacccttatggcaaacctgtccggtaaacatatcgacgaagtaaaatctctgctgacagtgaccgaaggttcccgattcgaaacaaatcacattatcaaaccttctgtgaagaaagtactgaaagtgatttaccgacatccggtgtatcagtgcgttcatatcatgaacagtaacgcatttattttcgtatataacgaatccgatgataagtgtgttggtattttccgaaaacctaactttgaatgcatgagcgaagcggctgttgcaaccccgatcgttgaagaatatccggattatgttcaacgcaacatgcgttatgtgcaatcccgacttgattatgcatacgatttcaattctgacgcggtagaagcgctggcggatatcctttgcaaaaaccagaaagatcgtcaaatgacaaaatatctgactgatccaacaccgccaacaattcgaatttctgttgaagttccgtttgaaaatcatttcatggcagttgaagcgcttgctaaacttggtttagaagtgaaaacagaagccgtttaatagcactttttgttaaagaagcctcttgcaatgcagggagcttttttgtatagtgtgttcattgaaacgaaacacggagataaacaaaatggctcacatgatgaagaaagcagaattccttaacctggttaaagattgcggattcgctcacttgaaaacttttcgtggtagtgtttacctctatgaccgcgaaatccaggttgccgaagtctattgcgcttctaacatgcaagaatctggcattatctctgcaatgaaccaatcaatcaaataccgtaaatggatgggctgattatgaaagttaacgtttcttatgaatctcgcgttaatggcgcacagtggcggaagctggataacggacaagtggaaaggcgcttacctggttccgatgagtggacacttgcggcagtgttggaaaccgaaatcgatctggcaacaaaagacggtattttgtttgaggtgaagaaatgatcacactcagtgattatcttctgtttactgctctttgggcggcttcgatattcataactgctttgatttacaataaacgtgatgattttgggttgtgggtattcattcacgggtttcctctgtctatgtggatcgtgatgactgctgaaattctccattaatagcactttttgctaaaactatcttgttcttgtttggtatattgtgttcatcgaaacgaaacagacaaaaggaacatcacatgaacttcatcgatatcaacaaagatttagaaggtaaaaacatcaaactcgttaaccgtgaaatgttagagagtcttggtaatggcggcgaaaaattcagtgaagaattctataacaatttatcgttgatgactgttaaacgcgttgatgttcagggtggttctggttgggtttctgcaattccggtttccctggtagatcaagcaacatatgacccagttgccgattcatgggatctagaaatgccgttggtattcgaagaagtcatgaagtgctacgaaatcgcataagggtattattatgaatagcggaaaattacaaatgaaagttagcgaagaagaagttaaagagcggttatcggtagcaagaagattccttgaatctatcgaccctgataaacttggaaaatgccctgatacgatttgccttaattgtgggcgttctgttcttgttggtaagtgttgcgataatccaaatatagttgtgatggaaaaggaacaagtatcccccgaaacatgggatcagatccaggaaatcattaaaaaccctccagcgccaaccaagaaattacgtgaattgatgacaaggaaaatgaaatatgagcaaatttaaattgagtgcaaccgttcgccttattcgttggaatggtgaagagatccgttatgatgaccctgaattcgcccatgaaattctttcacatcgtctgggattgaaaaacgcgtcattggttcaaactgttaaaacatcagcagagccggaaatttggcgttgtgttatcctggatctcgataacaacattgactatgatgatcctaagaactatcctcttctggaagcacaagttgagaatgctccagaagacagacagtgttttttggttgagttaccacgcgaacattacgaaaacatcataaaggcccgtaaaaaggtcaataacaatgttttcgatctccacctcggattgtttgaggattaagtactgctagttgtgttagtagtagcggcgctggtaggttcccccacctgtatacattcaagtgtttgcaggtggaaatcttttgatacgtctcgaacacattcaacgatcagatattttcctgcatactcttccccaaatacctcaatgattgcccctaccttaacatctaaacgaccctgctttatatcgaatcggatccggcgttcatagctggataacaattgcattttagacgcctggaaaggtttaccttctgaatctgggttctgaaagttggtatcatagattgcattacggtttgtgaagatccatgtattttctgtgtctgtatcagccagtatgtcaccgtacatctttttatcagtcaatgacagactaaagaaactggcatctttaaacagcgttgtgttatccttatgggtaatatactgggcttctgtgaatatgacagtatcaccaacaaacacgttatcaacgttaaatttgtatgctgggatcggtgtctgggccagaatgtcagttgaacttttaaggaaaataccggaaccatcttcccacagataacagaagtcagaagaaactacactttgcccgttgtccctgatataatcaaatatatcctgatatgtaccatttagacatccaggagggatacgtatgttaccgccgtcaacttcgggggtaagtagtttcattttgctatacagtgccgtcatacactctgtaatcgtctgtacggcgttgttactaaatgaacgggcaaacttacgtctgaacgttttatgcagcggagagaggttcatacgcagcacagaacggttcttatcgtcagtatctacgttagagtaaagcaatccgtaataatgttgttcctgtgtaccgttatactggaaagatacctgtatgatcggctggataagttgctgatagattaactgtgcgtcgtatatctgcatcagcgtttccgatgagccgttaatcatcgtcttttcactaaacgagacaagagcgggtagcaattcagtatatgcgttatcaatgtatttttcgtatgatgtatataatttaatcgatgtgactcgattgacgattttttcagccataaaaatccctcctaatatatcctatttactaaatagtaaataatgacccaggttcaatttgaggcaataatgaaaaataaaactcttgataaatttataactacacggcttgaaatcaagaagactaacgttaaaaccgttcatcttccggatggaacagccattgagatccctaagatgtcgtatcgtcattttgtaaagattaagactctgaaagatgacccagttgcgatcatgcgattcatcattgatgacatcaaaccgcgtgaactaacagcagcggaaattgaatttgtgttgatccatatgtatgcacacaataacgctgattatgccaatacgcttaaagaaattgggctaaatcttgatgacctcaaaatctccgaaccttgctatgattttacgtttgacaatgtgcggttagtctttgacaaacccagcctgttaaatgctcaccttccgttcctcatcaaagaggcatatgttgacggtaagccagtagaattaactgaggataaacgagacgaattaattaattgcctgtaccgattcgaatatgatcaggtatcgcgtggtgtcctccaggaagtatacattattcatgaggggaaaaccatcaaagggcttaacatcattggtgaatgataatggctaactcttatttcaacgaagaacaaaagaaaaagtttctgaacagaaacagcaacaaacaaccagcggtcaccaaagtaacagcctcccttgatgctgaaagcgcccgtgacctaaaggaaatcaacgataacacccttgaaagtgcaatcaatactcttgatatcaaagaagggttgaaatcgttcgaagaaaaattccgtgacaaattcgcggggttcaaagaacaatacgaagaggataaaaaggaatcattagccgaacaactacctgatttcgtcggcccgatccgtcctatatccttaaccgatgataactcaaaaactgttgacaatacagtaaacgttaaccaaaatggtcagttcggtaaactggaagaaaacaccgaatctatttttcatgctattaacaaacttgttgatttatatgaaaatactgataagcataagccgcttcctgaaccagtggaagaacctgatccgtatgtagacactaagaaaaaacgcatcaatgatgatgatgacaaaagaagcaaaactctggatagtattgctaaaagtctggtttctattaaaggttttacatcgcagatccttagccgtttcattggttactctctggaagcaatggcaaagtttgctaaatggacgctccttattggttcgttaatctttacattcgatgtgttgcgcgtcacaatacgcaaatggttcgaagatatcctgaaagaaggggaatcctcaaagaaactatttggtacatatctgggtaacgtaaaggctatcgtaacaaagatcgaagaaggtttgaacaacttcaatatgaacaacttaggcgaatcacttcgtgatttgttcgttgagcctatgaagttgttggggcaaactgtacaaacggcaatcactgagggtatcggtcgtcttattcaatcattgggtgaatcaactggcatagacagcattaccaatgccggacgcggaatgcagatcaccgctttacgtgataaacagaaatttggtcttgaattgactaaagaagatattcttatgatcaagaaacaggaactagaagaccaaaaagcggcattagaaaaagaagataaagctattgcagcacgtcatgcattaacaataactccttctcaaattcctaatggttctatctataaagttgctcctactgattatcaagaaagaaatcagaaaaccgtagatgctgataaagaacggcttgataatatgaagaaagcaacggaagaaatgcagaaacaatacgatttagctaaaagcagcgaagaggaagcacaaaaattagccgatgaggaaaacaaacgcaaccgcgcacgtatagaagaagcaaaaaggttagaacaagcgaggaaggaaggaaaacagccgccagaaggtgaagagaaaaagggtgatgatctgttgggtaaagcaaccaactatgctaactctgaaaatctggatgcagccgatatcaaatacattaacgatgaactgttggatcagcttgaaaaacgtcgtaatgaaggcaatctggacgatgtacagaaggatagaatctctgaccttatcgagcaattgcaaaacaagattgcagcccgtacagaatccagcgccccgatcgacgcacagccaccgttagcagcaaataaaccggatgctgataaagcaagcaacattcaggttaacaacaaaactgttaacaacaacgtaactcattcagtacaacgcacagagcataaaccgctcgtagcgctggcataaggaacatataatgaagttttctattattgatgacagtataaacactctcaaaaatattaaaaatcgcggtatcccctctgggggtgccgcaatcacagaatcagtattaaagcaaactatcgttaccgccgaatttccggcccaacgtgcagcaggtatcgataacgcttataatgcttcgagtctgtataataacggccttctgttcactgcatatgattttaatggtgttggtagtaaagacaactatcgttcattacgtcaggcagcacagaacccaaaacaaatactatcatctgcgacgggtaatgttaagtacaaacaagtgttgaatagttctattggtactatggaacctgtttgccagatcctgctaccgcgaagcctgaacgataacgaagtaaacagccaccgctatcaagatgcaaacgatagtttcttaaccaaagggttgagccgtgttgtttcaaacatggtatggggcgctgtagaatccgtttcaggcggtattatggcagaccgaagagaagcccttgatgttggtactaaagccgctttccagggttctgacaagcgaacaaagatgtattacaatacattcgtgattgaaagccgtaatgatttgctggaactgattaaaatctactatctgtttactgttctgggatatggcacaacttctggcggtactgctaaagaggttgctgcattggttaaacagtattacggtgttctgggtgctaaaaccgctaacgcaattagcccttccagtaacccagtaacagcgtcagattttgataatagtctgggtaatgacgtggttgatttcatttcaaacgtagaggttattaaatcgcctcctgtctggtttattcgtgatttccagtctggggattccttgcgtttacctcattcaacctttgggccagcaggtattaccagtgttcgctttggtcgttctattgataatattgtaaatacattaagagaatcaccaaataccccgatctcacttgaggtcgaaattcaatttatggaactgatcgatatgcgtcaggattctatttttgatacaaattactaaggagatatgatgttttacaacgtagatgaatttttatcaggtatggctaatcgcgattttcagcgtagcaacctgtttagcgttgtatttgcaaccagccctgcatcacgtatccttgacaacacgatcggtagtattcgagatactttgattgatggatctattagttctatcaacgcaaacaacccgaacgaattcattaatgctatcactggcggtgtgagtaaattgtttagttacaccgtcgataaggcgattatgtcgctgaacaaaacaggatttagcaaaatcatcggggcaattagcccccgcttgattacttccctgtttggtgatagcatgtatggacagttgttagctgaattccgtgataaaatgatgtataatatgggtttaagcatcatgggagttaacctccccggtaaatccattgggtacgaatacgtttataatggtggcgtacctcaaatcagattcactcgccctgagaatggggaattgtcgctgacgttccgcaccgattcagaagcccgtaacctgaaaatttttaacgaatggatttccgctattcgcgatgatgtaacaggacaatacgccttcattgatgaagtgacaagtactattcaggttaacttacacgatcgtgatggttcaccgcatacaacatacgtatttcagaagtgcttgcccgtcaaaatcagtaacagtg

SEQ ID NO: 6 - DNA, 176498 bp, Unknown
  bacteriophage strain capable of infecting bacteria of the genus Klebsiella
acctgcccttcgataaagttaccttgagcattatgcagagtcattgaccaacgcaattgaccattttcatagtcacgttcgatgtatgtaacgttagcgcgtccagttggtgtatagatcgtccggcctacgatatcctgactgatatttgttgaactaaccaaaatatcatattcgagactgttggagctttcgatctcaacggaaacatcttcgttatacagcaatttaaacaggaacgtataacttgcttcgatcccttttgttgaatagaaatcgcttgcacgtgattcaaaaaatctaaccactgcctcacgtttggttttatccaggtaaatgttacggcggttaatttcagaccacaaatattcaacgttgtttttctctctcggatacttgttccggatgaggttcagcaatttgttatagtaactgttgcttcccaacgaaatgtattgcagatagtattcaccaaatttttcgaactgttggttgtccagatagctttgcggagcaaaacgagtgatcatgtgactcagatcagggtcgattagtccaggttcaatatccggcgtgtatgggttttcacgttcctgattaaccagacttgccaccattaaagtgttatcgggtttccagaaaatagtgagttcatcccttgcgcggtatgacagttcatagaatccaattatcctaccacctgagcgatacaacagaacaccgtttgtgtacttcgtaaacccagtaaacttgatattattcaagtagatagtaactgttcctttgtcccaaacttcatggtttacacgaatcgttgacgcaggagacgcgctatcagtaaccagagtatacagggtttccggataaaccaccagaggacggttatcattggtgatccatgtgctaaccttatcgcggaaatgccagctaaagtttgcttcattgtagtactcttgcggcccaaagttccatactgtaggatcgttctgatttgcacgaactgtagcaaagttaatcgaaatgcttgcagtataaccaggaacaagatcgtatttcaccgctgaatgcacatcttccggatacttttcaaccagatctggatctggcaaagtgcctggatatttgtagttaccaacagaaatgtaaacttcatcgccattggttgacatattggtatattcatgagtgatataaaaacgttcatcttcggttttaccataaacacgggtaaacgtctttgcattctcatcccacagataaacgccagcatcgtttgatgggatcacgttagctttgacagtcggatccatcatcgccgttttaacttcaccagttaccagaacgtacagacggtcatttagcacgtccatttttttaacaacaattttatcatttcctggtacgatggtatatgaaacttcatcaaaaatacgttcaccaaaggtcggcgaaccaggatcagtatcaattggtgtgttacgtaacgcaatacggcgcataacgttcttagcagccacgtagagccaatcactagaacaagctatagcttcggcatacttcgacactccgcccggtagacgcgcatacgtgttgtatgaatcaacatcaaaatctaaccctgactggttccccagcttcgcaaacgttacatcatcagcagaaaaacgaacttcatcagaagaccaacgaatatctgttgacgtgcgcccgtaaaatatgcgatcgtatcctaacacatacgtagtgttagcgctctgataagcaacggtacgggaaaccggattgcctacacgatcgtttaatgctttgtagtaataccacgtttggcctttgtcatttgacactttagccatattctgaaaacgttcaaacaggtaaagcaatccgtttgagtataccaggaacgtgcgatctatatcattacaaacgtgttcgatatgatcttgaatttcgtggtagctttcttgtttcaggatcttatcgctgatctggcttacatcagaatacaggggagagtatacaaaatcctcaaccatcagagaagccataataacatcatcgttaaaatcgacgtaatcacgattgtttttggcgaatttttcattgataaacgaatcagcaggggtgaattcacgcatggttgtatatgcgtaggcgttctcatcaaacgtccataattcatcgctgatcacccaatcagaaggttcaaacccttcatgagttgtttgaatacggaatttataacgtgtatttggggcaacctgatcgctaaaccattcgttttcgtagctataacccaactgcgtccagattaactcttcgtctggaataatagttccgtccatatcacggctacgggccaattcaaccacataatagaaatccatgccaacatcatcccatttaaggtaaacgaagttagcagccagcttatcaacgcgcaaactcgtaatcgaaggcgctttaatcattatatttctccaaatttgcggttatgtatatcacgtatttataaaaagaaaaacccctatccgaagacaggggttaacgattattgactgataggattcatagtcaatgtggtgtattgaggacgcaggtcattttcaaacacgatcaacgatccatcgcgagtaaaaatggtttcttcgagaggctttgcggttagctcgatataagcagcactgaaactatcggcggatacgttcagaacgcccagatcaaagctaatgaaatcagtataatgagacaccgatccgacttcgtaatatttattacgggttcctgcatctgttaatttttcaaagtcatcacctgtataagcagcgatcgaaatatccccatccttgaacgggcctattacaatttttgcgttaccatcctgatccatttccgtagaagcataacgaacatcataactttcgtcttcttcgttggtgaacttgaacgtactggaaatgattgatttcgattccacctggttcaagaaatggatcccagacataggagcactgtaatagttgtcaatttcgcggagcaatttaatatctgcttccgaaccgataatagaagtatcagactgatcgacataagtcaacatcttagatacactgaacgatttgttgaaaatttcaacgttgtcagtatagtaagagtcgatcgacgaaataacctgaccgcgtaaccattcctctgattccgtcaacttactgatatcatacgttacttttacagattgcacaatatacagatagttaggatccataatcgacggggtgatcgtcgcgaggttatatttcgaaagatacgtttgcatatcttctttctgtaccgatgttaggcgtaaacctgactttggtttaacagaaatgaaagcataaccaggtttttcgttatcagtaaagcactgtaccgcctggatgatagatccaaacctgtgagacaggaaggattcataatccgatgcagttacacaacggcgttgtgtttcacgcataacaggggccagttctcgaatacgctcaatatcttccgggtcaccaccaccatcagcaccaacataatcaggggtgttggttgggttctctttaatcgccgtgatgctaatattggttaatgtatcgacatagataaaatcttttgcaccgttagccgcttccccatcggttgacagatattcaataacgatagtcgaaccattagcaggtttcaagcccccgatatattcggcggttagtgcgccacccgccacttgttgacttgcttcaccttcaccgaaataaacttcggtatgtccatcaacagtttcacgcatgtagtaaatcgtgcttgcgcctgttgcgtttacaatgctttcgtttgtccagtcttcccattgtgcgccgtttacagttaaacgtacctgactacggtcaatatttggatctcggatcaggatactcgaaccgtcataaattagttcagtacgaactaaacggccttgcaccaggttcagcattgatgtatagttgttattactatcacgaacgataacaacgtcatctgatacaacaaaagaataactgtctgtattctttacagtaccgatgaattttgtaccgcgcgggatacggatcgatgttggggtcagtgggttagcagccgtaatcataactgctgtgcttgcagccgttcgcgaatctggcatatatcccagttcttgagcagactgtacaacagaactacgcaatgcagccgtgcgaataaacgattcaaatagagctgtgttacccatctgctgaatataaagagtagcatacgacagaaggtcgatcagtacgttcattcgcgagccggaaaaatcgtaatccttaaactcttcttgtccacccagccaatcaatcagatctgttttaatttcttcgaaagtacccccgataaagatatcggggatttggttaatctgttttttgacagtcttagtcttagcagtagccattattataaattcctcttgatcattcgactatttagtatttcagtactggaacacatacactaatcgaaccaaagttgattgctaatcctatgagagacagcaatttattcacatattgtgtgactttactcaacgccaacgtacaaatttggttatagattactttgcagtgatctttaaacgatcgcgaactatcaatgaaatttttgtacagagactgagcaccagtaatcgcattttcatatgacttgagaagatcgtcaaatgcgacaccacagaagcctaaaaactcgtttattgtactcatcaaaggcaatttctttaattcttccatcgccatgctgtatgtatctttcattgcatcttgtagagatccaatctgttcctgtatagcgtcatacgcggcctgtgttgcagctacagcagcgtttgcagcatccaatgcagattgataagccgctgttgcttcgtctgttacagcgccccacatccagtttaagtactggttgaattttctctgaattgcatcacgttcgaaaatctgattttttaacgttttgtaaagttcctgcccctgttcataaagccctcggatctgttcgtatgactcatcaacaaaagccttgactttttcctgtgcttgttgatacaaatccattgcagtgaatccagggaagttaccgcccagaattatatcaagtggtttgatttgcatcatgatgttacggatagccagcaccgcagaccataacgggtttgggacttccggagggatagcccatgtttgcatgatccgaccgtataagtcgattaatgcaacgcaaccgttttggaacatcgttaaacaccaatcaaataacgcgctacacgcatccacaaggtcgcgagcgccagctttgacatattccacagagtaattgtatgcgcttcctatggccccgtatattgcgtttatgacggtttcatatgtttgttgtccggatttgatgattgcactaaacgcatctttcaaagtctgaacagaattatcaccaaacaccagatcgtaaatgttgatcgcaacacctaagatggttacttgaggcaagaactgattaatcaatccccatgcaccaccgataatgttaaatgcagcgctaatcacttgtctgaaaactttcatagcagtttgccatgcttgctgtgacaatgcgagcgcccccgccattacttcttccatcgatacggataaaccatcaaacatcgtcgcgatcccgaatccattctgtacagcacccgttaacatgttaaactgtagcttgaacgtattacgggtttcgttccatgcctgtaacatagcatcactgatatttgtatatgcgaaaccaacagttgccggaatgcacgaaatatcagcacggcttaattcactcggtaatgccccataagtggaaggcattgcaggaggaacaggaggaatgcttgtatctgcgttggtgttaacctgcatacccgtatatttgcattggtgcgcccctgtttcatcatgcttcatataggctatacgattaccattccaataataatcaatattggtgaatgcgccagtgtcctgattatacgtctgacgtatgcgagcatcacatacagggtttgttccggaaagatacccaccactgttttcgaccttatacatagccagttcgccagggtttttgtataggtttgattttgacagatccgcgccataccaatcattaccaccattgattttagttgcaccaatagatgtaatataagcatcaatttctgcttgagtgttgaaataatagccaatctttggaacaaggatccctgttggttgtccggtatttggatctgttcctggtgaattgacaacaggtagatccgtgcttctatgtccgaatggttcttgagtataaagatgagtaccgattttgattatctcggtatcccactcaaccccaacagccggataattttctgtatgcccttgccagataacccgccgataatagccagcggggatctcagcatcacaaggatgctgataattttgcataattccatcaattattgattcataatccataatcatgttagcctacctgtactgtgccgccagtgatttttgttaatgcgccagaatcaataaacgtgttattcgttgctttgatattgatatctttagcaccgatatccatcgtttcttcaatctcaattttcgcattttttgcagtgaccgttgcgtcttctgttacagcaacggttgcattctgtttcacatttgcggtaagattctgatcaacgttaactgttgcatctttgtttacagttagttcagcattgcctttaatcaggccaacgtactcaccttcaaccgtttgttgaacattgccacgaacaaactcagttacgttaccatcaaccgtttgttgaacgttacccatgttgtaaatgaacgcatcaccttcaataactacctgcaagttgcctttaacgttgagtttccggccctgcatcacgatctgatagtcatcccctacgattttaacaacgcgggttccatccgggcgaatttcttcgtaactccctgctgggtgaacacggttatatcgttcgtatcctggggtatcatcgaattcctgaatgtgtccggatctcgattcaaacaccatgttatacggatattccgcattataagatgatgctggttcttcaaacatcacacgggtatcaccaggagtaaacggatcttccggactagcagccaacaatgtagcaccgttatacgcagcgtaagcagcactcagagagcgcccttccggatctggtacttgtaccccatatgattcaaggttgcccgtgaggacgattttagacacgcgagaagaacggcctggagtttgactagcccacagtgaatttcgaagaccattataagccgcttgccaatcttcatttttcatcgctttcagggtattggtgaatttagcaacaccaccgacgcccatttgaaacgacatgttttcgatcgccatttgacgaggacggttgaggttcacatacacttcacggacgttagcggttctctgaatatcagatcttactttggctaaatcttgagcaaataaggttgatacctcttctgccgtgattgttccgtttgttacttctcgacctaccgctttactgatcgcagcgttaatttttgcagtgtcgcgagtcttttcgcggataagcaaatgcccgatcccgattgtcggatatccttcactgtctgtataccatcgtgtgcggatcccctcatcctgcttgagcatcttttcgatcgtaaatccacccgtatcagggcggttatcttctggtatctcatccagtgggcgatcgtctgggtttactgctatgcttgtgtttgaatcacgaatgatgacacttgatgatcctttgcctttcaaaccacctaatgcaagggagttaacatcgttaccaacatagcgagggtattcacccataggatcgcaaaaacctttctgtgtgtctggttgttcgacatattcaccagcgacagtaccaattatcataccatcttggtgccatttgtcacgccaataaccaacaacaaaggatccgcgagtgataccagttggagagaagcccacaccagagatcgcagcgcttctaatatcctgaataggcatcatccagggtaaatcttcaacaggaacaccgattgcatcggatttttgtttttgggctgggtgttgtccaaatacacggacttgaacacggcctaacccgcgcggatcatcaacgttttcaaccaccccatcaaagaaaggggagtgtaaatttccgcctaatttcatgagttagccttttccatttctttaataaaatcattcagaaacgcctggatgtcagacggactaatgatttttattgttcgttttgcttcattttgcaacactgcatcttcataaatatctacaggagctaatacaccttgatactgtaaatacagcattggcttgtcacctttgtcataccaatgaccagggttattggggtcttcgacaaggttataatacttgttgttgttttcatctacatgatacagaacctgttcaccgccaacctcagaataacgctgtatagcgcactgatacgcggcttcctgatcggagatccaaccatagaaagggtcataaacagagttaagcatcaacaggatccagtagtattgctggtttccatataatgattctgcaagttgttcaggtcgtagtgtgcctgttatctggtaactacgggttttatattttccaatcacacgattaaaataaaatcgatagtctcggaaaatatcagttgtctgggtgcctttgtaatcaacaggcgggaagtatgaaaatagcacgataagttcccctatctaaacgttatattattctatttaggatttacgcaatggctggaagacagacgtataaagggtcgtttgtacccgaaaacatacagaagtataaaggcgatccgcgaaagattacgtataggtcatcgtgggagcgctacgttatgaagtggctggataaaaacccacacgtaaaacgttggaattctgaatgtatagtgatcccgtatttctgcaatgcagacggtaagagaagacgctattacatggatttctatgtggaaatggaaaatggtactacatatctttgggaggttaagccccttaaagaaaccatgcctccaccgaagccagtaaacaacaacgtacacaataaaaagaaatttattgatgctctttacacctatacagttaatattgataagtggaaagccgcaaatgagctatgccgtcaaaaaggctggcagttcaaaatcgtaacagaagaatcactcaaaaaagtttttgggtggcgaggtcagtaatccctggagggaaacatgagttttatttttgagtttgagatcatcgcggaagaggataaacccaaagcaccacccaaacgcaaattgagtgattgggttgaactggggatcaaattccgtaaggcaaaaacgaaaggtgtttctgctaaacgttttgccgattctgagggattaaactacgcaacgttcacaaagtcaatgcatcgttacaaaaaacagattgatgatgagattgaacgacgttccgcagagacagaagcccgtaaaaaacgtaatgactaccgtaaaaaacacgggatcgagatcatcaacgatttccgtaatagtctgaaaaagatcactgttggtgtatcggcggcaaagcgacagaaagattcaacagaatggtttggtaatttcatcaaaaccagtatcaaaacacaccgtgtggcaaaaccagcaacgggtcgcctgtacacgtttgcatatgatgcaaaatataaagacaccctgccgtattgggatagatttccactgatcattttcttaggatccggaagatcgaaagcgggtaacttagtgttctatggtttgaacttgcactatgcgccacccagagcacgacaggagtttttagaagagttattgaagcgagggtacggatccactaaacgcctctctaacaagaccgtgcttaaaattaactggggtaacgtgaaaggtatgcgaggcgcaacagaaatgatcaaagcatatctaccatcacacctcaaatcaccattagcagagattgcccctaaagattgggcgaaagctgtttggctaccgactcagcaatttatgtccaaagggaaaccttacggcgcgaaaaaagtctggagcaaatactaatcaaaaagccccaaccgaaaggaaggggctttatttttacagggtgctaactatttctgcaagtttgccaggggtcgcaccaggtctaactttcatagcatctttcaggtttttgtcaaccatcttttctgcatctttttcgttaaacccgcgtttcaccatcacagcaataactttttcgcgaatgcctttagccgcttcattcagatcttcggattcagccagaaccagtttagaaaccatatcgcctttatattcctgggtgaattttttaccagataccagacgaggtttgccggaagcatcaactacggtaaacactgcatattcaccgcttgctttagttttagaacgcccagtatacagaagacgcatatcgttgcttgggagtttgtaaactttacctttcaccagagattcatccatcgggatctcgatttcgaaatcttctgctaactggttatacagatccagattttcttccgcctcttcatacagagtagcagctttgaatttttctggtttgtcgaaatccagatcatcatccggattgccactgtagaaagaaacagtacctttagcccaatcgacataagccgcttgaactttaccagtagtcatacctttcaaacgtacaatgtttttaccgaagtatgccagatcgtgagaatccggtgctaaaacttcgaaatcagaaccatgtttgaagtgaagaaaaccgattgaatgtttatcggaagttttagcgcgttgaccacgtgctacggtacgagcgagggttttaccttcggtcagaaattctttgaattttttcaagtgagtcattttgtttttcctgatttccaatatgggaacatagtaccagtatttagtgacggggtaaaggaaaagttttcagaaaaagcataaaatttattagatctaagtattgatcttcataaaaatttatgataaaataaaatattaatatattatagatcataaaatttatgaattcaagatcagatctaaaaatttttgataaattatttattaaattttacttgatcttgttagatctttttgataaaattttaattaataattattatagatcaaagattttaaaaggtcaagcattttcttcaaatttttatattaccccgtcaggccgctttgatcccgttccccgctaaatagaggaaaggagatcctatgtctacagaaatgattttaaaccaaatctcacctacaaactttcgggttgatattcctgataacagttacatgaaaggtttgactttacaagttcaaggggttacactaccatcaatgaacctcccagcagttgatattcctgcaaatatgatggttcgaggtaaagtacctggttcggcttttgagtttgatcctttgatgatccgctttgtagtcgatgaggaaatgagatcgtatcttgggatttacatatggatgttgagcacaaacgattacaacgagtttaactctgttgcgtgggatgatcctaagcaatcattcgctgtgcatatcctggataactcccagatgaaaacgatcgccacatttagattttatggtgccttcccaacaaacttgggtgaggttgaattgggttatactaacgatagtgatgaagcggttacgtgtatggcaacttttggcttccttcatatggaagttgaaattgacggaaaagtagtcacttctcaaaagagaatgagctaatgatttatgtgattagtggaaaaaagcgaactggtaaagatacggttgctaaatttattcaagaggcgtacaatgatgttcagtgtgaagcactggcatttggtatcaaaagaacgctaagagtagcaatgcagcgatatggttacgataaaccatacattcgtagtctggttgaaggaaaatattctgatccggatgctattttttatgaaggtgatcgagagaaacctcttgtgatgtctaatgaagatgttctaaatattttcaaaatcgggcttgaaatcctcaaagaacgtggatacaatattgtttatagtcctgatgatattgataatctgattatgagtaacgatactccctggagtatcagacgcttgatgcaagtgtttggaactgatattgtatgcaagtatgataacacggtttgggttcgttacatgctggaaagattcgtcaataaatatgctggtgacgaatacaatcatcttctggtaactgactgtcgtcaggaacacgaatataaatacctgaaacgcttgggtgctaagtttgtgtttattgtaaaggataccggaattgttgatgaacattccacggaaaaaggtttgacacctcaacctggagatagtatcatcactaacgaaggtactttgaaacaactaaagagcaaagtgctcgatacttttaaattttaacaatgggtaataaaatgtctgatattcaaaaactgcaaaatgaagtactggtactgaaaggccgcgcattcgatcttaacgaagttatcgcgcaaaaagaaagtgaactgtcggttcatcgtcaacttctgtccgacctgtgttcggtactgggtattgacgcaagccagccagtaaccccagaagcagtgattggcgcggtatccgctctgatcccttccgttgaagtcgaaaaaggcgcggaagatgaagccgcctttggcgaagaagcgtaaaaacaaatttattacaaaggggcttcggccccttttttattggggtgttttatgaaatcatttcttgaaatcacaaaacctgttgtagatcctggtatctacatgtgtgctaaattcgatcaggcttcatgtgaggctttgaaaaatgttcaaaagacattaggtatcacaaagaatgctgtttcagccgaaaagatgcatacaacgatcgtatacagccggaaaacggttgatttgttcccgcaacaggacatcacagaacctgctaaactggttgatgttgaaaagtgggacacaaaatacggtagcactatcgtagggatcctggaatctgaatacctgcatagccgtttcaaagattctattgatgctggcgcaacatacgattatccggattacaaaccgcacgtaacccttgcatacgattcgatgcttgatgatatcagcggagtaaaaaggttgttgacactgcccgtggatttgactattatctgtgaagaggctgaatcactggatctggataagtcgttaaaagatattacagaacacattgaacagcgtggcgataagtgggttgttttgaatcacgatcgcacaaaagaacttggtgaatacgattcgaaagccgccgctgaaaagcgtttgcgtcagatcgaatacttcaaaaatcagtgaggattatatgaacagaacacgtttaatgtatcttgttaacagtgtacgaaaagaagttagcgaggcgtttactagcgcgttaggtgactggtatacaatcaaggtagcggctactgctgaccacattgcagatcgctttaaagaccgttcagtatcgattaaaaaagatattgaaacttatcgcgatatcatgatgagtctagcaaatcattattcgtgttatgttctaacctacgcggtgaaggccaaaacagaagggacacaggaagttattgtttatcgtcgggtaaatggtaaaatctttgcttgtcctataactgttcaaatgttctttaacgaaggcgaagagaagccagtgatcgctatacggttgcgaacggtgatccctgagtatgtttctttagctaacagaaaaacaatccaggtcaactacgttccaccaaaaattaattttgaatacgacggttatcgtcgggttatgtcccgcctggatcgtctaatcgcttctaaagattgtcctccgcaactttggatgttgaaaaactgaaaaagcccttgcattcgtgcaggggctttgttatattggccttgtcgaaacaaaggaggctatcatgaaactttactggttaattttctcaaacgggtttgttatgaaaggaagtgttcattgcgcaaaaacttattgtgaatggaacaattgcactttcaagatcctgagtgttgcggcgtctcaacctgtaggggattactaatgactggtgataagtgggttgataaaactttgttgttgactttggtttatattatggtaagatacttaatatagaaaaaggaggatatcatgagaaacttaatgaacatcgcagaactcatcgcatacggcagctcactctatgttttggcgaacggtgacggaaaaggttacttgattttctttggtatcggccttgctatctctttcatcaaaaaaatctttaagtgagaaatatattatggctaaaccatccggcaaaaaatataacgtcatcgatgtttataacatgactttaaaagactttgaaaacatgtgtcgggcttatggtagttctactacccttcgcgaactggcagagtctgctaaaaaggaacgtcctcatgtttgcccgaaatgcaacggaaaaggttatgaaaccattcgttataacgcatatccgtctgggttgccagattctggatgggtcgaagatatgaaagatttcaacaaagaatgtgacctgtgtaatggtcatgggcgcaccaaagataaatttgttgcaaaacctgttaaagtggaatatgtaaaatcatgaaaatcgttgatttgattaaaatggctaatagcctggtaacaagcgatcattatgccgactattgcgaacagtatgaggtgccgctgcaacgcgcgatcaatcaatccgggtatgatggtgttagcgaaattaccaccgaaaacctgaaaacattcatcgtgtttgctaacaccttctggatgtatctaccggataatcctggtattcgtcaacctgcattctttacgctttgcaccttctgtgaaacgtatttgcctgattgtgaggatttcgaagaaatctatggctaaagtagagttgatgtatcttgataaaccaactggatctgttttcccttgtgggtttgctgatagtgcagaacaaatgatgtctatcgcgttttctcccagcatgaagccgatccctggtttagatgaaaaagtaatgaatgagtgtaaccagaacggaaaagtatggtatactcgacacgaagggaatgttgtttatcactccaccctcgaaaaccttaaatctgaaataggctatacaaaatgaatattgaacatgtatttgcacaggcattagaacagaaattaaactcagaactcgatctgtaccgttacgacatggaagaacagattcgtggtgatcacaaaaacagtctggagcatgaatccagtcgtcgtgaagtgtggaaacatactttcttcgaaaacctttctgctggtgtgacaaaagccagtgctcgcgctaacaacgcacttaaagcatttgataacgcttttgcaggtgaataaatggaactatcagcgggtattatctttattaaagatggtgccgtgttgatgggccatgccaccgaaacgccccattgggatattccgaaggggcatgttgaaaagggcgaaactcatattgacgcggcgatccgcgaatgcttcgaagaaacaggatttgaagtgttcgcggaggaattggttagcctgggtgttctcgattacacgaaaacaaaaaaccttgctttattcctctatgtagggcaagattacccagtagcggaagaatgctattgtgcatcaactttcgttaagaacggacggactatacgtgaaatggatgattttaaatatgtcccgatctcacagattccgtcacatgcacgtaaaacgatggggcaactactgcctaaaattttagcaagatgagaaatatatcatggaaaatcaactgactttaatcgatatctgcaaatcaattcgcgatgctgttttaaccaaagcatccgaagtcactgtttactcttcatggagtgctgaattcggctatgaagaaattgtaaacttccccgaccgcctcaaaaataccaaatggttccgttatatcgatcctaatgagctttcccttgatgaactggaagaactcaatttcagtcgttgggatgaacatagcggcctacgcctgatccctttatggttgcttccatacatcgatccggaagcaaaggttctctgcattgatggtaacgaagttctgtttaaagatgcagacaacgatcaccgtttcggtatgttggcctacggtgttaaaccaaaggcataatatgaaatacgtcgattttaatactctatctgaaatgggccttgtttggcgcattaaccgcgaaatcttacaccctctggggcttgcgctttcccgtgatgtagaaacaggttcatcacctggcgcgttaatagctgatgatggtgtatggcatttcgacgaattcacaaacgaaagaaacgcagagaagttttctaaagttttggatttacatcaaagcggaaatctgttagattatctacagaagaacgcgaaataggggcttcggcccctttgaggatcatattatgaatggtaagcgggttattgttgttggcgaatcaaagcataacgaaaaaggcgatcatctgatcattaacaacgatcggggtggatggtacggggcgacacaaataaaaagcggttacgcaacgctggttgaaaaagatgcggttagattggcaactgctaacgatcctgtgtattatggtactcgcgaagagtttgaaagcgaaaaggatcaagagatcgcagaattgaaaacacaggttcataatgcgcgtgtgtatgctgcaatgtgtttcactgtagcggttatgattacgattatatactggatggtgattttataatgacagacgaaattgtaagaaaccgtattcgtgagttaaaaactttccaaagtcgcgatcatgcgatcatggttggtagttacattcactggttcaagaacaacgatctggatctgaatccgtcctatcagcggccctacgtatggaagcagaaagagcaagacgctttcatgaagactttgattactgggtttccttgcggtatcattgcgatcgcggttgatagcgaattcaacgaatctcgatgggtagaagtcatcgatggaaaacaacgcttgacaactatcatgaaattctggaacaatgaaattggaataccgatgcctgacggttcccgtttgttttggggtgaaatggaaagacatgaacaacgtgctttcgaaaacatttcattgccagcgcttggactcgatgagtgcaacataaaagatcggttgaatttctttttgaaagtgaactttgcaggggttccacaatcaccggaacatatgcaagcaattttaactatgtatgagaatgcaaaatgaattttacaacagcgccttttgaaactggtaaatggtacttcaaaaaacggcagagtcgtatccatagctatacttgcaagaaagaccatctttactatccgcaagtaatgcaagctatgtgtgacgcagaaggaaacattcacgctgttattgttccttctaataattgtaaactgagcctggttcagcgcaaaattcctaaagaattctatgttctttatgaagagtttacccctactcacctggaagaatcgttatttttcaaacagggtaagcgttacaaggtttctaaccgtgggatcattgattgcctggctgaaatcgatttagggaagtatggtcataacacatcgttacgccgcttcctttcttatggtagcaaccgacaggaacagcagaacgttatctatatcaataaagttgatatgcatggtaacgcgatccacattctgggaaattcatgcaccagtgaagtacaaagttatttctggactaaaattcctggatggatgttgatgtttttggaagaagtaggtgaaaacaaaccagccgtggcaaaggatccggtcgaaacgatgatccagaatcatgaaacactggaagaaacaacccgtcgtgaactcattcaggatgaagttgtggatcttccaaaggcagaaggaatcatggtaagtcatgaagatttagccctgcttgatgcggttaagtttctcattgaacaaagttctgttgattatggttcccgtgctcgtattcaactgagtgcagaaggttacacgtatggtgtagattctcatgaattcctgatcaagtgggccgaaaaacgccgtagtgagttgatgaaatatagcgatgaactctttaataaaatcaatgagttgaaagcaaccatcgaaaaattaccaaaataatcaaaaagcccttgcattagtgcaggggctttgttatattacacacatcgaaacgaaacagagaaaggaaaatatcatgaacatgaataaaaacattgccgctgtagttggttgtgaagtttctaacgcagaacgctatgataacggtttctctttctgtgttccgactgaactcgatgcgtacaaagccgcttacaaataccgcactatgcataaggtaaacgttacttacgtgcctaacatcgaaatgtggttggttcaggtttacaaagcatgaatttccatgaacgcaaggccgcacgaaccgattattacatgaggttcgtgtatggctggaaattaaggaaatgtgttgcatgtaacggttcggggcggtatgataacaaccgttcccccaaatgcagtagctgtaatgggtctggtaaagaattttataaaagtgaggtttctaatgagcgtatcaaatgaactgactaactacttcaatattcgttatacctctggtattgatgactgggctagggatgacgaaatgactattaatcatgcatgtgcagttcatatgaaacgcttgcatgagcaagggaaattgaaagaccttaacctttacggcgacatcggatccggttactgctattcattctctatcaatgataaagagcgcatgaccgttactctcactaacttagttattcatgaacctggtaatgtcgttgcctgggggatccataacgggcgatatactgaaaatcacagcatgaaattagcgctgatgaatcataagttgtttggtggttgtgttcctgatatctttactaacgcacttctgcgtattttgaaatctatgtgaggcatacatgagtgatgaaattgtgtttgatgacgcaacattaaacaagttgcatagtgtcgccagtggaacctgtacagccatgcgggataaatgggcggctacaatcaccgatgataacaagatcggggttgttgatgaaatgggccgcacgtttacggttacgtataattcgtcttggtctgttgctgacaaccaaacaaaatccaattgcttgatgaaattcatcgacatgatggatccacacatgatcaaaaagctggttgaagagatccgccgccttaataaatttgaagcggaatcgaaccactggaaagcaaatcatgcttgtgaggttgaacgtgctcgcgtactcaaagagcgtcctgatatgcccttagagcgcatcaaagcatatgaccgtatggttgagttggaagaagaaaataaacgcttacgtgcgcgtatggaagttctcatgagcgcggaaatgatgcaaaataacctaaacatgatcagcgctatgttgcattctatccaaagcgatactaatcaaacaagaaaattgttatgtgatcgcttcaacgtacaaggatattattaatgtcatggttcaaacgagagtgtaagcatcaagcaactggctatcgaggtgcagatccttacatattccagaaatatagtcaggtagatgggatcgggcgcatccatttacatttatacgctcgatgcgacaaatgcggaaaagagttttcttacgctatgatgcacctggatcgggcgcttaccgaattgtgccagtattctacgatgcgttcggaaattcaacgggttatagataataccccaatcaaacgataatttttgcaaaaaccccttgccaatggtgaggggttttgttatattacacacatagaaacgaaacagacaaaaaggaaatcatcatgaaacttgttcgcgaagctatcaaacttggtaacgaatacaaaggtaaatggtactttgtcatttacgacgacaacgccgaaaaactggaaaaggttgaagatgcattacgtgctatggaaactggtgcttctgttggtggtgaagtgatgacctgggaaaactactgcgacggttgcccttgctatagtgatggtttcggatctggtttctgggttgatattgaagatgttccggcgttcaaagcctcctggaaaatcgctaagaaaatggtataattagcacgaattgctaaaactcgataaccctgttctgttatattacacacatcgaaacgaaggaggatatcatggaaatcatctacaaaagccggaactacaaaaaagaagatgttgcagcagtttacatcaagtaccggaacgtgaaatgtgagtacagcgggatctggggttacgaaatcgttgtcgaagaagtcaacgccgacaacaaaaccatttgcagtttcaccactaacactgatagtcctctgttcactactgagcagcttgaacaggcttatgaactgcgcaaccaggcttttaacgcggtacgtatcaaatgagattccgtccttatatcgaattccttcgcggtatcagcgagatcctgaaccgcgaaatcaaacccagtccgttagctgttgagctttacagactggatgcaacccccgaagatgcagcaaaagattatggaaatgaactatgactactgaaattgatattgttgttgaacaacttgttcttgaagatcgtaaaataacactttcctattattcggaagatgggtatgaatcgtgggatgttacgttcgaaggttctgattttggaacgggagtttcctttagtaatgaagaaaaagcccgtgaaaaatataaagaatattgtgttctttacggaaaataaaatcgcttgcgttgtgtgtagggtaatgataccttacacacatagaaacgaaaccggagattgttatgttaacttttgaagagtacaaagcacagcgtgatcagttaagcaactggcacagggagatcggcagggaattgagcgcttaccctaaaaatgaaatggggatgacgatcgaatcaatccgcaatacaccggaatacaaagcgaaacgtgctttgtgcaacaaagttttccaacagcttcgcatccttaacgggaagtacattaaactgtacaaaaaagaactggctgacgaacgtaaaagaagattcaactaatcttttctaatttccatcctacggtattcttagagatatcgtagggtttatcgcatgttgtgatgacttcacccagatatgttttcagtttgcgcatggaaatatttctgtctttgcaaaactttttacattctccttcaactaaaaattcttctccagtaggggaagtaaatttccacataaccgcgcgggaattgccttttccacttcttgattcagattgcgctttacgtatagcttccgctctttcctctccgtgtatctcttcataagaccgatggtcgttgtatcgtgggttgttctctcctttgtgtgatgcaataccttccttgaatcgccttttatgggattctgagattttctttgctgcgtatttctgatgtgtttgagaaatcttctttcctgtttctggcgtacatgaaaaatcaacactgttatgtatgtgtttgttataaaaatgtgggttcttgtctaccttatagatttcgtgtaaccttttctcaagtttcatcgccttttcccttgacaacccagatacgattactttatatttgtagtgtcctggattttccttctgatcttggatgaaatgactatcacgggaactactgaaatagtgtttccctaaatcgtcggaagcaagcattgactttttaggttttcttgatccataatagtgcttgttctctataacatttgtgattctgtaaacgtaatacattatgaggttcctatgagacacgttaaagtaaacgccaaacatatcaaaacgcctgttggacttctactggaagcgaaaggaaagaaaatctatcgttccgaagaggttaattttaattttgatatgaaaacaggtcatatgatgacttggggaaaaactcctgctgacgatcctatttatagtcattttccttttatcctcgatatcgagatcacaactaaatgcaatggccccgctggtaaactctgcgggttctgctacaagtccaataacccgaacgggttcaacatggatcttgccaacttcaaaaaaatcatcgacaaaatgccctggcttactcaatgcgcactcggtgctgatgcacaggggcaaacaaaccccgatatgttcgatatgatggcgtatgcgcgttctaaaggcattgtgccgaaccttaccattgctgacgtatcaaaagacgttgcagcgcgtttagcggcggttgctggggctgttgcggtatcggtttataaacacgctggttttgatgtcgctttcgactcagtagcgaatctgacagaagccggacaacagcaaatcaacctgcatttcatggttagctcgaaaacctatgatgacgcgtttaacgtggttgatgccgtgaagaatgatccgcgcctgaaacaagtcaacgcgatcgtgttcctgggattgaaacaaaagggacgaggcaagaactgggacacagttacccgcgaacaatataaaaaacttgttgaatattgcctcgattctggtgtaggatttggtttcgatagctgttcagcccctgctttcgttgaagcgatggaaggacacccaaacttcgaacagtacaagcaatatgccgaagattgcgaagcaactatgtttagctcgtacattaacgagaaaggcgagttcttcccttgttcgtttaccgaacgctgggttgaaggtggttgggaagaaggtttgaatgtcctggaagcgaacgatttcattaaggatatctgggaacatccgaaaaccaaacagttccgtaatgaactgatcggtaataaggatcataacggttgtcgtaactgtccggcttatgcggtatgcggtaaagatatgcgcgtacacaaagcccctgaacctgatgtttacgcggtggaattgaaatgaaaatattatcgtacaacacgcgacatgatcgcttagttgctctggtatcggatcgggaagcgtcactccttcagcgtttcccgactgaagaaatggtactccgtgatattgacggatacggaaatgatgatacaatgatcgcatcaagcatcaaagttgaatcggtcgatatgtgtcacgtatcaactttgcttgcataccgtcattatgttgaatatggttcacaacacattttcgactttatcgctaaactggcatctagacttgatgaagaggaatactatgatttattcggataaacctactcttcgtcctgttcctgtaacagttggtattgtgaaaccgcgaacgttggatagtttgatcgacaagtacagtatgatgccaatcaacgcgcaatccgcgcaactggcactatcggaaagagacgctatttgctgcgagtgtgacattaaaggttttcatacagaagaagatcttgtaatgatggattacctatggcacattcgtaatgaagttgttacttatatactggcgtcggaacgagcaggacgcgctgtagcagatgcgcatagagaatcacagaactacattcgcgggttatcagcagtagaacgggaggcgttatatgcaagaaataatcgatgaactgatgtacgtgtacagagaacgttgcgaaaaagctcgtattaccgaaccaaaggtaaaagcaatcattgaaaattactgctcgaaaatacaggcacaagatcccagtgcaaaattgctgaacagtttaatgattcttaaactgttgattgcttctggtgatgatatgccgtatgatgcaaccaatgcagcagaattccaaaaggcgtatcgttcatggggagtgatctactctcgatctctgggttctcatgattccgttatgtggaatctcatgcacatggataagctgatctgggaagtgttaaaagaggaaggtatagaatgaatcttgaccgtgagttaagcggtgcaatccgcaaacttgaagaagtgcttgatgatttgagcgctggcaaagaaatcaatgttagtgacattgaagcaaaactgtatgaatggcgtagtgctttgtataatgcaacgaagggtaacgatccactgttcgatgaatatgatgtgtatgaagtcgaattgtgggacgaaaaataccgtttcaaatggcctaacgatgcttttggatctattaattctttgtatatgtccggtggttatctgtatgcaactgacgtaagcgtacatgatttgggtatcagtccagatcataaaatcgatttgcctaacacgttcagtcacacaactgtgtgtcttggcgtgattaactattctcgtgttagctggatcgaaacaagcaaaactaacttaaaaagagtgtaacatgttaaaagtaattggatgtatcctgttggtcgtcgtctgtgtattcctgcaatcgagttgtaccgacgaacgagaagcgcaacgtatcctggaagcacaagggtatgagaacattgaattcactggctatagctggttctcatgttccgaaaaagacacatacgcaaccggatttacggctacgggtgtaaacggtaaaccgatcgctggtgctgtgtgttctggaatgtttttcaaaaatagcacaattcgtttcgaataactgttgacactaatccccgttgtgataatatctatctcgtagacaacgaaacagataaacaaggggattaaaatgaacttactgaacgaaatgctggaaatggttgaagcgaacaaagaagcaatgaaagcgaaagaaggttgggtagttgttactgactgcttcaaaccgcaaagctggcttcctgtgttcctcaataaagatggtaacgaagaacacggcttctatgatgctgcaatcttcgaaaccgctgaacaggcttgcgatttctggtcttacctgagcggtgacaagcctttcaccaaatacggtgtttgccagtgcaaagacatttaatcccagccccgaaaggggcttttttataggtgaaatatgaccaaagcagaaagaattattaaccatcttcaaaccggattcccgtaccagggagatttacagcgcgatatcatcgaactgttatcccagcatgacggaatggaagcggagataaaggaattaacacatcctgacgtgaacatattcgcttcactgatggatgatgtgatcgctatcgactcagacgaactgatctgcatcgagacaacgaacccagaagataagacgatcctgaaacaagcgtatgaacggatcgaagcattacacgatcgcctgttccagttaacttttccatcaaaaaacgataatccctgttgacagataacctgactatggtaatctgtatatgaaaactaattatgaggtgtatattatgaatgcttttgaaaaacgtgctcaactgaaagacattaaacctggtgctattctgtatgaagtgtttagcatcactggtgttaaagcagaaatgggtcgtaaacatatcgtcactgggttcccgtacaaccatcgtggaatcgggctgtttgttaacggcattaccatttacaatgactgggaaaaccatagtcatttttcattgatggatcgaaatgtagtggggcgcaaccattataatttccatgcgttgttccgtagcgaagcagatgcgcaagcatatgttgaacaaatcaataatgataaacttcctcttgatgacaaacaggaaagtgttgaaatgacgattcgctggaaacgcgatcgcgaggaagatgcaatttggagttacatgtaaaacgttgcgcctcttaaaccataaataccctgtgtagcccatagggtattttcataaagaggtatgtatgtttaaatttagtcagaaaagcctgaacaacctgaaaggcgttaagcctcaactggtgaaagtcgtagaacgtgctctgcaactgtctcctgttgattttggtgtacgtgaaggtctgcgtactgttgaacaacagcgcgagaacgtccgtaagggtgtatctcaaacaatgaactcaaaacacatcacgggtgatgctgtggatctgtatcctagcgtattgcctcaaggctggcaaacaaaccctaaagtgtggttgcctgtcctgaatgctgttaaacaagcaggtgatgaactgggtgttaaactgcgttttggtatcaactggaaaaatgatccgaaccttccgatcgaaacaaaattcattgatgccccgcatgtggaattagcgtaacaaaggggctttggccccttaaaggtaaaacatgaatagtgaattttatgtaaagacaattgaagaatgtcgtaagatgcatcttatgagagagttggaagaaccaacgcataattacggccctaacgattttatggtatttgaaacccggttggatctgggtagaagaacacaaaagactaaaggcgcgtttgattttatgaaacgttcccatagttcccttaacatttacgtagcgcatacgttaaatgcagcacaagaagccaaacggctacacggtgctaccggatgtgatgtattgaccagtaaaggggcgattcttaatcattttcgtggacatcgaatagagcaccaggcaattaaccttatttttgatgagtgcgatctcacacacaatgagcgaatggatattgtgtataatactatcctacattgtgtgagaaagagacacccattagcatatattcacgtaatttcgctgggtatgtaatgaaaagtcatggctattcatcaagaaccatacatgaagagattcaagggatcgaatctcttctgaattttgtagatgttgatacatctacaggtaaagtgtattggaaagttcagcgcggccctatgtctcctggaagtgaagccggaagcaaaatccgtttataaccggaaagcaaaagaggttttcggtgcattttttaacgaaaccacataaggttaatgtatgtcaaaatacgtattagacaccaatgttttgattagtaacccctattcaatctattcattcactcaacctggtacagaaatcattattacctctgctactatgggtgaattagatcacctgaaaacgaaagaacgaacagcgcacgaagcacgattggcgatccggcttctgtcaaaagttattttcggtcagtcatatgatgcgattacgaaatcaggtattcctttaaacctgacaaacccagcactgtctgacactatcacccttaaagtggttgattatgtcggaaacaaaacgtttgctcttgacaagcaagacgaacgaatcattgaaacttgtatgcaacaggatgcaaccttagttactcgcgatattatgatgttgctgatcgcaatgtcccgtgggtgtaaggtagaacagtatactggcgacgatacgttaaaagatagcgatgtattgtattccggttatgtagagatccctgatttctgggataccgtagaagtgttgggatatacggataatgtagcccaaatcacttacagttcgcttcctgacgaagatttttatcctaaccagtacattacctcaaacggtgagttagtcgggcgtgtggtgactgctgatgagatttgcttgaatgtcttacctgttaagcatgaacaggctatgaaacgcaaactcatgaaagctatccaaccccgtgattctctgcaagcggctttcgttgaatcaattatgagcaatgaaatcgatgttgctaccattatgggcggcgctggttctggtaaaacaatgcttgctgtttccggtgctatgcacctggttaatagtggacattacgctaacttgatgtatgtgaagtcagatagcccgttatcaagtgaaattggcttccttcctggtacattgggcgaaaaactccggccttctatcgaaccttgtattactagcctgaatattctgtttaaggataatccggaatcggaaaaatacattgaaggtttgattgaaaaaggggtggttcaattccctagcctgtattacttccgtggtcgcagtatcggacatccggatccgggcaaaggttctgtgctgattgttgatgaatgtcaaaaccttagcaaccacgaaattaaatctatcatttctcgttgcggagagaacacacttctgatactatgcgggaacattaagcagatcgacaaccctcgaaacactgccgttaacaacgggtttgtatgggctgttgaaaagctgaaagaatacgaacactcaagccatatcattcttgatacagtgtatcgttcccgtctcgcggcgtttgtcgaagacaatttctaatgatgggggcgaaagcccccttttttgtgaggtgtatatgattactgtcatccatagcccaaaactaattactgtttgcagttgctgtaaaagtgggttagaatatgaactatctgatatacagcaaaagagagaagcgatttacaatggatttttctctgctgctgattatgttgtgaaaaaatttatcatatgtcctaaatgtggtaactcagtgaaactatttttgaattgaggtttccgtaaaatgaaactagaaaaacgttattatgtagcaaagttgagcgatcttaaagaactaacgccagaagatttgaaaacgttcaacgaaatttgcacgaaaatcgaaatcgggcgcgggattaatggtaagaaaccatttgatgcaatcgtgatcgagaatgattggcctgaatacgataaagtgttggaaatgctgacttctcgtattgttcgcgaagaaaccgatcgcaagtttgaaaagatgctggacaacaaagaacgcctcggatactttttcgttgttgaaactcaccaggggacttttctgatcaccagtgatgcgcacagcacaaatcgtctgacgaaatacagtgggtacaaataccgcgcattgttcagccctgattgtggatttgacaacagtgagatccttactactagctggagcgtctactttaaacatgccgttatggtatcgttagatgaaatcattgcgctatacgatcctaacaaggctatttcaaattataacattgctgagtttatcgccgataaactacgtgacgcgaaaactatctaaaatagttgcataaatataaagtggggtgtattattgcccctctttttgcaacataggtattaaaatgaagaaaattattattgctgccagcattttcttgtgctctttttctggcaacgctgcgacggatccgctaggggatttcattgcggatttgcctactcatcaattgcctttacaaaaggctactgtgaagcctccggcaaacaaaaattctccatcctacatcaaggatttggataacattacaccgaagcagaaagaggttttggagtatgcttatcgagttggacacaactatgatttgaagactgcaaaacctgtagaaaaagataaggctaaacgtttaggctatcatttagcggctattgcctggatcgagtctcgcgcatgtgagaatgtcggtaaaggtaaaaaaggccatcacgcttatggatgctggcaagttaccgcaagtagcgccagcgcacgaatggataagtcatatcctaaacgcgtagtaatcaaaaagctcgaaactcttcaaggtggatcgaagtatgcgatctatgaactggagtactggcttgattaccacaaaggcgacttgaaaaaggcgctggcgagctataacgctggtttcaagtatacaaagaaagaagcccgtgattatgctcgtatggttaatacaaccgcgaagctgttagaagaaaaacaaatcatttgacaaaaagcccttgacttcggtctggggcttttttattatggatgcatctaattgagaggaatacattatgagcgtttcacatcaaatcattgtttcacaaaaatatgattaccctaatatgttgcgttgtgtacaaacaatccgtgatcattttagcaaacaagataacatcgttatcaaagagattactttgagcaaatctctcgattgttttaacatttattttacatatgataacgaacagcgccgcttgttcatttgtgaacttatggacatatattatgatatggaatacaatcctattcctaaaaatgggttgtattttagtatcaatgtctggggaaactcacagaaaattatggatcttgtgaaagaagccgtgtatactgttatcacaagttcggatactgtgtatgagcgcccgaacgatgcaatcgaatatcgattcactttggttaaatgaggaatacattatgagcgacctgattctgaacgaaactaaacgcgtactgtttaaagctggttcctacctcgtagcgactccgaaaggcaatacttcccattggtcggttgctgattggatcatgtatattgacaaaaacggggaatgggtacaatgagaaatttagctttcgaagtgtccgtaattgatcaacggataaaagaacttcatgcgaagatagccccgctgcaagaagaaatttctaccttgatcaaggagaaaagagacctgattgaacttatcgaccaggatatcattaacaacgtcaaggacggggaaaagatccctgtgatgttggaatatcgttcttctagtgtgtcttatcacgcggctacaaaatttttcgaatctatcggcctgggtatcgatggtatggatccggacattaaccaatactgtttgcggatcgcgatggatgaagacggttcaaacattaatcgagttttaaccgctttagaaatggtcgaaccttttgttagaccgcaagcaaacgggcgcaagcgtttcgatctgttcgaacatactctgtctgaatgggattgctactggctgacatacaatccagctaacaaacgttgggctgttgaaactggtagtgggatgagacgaaatcaggatccgacattctcggatatgtctctgaaaaaagttcttgcgtatatctgcaatgcgcattattatacccctatcgaagaggatgaataaggaatcatcatgaaaaagttagcactgcttttaactctggttgctggatttgctcacgctggtgatgctcgcctggatgagttatgcaacaatcgtgatatcaaagatgtcgcggtatgtaagcaagtgatcgcagaacagttagatgttgcttatatgtggggagaggaaaatgctcacctgtataaacgcggtaagttgctgaaacaaaaagagtttttgcagtccgaaccaatgatgaatctatgcaaacaagcgccaaataaggaacggtgcgaaaagttccgtacttatttggttgacgaatttaatgctggcatagggctttactaatggctatctggatttttattattatggcggcggttgtggtgttcttggcgtacaatgctggtaagcatgagagcactgggccttgttactattgcggggatgatgactatgtttagtgctggatactttataggcgttgttatcggttttataatttttggtggtgttttatatatgtgtcatcaagaagatcgccgccgtgaacggaaaggtaaacaggtgtgacattacgtatttttcttacgttcttttaataattaaggttaatttatgaatgatatagacaaagcaaaactctataacaaactagataattttgctgatgctcgagaaaagtttttagatgatggtgatttggctcatgctcaagaaactaaggattggtttgatgatattactgatttcatcgatatgctaatcgaacgcgaattatataggaataataaaaatgatcattaaagaagtgaaaggtaatgctgtcaatatgtatctgaatggtgaaggccatttgatccacggatgcaactgctattgcaatatgggcgctggtattgctcgcgaaatccgcgatcgtattcctggtgcatttcaagttgatgccaatacgttaaaaggttcccgtgataagctaggaacttgttctgtttacattggcgaaaaaggcaacattgttttcaatgcatatactcaatatgatttctggacacctgggccgcgtgtcgattatgacgcaatcggcaatgcttttaaacaggcggtagggcttgctgacgccgttaagactggaaagcctatcatcacacctttaatcggtgctggcctcgctgggggcgactgggaactcattaagcgcattattaatgaggtgactggtgattatccgatcattgtcgttcatttcgatcctcgtaaggcgaattaatcatgatggatcctatcaaagcaggtcgggagattaagaaagcgaacaaacggatcgccgtaatcaaaggacaacgcgccgcactggttaaaacctgtaatgcattggcgcaagcgatgaaagcgaataacatcgacgttatgcaacgtaaagaaactgttaatgttctatgtatcgttgacaattgtctgagtaaggaaattgacgaactgaaaagcaaaatcaatatgtggtatcttgatatccatcaagcacaagatagcgaaatgggcggttatacgcatggctaaactatattttcattatgcatcaatgaatgctggcaagagtgctcgtttactcactgatgcatacaactaccaggaacgcggtatgcggatcctgatgtacaaaccagcaattgatacgcgagaaggtaaacagagtatctcttcgcgtattgggttggaagcaacatgcaccatgatcacgcctgatatggacttgtattatgatgttcacaacaatcatttttacagtgatagcgagaatctggtttcttgcgtgtttgttgatgaagcacaattcctttccaagaaaaatgtcatggatctgtgtcgggtagttgacgaattagatatacccgtaatgacatatggactaagaaccgattttcagttgaacttgtttgaaggttcttatatgttgctggcgcttgctgatgagatcagggagttgcggggggtttgtcattgtggaaagaaagcaactaccgttgcccgtattgatgcaaatggtaaatttgttgctaatggcgaccagattgagatcggggccgaagacaaatatgtttcactttgtcgaaaacattacttgcaactaaagaacaaccctgatacagtggaagcataaacaaaaggagatcattatgagtcgcacttaccgtaagaaatacaatcctcttcgtgaccgttcatctaatgaaaatatagaagaagtaaaagagtattctcgttattatgctcaacatggtattgatccggatgggttacgttggtactcaaccaactggaaacacaaatcaggatgtgcatacattcgatttgataataatctgtgtcgcgacggtaacaaagctcatggcgatctgaatgcaatgctttctattgcagtaaagaaaattgattcaaaagtacgtacccgtttacgtcaggaactgaaacgtatgaaagctggtgtgatcggttgggatgaaaacgtagaaaacgtgaacaaaatacgcgctttcgaaagaagtttgtgttggtatgacattacttgattgactttacagcaaaaatattataacgaggcttcggcctcgtttttgctataaatatatacaggagtagacctatagtgggtctatgagtaaaagagtaattgttatgaacattaaacgcatatcaatggctgtgctgttcggattgttgatgatgacacccacaacacacgccgccgaccgtccggttcagaaagaatttgacgattatattaatgcggcccttcaagtatacatcacaacgatccctcccagcgtaaatacaagcgaactattctacaactacatggaacgaaaatggcaccaaaaacaatgccgatctgaatccgaatgcgcaaagctaggaattagggtcgcgtatgagtttgcaagtatccatcgttcataaagggatcatcatgcaatcatttaaacaaattacagaatctgagaactcaagcaagatagatgcctttattggcatgtgccttatgtccgttacgtatatgcatagcgcacattttgcaacaggttcctactcacaacataaagcatatgagggtttttacgaagatatgcaggatttggttgataaattcaccgaaatccacataggaatcacgggaagatacaaacctgtgctaaaaaccgaaaatatgcttgacacggtagcgtatctccgtaaaatagccaacgaagcaaacgagatctacgaatcagtagatagttctttgaagaacatcctggacgagattaagggcttgtgctatcaaacaatctacaagctgacaaaactttcttaaaaatagtttgacagcgtgaaatgtgatgatagaataactatcgaattgaacaacaacttatggaaattatgatgaacttaaacactatcgtgaacaacccgaagaaaacctctctgatcgctctgggcgtagttgcagcactgtggttagtgcctaacatgtataccattgtgcaagacggtacggttaaaactgaaaccttcatgggtaaagtatcaccgaaacccgtactgcccggtttccacattgtaaacccgctggcaacgtttgatacgttcagcaccaaagacatcgcgatgaagttcgacaaattacaggttccatcccaggataaatttaaatccactgtggatatgaccgtaatgctgcaattcgacggtagcaaagcaccgatcaaccgtatcaacgcgggtaatcaggatcaggcactggataagtatgtaactgaaaaactgctttccactgttcgcgaatttggtaaatccgtaccgaaagcgcaagacctgtttgatgcgaagatccaaaaccaactgcaaattgcgattcagcaggaagtagaagattatgcgcggccttacggttacactgtgaaacaggtattcttgcaggatatcaccctgccggaagttatcatggaacaggtaactaacacgaagatccgcgaagaacaggttaacgctgctaaagctgaactgcaaaaagtagaacagacttcactacaagcagtaaaacaagcggaagcagatcgtcaggcgcgtgaaaacgctgcaatcgctaacgaacgtgatgctgatgcccgtctgtatgcagcgaagaaagaagcagaagccaacgccgccctgcaacgcaccattacgccggaaatgatccgctggaaagaactggatgtacagatgaactactctacccgctataaaggtggtgtacctcaaactgtaatgggttcggattatgctggtaaagtgattttcgattctcgtaaataatgttttaaagccccctctttgggggcttgacatctaaaacgagaatactataatgaacataaaacagatcgtactgactatactcatttcactattctttggtttcgttggtggattgtttggtgtgttgataattgcgtctgttttatgattaacctttaaacgtggagcacgttatgaaacacaaatatgataaagctgtagtaattggacgttttcaaccttttcactatggtcatgagaaaatggtaagggaagcccttgctgttgctgatacggtttacattctgatcggttctgcttatgcatatccgaacacattaaacccattgaccgctaaacagcgtcaagcaatgatcactcgttggtctatctgcaaacttgatgttgaagatgcagccagaatcaaattcgcgcacattccggattacctctataacgaggaaaaatggaaatcccgtgttcgtatggcaatcgatgaaactcgaaatgatcgaattgcgatcgtcgggtacgaaaaagacaaagattcttactggcttaaagcattcggatggaatcatattccggttgaacctgtgaaggttggagatcaggatctatcctcgaccaatttacgcaaaattatctgggaacaccatgaaggctgggacgaagatttgttaaaatatgcgcctagcactacggtttcctttatcgatgaatggacacaaacaaaagaattccaacgtttgtcccatgaagatgcacactggcaacgagagattgacaagttcaaaaaatatccgtatccggattctctgaactgctgcacggctgactcagtggtcgtatgtaataaccacgtgttagtaatccgtcgtaagtttgcgcctggtaaagatgcgttagcgcttccgggtggacacaaaaacggtaacgaaacgttccttgattgtgcgatccgtgaattgctggaagaagtacgaattaaagtacctgaaaaggttattcgtggttctatccgtaattctatgctgttcgatcatccgaaacgttcggtgtacttctcaaaaccgactgtagcacagtatatcaagctcgaacctaataacgatggttcattacctcgtattatgggcggctctgatgatgcagcagacgcgttatggctaccgatgcacgaagtgatcgcgatgcgggatctattcttcgatgatcattatcaaatcatcgtagcatttaccggaatttaaaacaaagcccttgacttcggtcaggggcttttgctatattgggcctacagaaacaaaagaggcttattatgaaacatccctattgtcttgttacccgtccgatttgtccaggtgggttgcctgttgcctgttggcagttgattgaaaagggtgatgcgtttttaaacaaacgcggtgagaatgttttcgtttatggtgttaactcaatcgataatgaaactatggttatcaccgatgagaaaacaaatgaaaaatatacgttgacatccgaacatgattgtcgtaattttaacgtatattggaaatctgatgaagaatttgaaactgtgaggaaatgattatgatccctgttattagtgttcgtgaacaagtagcaaaaccccgtgctgttaaagttggtgattttctggacgtgagttttacctgtggagaaactcagaagcaacacaaagaatctttcagcgtgatccttgtatctaaagattctgatggttcgacggtttacattctgcataaagtaggaaccgcccgtgttcagggtcatgtaatgattatctcggtatatcctggcggagataaagtatcttctcagtgtttagataaagtggctgctcgatatttgagagatagtgttttaatggcagaaattagtaaaatttatgttaattctcgttctgctgttgatggtattgttacacatgtaggtgatgaattgatgttcaccgaaaaatctcatgaatcggttcgccgtgctgttaaagttggcgataaactcggaagccctcgccgtgattatgtggttgaatacatcacctcttctggtgacatcatcgtgaaagctgacaaaggttctaccgttgtcatttcccgacgcgataaaaagctgattgaatcactcaatcaggatctggaatggatcgatgaatcagaggtgtacgctgcatgaaacctcgcttgattatgtcggatatagtgattgtcaacaacgaagaatattatgttgcagacattaacacgaagggaacccgcgagattttggatctggagtgtgttaggggtggcgaaaaccgattcgttgtgataacatacaacagaagcagtaaagaaacgttgggtgtgcctgttcccgttcattactgtgaaaaaactaattgctggagacgtaaatgattgatttaagtgatgtgaaagttggtgatacgttgtatgatgctgggatccgtagtgaccagcgacaaaatcgcaaccccaaaaccctttacgtacaaaaagttgcgcgtcagtacctgtatgcatctttccgaccggaagatgggtctgattgttgtactaatattaaaatcaagcgcaattccgggtgggctgaggggtggatgggttatcaactgtatcgtagcgaagaagaatacaaagaaatggtgtatcgccgcgatttgtgtgataagattaaaaaagtatttgggaatagctacggaacaaacattccggatattactaccgctgaattgcgcgggatcgcaaaaaccctgggggttgaattttgaaaactgtaatggaaaccgtgttcggattttaagtgataaatacgcctaaaggagagtgtatgaactataagcgtatttacgaccaactaattacattggcaaaaagaagagatatacctaaaggttactcgaaaaagtatagaaagcgcggttatgatatacaccatatcgttgctaagtcattaggtggtactgatgaacccgaaaatttagtatatttaacatataaagagcattatcttgctcatcatctacttgctaagtatgctggtgataaaatgagatatgcttttttccgtatgtctcataatactaagaaatacaaaacgacatcttcgcaaatgagcgacgcgagaaaattaaaatctcttacaatattcacgaaagaagcgagaaagaaaatgtcggaacggcaaataattccagttgtcggattcaaccttgaaacaggagacgagattatcatattaggcggtcggcaagaaatgaaattgcgtggatttaaccctagtcatattcatgaatgttgctccggcaaacttgccaaaagtcaaggctatgtatggttaagaaagaagatttctgatttaatgagtgaatctgatatcagaaatgcaattgcattagctaatatttcacaaaagaaaacagaattgataaaacctttgattatgaaatgtatcaaaacagaaagagaaactattttaaatggtggtattgcggaagccgttgaaatggggtataacaaagggcatgtaagttcatgttgtaacggtaaaagaaaaactcataaagggttttattggagatttgtataatgaaaacaattgttgagatggtatttggttctcacctgtacggactgaacacaccgacaagcgataaagactacaaagggatctatctccctcatcctcgcgaaattctgttaggcactgcgaagaagtctatcgatacatcaactggcgataaaaactcaaagaacggtgttaatgacgtagaccgtcagatttacagtctgcaaaagtttatcagcctcgcatgtgatggtgacaccgtggcgattgatatgcttcatgcagatgatagcaaactgatcgctaactctgatatctggcaatatctccgcgctaaccgttcacgcttctacactacggaactaactggcctgtttggttatgttcgtaagcaagcggcgaagtatggcgttaaaggttctcgcctggctgcactgcgtgaagttgtcgatgtgttacagacgattcctgattcctggtatggcacatcattgctgggtaacgtagatgaatctaactacggcaagcgcatcaaagttggtgagatttctaaccgattcccgaccaacgagttttgtcgattcgttacagacaaaacactgaaatcaggttgtcaggaattttacgaagttctggggcgtaaattccagtctacgatcaccgtagcggaaatgaaaaaatccgtgtataaactctgggatgaatacggggaacgcgcacggcaagcagaagccaacaacgggatcgactggaaagctctttctcatgcgttgcgcggtggtatgcaattgatccagattttcaaagaaggtgatattgtgtatcctcttccggatagcgcatttttgaaaatggttaaagctggcggtgttcctttcgcaaccgtgcaagaggcgctagaatcaacgatgtgtgaagttgaaaagctggcggctgtatctggttatccgaaagaagttgatcgcgatttctggaatgatttcattgaacgtgtgtattctgaacatgttgtgaggtactataaatgacatatccgaaattatctggcgctgaaattgatgttctgtgtaaactttacggatactcgtcaaaaatgttggatttggatttcaacgatgttcccagtaaatcagggcgtgattccctgattcaaaaaggttacgcatcaatggcgtttagttcgccaacgaaaaatactgatatgtgtttagtgatcacccctctgggcgttgacgcatacaaacacggaattgaaacggagtggcgataatgagtgatgttattttgaacgttaaagatgtagtattgggtgatactaaaaccctggattctgcaatggaaaaggctgttgttaaaattatgcgcaatagcctccgcctggaagttaacgagattacagaaacttgttatacaggtgggctttgtggtcaatctctttatcgtgatgcgaaaagcgtgaatattcagctatgggctgatattggcgaagaatcatacaaaatcgatgaggttgatttcgacgtatgaaaataattgacctttgcgctggtgttggtggcgtgaggctcggtttcgataaggcattcggcggggtcgaatgccttttaacgtctgaaatcgataaacatgcacaacaaacatatgctgataactggggtgatgaaaatattcagggtgatatattcgccattgatgaaaacgacgtacctgatcacgatatcctgttggcggggtttccttgtcaggcgttcagtaaagcagggttaaaacagggcatgttagatcctcgcggtactatcatctttgaaatactccgcattatacgggctaaaaagccctctgtgctgttctttgagaatgttccccagctattaacacatgacaagggaaacacgtttaaaaccatctacaggctgttacaggacgaagggtacgatatccattatcaggtaatgaatacaaaagattttggattgcctcaacgaagagagcgtgtgtttattgtctgctttcgcgatccagtgttctttagttttcctgttcctccacgtaccccaacaagggtcggtgacattctcgaaccggataatgatcaatacaccatatcagatcgtgcctggaagggctttagagagcgtaaagaacgaaacaaggcaaacggcaaggggtttggttatcaggccgttatggtggattctgtgtgtactgggacgataacagcccaatatggaaaggacggtgttcaatgtctggtattacaggaaggtaagaaccctcgaatgttatcacctcgcgagtgtttccggttgcaaggatttccggattcattcaagatgcataagagcaaaacacaggcgtacaaacaagctggtaactctgtatctgttccggtgatcgaagcaattgcaaaacaaatcaaaaaagcgcttgcataggctaacgaagaatagtatagtgaccttgttgaaacgaaactgacaaaaggaacataccatgacttttaatgacctgtttaacggatgtactggtgctggcgcgaaattcaatcttctgaaagattatccgctgggttctaatcctggttatgtgatggttgaagttcgtaacggtgaatactataacgtgttcatgtgggatcgctctttctcttactgctggttcggtgcgaaatacaagccagattacattctggagcaaatcgaaacagtaaaagctaaaaatcctgaactgtatgcattcgcagagtctattcgtggtgtgttcggacattgattaatcaagccccttttggggctttttcgtgaggtttatattatggccccttcaatcgtgatgcttgttatttctttccttgcttttgtcagtattatgtgtttgctattgtcgttaaaacaaaatatcggaaccacttggttagttatccttttgataatgattgctggtttgttccttttgattgtttccgatgttgtgtctagtctcatgtggcacatcaactacaatcgttatgttcagtgaggtttatatgattaccgaagttattgaaatggttttatacgcgttaacgtttgttctcttgttccttagtgcggagtggactagtcgcggaaatgtagtaatggcccgtatttgtgcggttgctgtgttctggatcctgggtttactgttgattagcatcgttagggggtggtgatgatttacgtagcttcttatagtgctgattatgaattcactgaaattgttcatgtttctgaatcattacaaaactgtgttgatgtgctgaacaaagttcctaatttcccttatcttggtgatcatgttactattgatgtatgggaaaatgaaaaactcattgcaaaaagttcaacattcgggcatcgcgatgtatgggatgatgaatcactacagtacaacgaaatccctgtaacttttgaagaagttatgaaaaatatgaaggaagtgaaagatgaacatctatagcattgagttgatttttgatggccgttttgatcaaacgtctgattgtgtatgttctactgttgacctgaacgtcgcgatcaactacattaagcatacaccgcttccatctttgcattactattgtataactgtgtttgatggattcacaggaaagccaacacattgttgtactgttgggtatgacgaaagaaaacatttcacaacgtttgagtgggagaaattataatgaaaatccgttctggttttgtgagcaatagttcatcaagtagctttattgtacggttcccgaaggatccgactgatatcaacaatctccgcgaaatgatgggtgactgtgttcctaactgtggttatagctggatgacttgcccgacagcggaagaagttgtacagcaggtacaccgcgacctgggcggtcatatgggaaatagcttcgaatcatactatgatgataagcgttatgaatgggaaaccgaagatagcgccgaaactcgatatcggtctaatcctcaaattgcgcttgcttatgatgggcgtgactggtatgatctggaaacagaagagaaagacgctctgatcaagatgtggttgtatgaagagtacaactctaaatttggcaatcaggacggtgtattcatttatgaatttacttactctgatgaatgcggagaattccaatcccagcttgaacacgggcaaattttccgtaatctggaacacactatgaagagtcatcactgatggaatacgaaatctgtgtaaaaatgcccccctatcaactgggggaagaaataacgtttagtcaaactctaccagtaccgattgatttattttctttgcgaaaatatcttgaacggtttgacctgaatgagtatactattcaaatcgtaaggattaaaaatcctgttgcctacgctctgtcttttgacgttggcgagtctcaaacaacaacgatggatgattttgtttcattgttgagtagtaagtttggatgcgatgatgcattagatataattagcaaaaaagtaaacgaaattttaatcaaatttacctataaatgagaaaattatgatcactaacattgaattcaaaaacgccgtagccaaaccaaccccgactaaccacgtttttgtttgtgacgtatccggatcgatgtataacgaactcccgcgcattcgtcagcacctgaaaaacaacctggcaacgctggttaaacaggatgataccgtatctattctgtatttctccagccgtggtcagttcggttctgtattcgttggcgaaaaggttagctctgtatccgacctgagcaaaatcaatgatgctatcgatcgttatctgcgtccgaccggatgtactggcttcgttgaacctctgcaactggcggttgaagtcgctaccgatctgcaagcggataatggcaatctgaacagtctgatcttcctgactgatggttatgataactgctggcgtactgatgatatcctgaaagcgtgttctactctgccgttgacgtttaacaacattgctttcctggaatatggttattatgtaaaccgtcctctgctggaaaaaatggcggaagcaaccaacgcattacacaaattcgttgaagggtttgatgcgtatgtacctgcatttgatgaaatcattaccgcgcaaacctccgcacgtgttgaagtcaaagttggcgatgcaacccatgcgatctacctggatgaaggccgtgtgtatgtcctgaatgctgcaaatggtgttgttctggttccggaacatatcaaaaacatttgggcgctgggtgaaaacgcgatcaatgacgttgacggtttcgatccggcaacagcagaaggtgaacaggttctgtatgtggttctgtatcatgcgcttcataccatgaatccagatctggcatggaaagttctgaaaaagctgggtgacgtgcgtcttattaaagcatacgataactgctttaccaaacaggattattccaacgctaaagatatgatctccgaagcggttgttgatccggctaaacgtctgatggatggtgttgattacaacatggttcctgatgaaaacgcgtttactctggttgacgctctcgaactgttggcagaaaccgacaccgtgatcgacctgtcttctgaacactgggcgtacaatcgtacaggccgtcagactgtccagaaagatgatgatactctggataaactgtcagaacagattgcaaacgcttctactccggaagaacgtaaagcactggcggcgcaactggtagcgcatgaagtatggaaaccggaatttacccaaaccacaacgaaagttgcagtgaaacacctggtgggtaacagttcccgtccgaacatttccatcaatacggatctgcaaggttatgtaaccattccggaaagcaaacaaaaagagtttggattgccggaaaaagtagaaaccaaacaagtgcgtaactttaccattgttaaagatggtatcgtgaacgttaaggtacttccgctggaaaccgatattccgactctgaaaaacttacgtgcttctggtctgactatcaaaccgctggctaaaattggtgaagaccgtatgtctgtactggttgactttacctctctgcctctggttaaccgttcgatgactcgcggtatttctggtaaggaatttgttgctgataacgtccgtctggaaatcctgaaaggccgtcagaaggtaatgaagttcttccgtgataacgcgattggtttacgcaacgcagaagggcttaaacagcgctttggtgaggcggctggtgaatggttgtctgagcaagggatccgtgattacggcttctctccgaaggttgagcgcacagaatcgactgatgtttacatgtcgaaagaactgaacgtgaaaatcaaaggcgtttcatcacttccggctgttgcggctaccgttgcaaaacgcgccgaaggtaagaagaaactcaacaatggcgacctgatcattctgtgggcttacgataccgtatctaaagagatcgaagcgcttgacaagaatgacctgatcgagtatcttgataagcagacaaaggaaactattaaagaggttcgcgcccttaataatcgcctgagtcgtgtaatgtacggtattgtcgtcggacacgcatggtttgcggatctggatttcgaagaaaccagcgtaagcgttaccgcaacagatatcgttgcagcggaattctggaaagatgtgaaatttgattgcacaatcgttctggaagaaaaagaagttaaactctaatgagatctcgcccccgaaagggggctttgaggtgacttgtggaattacttgaattggactttaaaaatcttatgaatatatgcgaactgaatcaaggcgacatcctttatttctccaatcgtgatgggtttcgtaattcccgtcctgaaaacatcggctttcattcacagctacctgatttcatcgtcgttgatgatgtccggttaacagataacggctggcaggttgatgtagtcggattcaaaaataacaatggtgctatcttatggcgtcatggttctattgatgaatcggtgtattttaacaacattcgtgtaaacatcgatgaaatcggaaccgatttgagcgaagtgcgggaatctccgtatgtgttcagcaactggtttaaagttggtggcgcgtatcgttctgataacacaacagttgtgtatgttgatagtttgatgtccggtatggttaacttcaacccgtcattacctggtaacaacggcacgatgatggacattttcagagattataatcgctctggtacaatgttaccttctgaaaaagcatatgtaatcaatcgttgcttgaaagggctgtaccaggatatgcttacctataatgaaggtaacgtaaaagatgcgcttcacgatctgaataagatcctgaaagaagtttctatgagaatggatacccgcaaatgatttctttattcgcgttcgtttcagttgttgtattgattttcgctggaggtgttatctatcatgggtgtgaccgtcgtgaagataaggtcattctatggggtatcgtcttcgcgctaatccctctattcatgattggtaatatggtgatgcgatgaaaattcgttctgggtttgtgagcaatagctcaagcagtagctttattatcgggatcggacttgttcgccctggtaaagaaaaggaagttgctgatatctacggtgagaataatattgagtcattaatagatatgatcaccgatgatactcgttcgaagtggggtgttcctcaagtcgatagcgacggtacgatctcactggaagcgttcggttcccatagcgttgagatttcgtatatctgggataagctgaaagaactggggatggacgatatcaaaatcgttcacttcaatgaacgcggcgatgaaccagaatatgatgatgaatgcggaagatacaattatagctggtatgaagacgccgacgcgttcgggcctgaactcgaaagaaagtataatttattacgtgataaccgcgaactgttcattgaaggcgatgtgaattgtggcggggattacgacggttaaccactggggtaatgcatgataacgatagtatactgggaagaagtcgaaagcgaaatgatcgatggggaactggcggaggttgacggggaatccgaaatgcttactgctactgaaacaatcgaaaacgctttcgatcgaatcaaagcgcatcaaaaagaaatggaaggtcgtgatattcagtacatgatgagtttctgggtcggaggcgaggcgttatgtcatgccgtaattgcggaaagcacctcagttgatacatgtcgtgaaaagatcgaacagtacgtgaaatctttcttgcattgatgaaaaagcccttgacttcggtcggggctttttgctatattggttctatcgaaaacaatgaggaatacattatgaaatatctactacttgcacttagtcttatgaccacaaccgcaattgcttcggaacctccaaccgattaccaatcatttaaagcgttatcaaaagaagaacaatgtacgtatcttccatcataccaaacgatgtatgattggattacgttatcttctgattacgatcaggtaaagtcaaaaatcgttagtgactacttgtataacatatcgaaaggttgtattcttaaacttcaactacaagtggatacactgaaacttgaaaaaatggaaagagggcaataggatgaactgcgtatacattatcattgaaaaatttacttctcctgctggtaacgttgaacaaacaacagtctgtgctgctctgaatgaagaagaagcaaagcataaagtaaaatatctcaatgaaaatgcagtcattcctttcggtttcaaaggttatactgtaaaatacgaatatactgcaatttcgcttgaaactagcccttcctggctacttgatatgaaatgaggttgaaatgaatccttatacaaaatgtgggatcatgtccctgttattaaaagaagttgtgcggttctatagtcccgttggtaaagtgtggtgtgtatctatcgggggtagacaaattggatggatccgccgtggagacacaatcaaaggctggcaccaatacactgcaatttctattatgggctgtgaatatggtgagtttgataacttcatgcaagcattgtcgcttttcatagataacgctattcgtgaaatgagttcacagggttccaaagttacaaagtacatggatactctttatgtgaacgtggaaaccgatcgatattgcatcatcaaagaagcactatacgatgataatgatgaggtgtattattacatcgtatccgatcaaaaccagatgcaaagttatatctccccgtttgaattgcgatatcaaacactaatgggattcattgaattctaaaagaaagccccaaccgaaaggaaggggctttttgttatgatgcggaaagctgtagtttgatttgctctacgtcatccgggtcatcaatgatgctgtaatagatagttactgttactgagttatcatcatactgtggaatgacttcaacagaaagattatatactctaggctcatatgtccggatcgcagatacgatagaagttctaattgattccgctgtcagagggttcatgttctcaaacagcatatcactaattgcacaaccaaagttactatcaaatggacgtgtacccttgatcgtggttacgataccaatcaaactatttcttactgctgcggccccttttgaggccgctacgtcattattccaatctcgttgcatgttaggttctatatcgctatatagcaacctcagatttacacccatttagaccacctttaaaaattgctgtaagcctctcagagagacgatatggctatgtccacacgaacaccttaccggaatgtttgcgaccactgctggcttatccagggcggtagaaatcgatttataggttgcatagtcgattgcatccaacaccatttctttatctttgtcgctgcaatcactccacatgatctgttcgccgtctatcattacgtaatcgataagatcggggatttcttcatcaccagtcttacgagggtgaacagataacgcgatcccgtcattgccgtatagcttatcgtcgaaatcttcaaccattatttgattgcgtttaagctggaattcaattctttcctgacattcttcacagttgatgaacagttgacgggtatcaatatttttactttccagaagtgccagaatgaaaagatattctctttgatacaggtaaacatcccctttgataaaatctgcgtcgggggtaaactctgtatgtgtcagaggacgataatcaacattatatttctcaacgtgtttatattcatgctttctcatttaacagcaccttgttttttcaagtcttctgcaagcaatgcagtataaatttgcctttccatcgggctactattcatgataggttccaggttcaggccatttttatttagcagatagttggtcttcacaaattcatccagatccccacgactaaacaggatcttgaacagggttaacataccactaaatgatttacctttcaccgttacatctatagactttgttaacataataacgattttctcgatatcgtccaactcaacgatatcgagaatattttctttagtttcgtctattaacgatgtccattcataacgtttttctttgtacaacacatagctaatgcattcaagaaataactcttctgtaatatttcttgtgcgtgggaaatcaaaccccaatgtgatatcgtcattcaacttgtactcatttttcagtgtgatatcattaatcaccatgaatgattcggtgtgtccacctttaccgccaatagaaattttaatgacgtttttaccgaaagaagcacaatacacccgactgaaaatgtattcctgttctgttttggaatacccaggataaagcagatccaacacttcatccagtatttcctgttgctctttaaggggccgaccttccatatcaatacgggtcagcattagtttaaactggtctttaactgtaaacatagggaatcgtttgatccctgatggtaatgttactcgaataatatcaaacataagatcctcaaaaggggccgtagcccctttattgtcctgtaattgcggtacgtgctgcaatggctaaaccttcctctacggattgtttgaacccttcccagccttctttatcagcctcgacaacccatgatgttttataggcaaaatcaacagtaaacgtccagatttcgttgttgttctcatagctcaattcactgttactgattttgacgggcaagcacttctgaaatacgtatgttgtatgcggtaaaccatcacgatcgtgtaagttaacctgaatagtacttgtcacttcatcaatgaaggcgtattgccctgttacatcatcgcgaatagcggaaatccattcgttaaagattttcaggttacgggcttctgaatcggtgcggaacgtcagcgacaattccccattctcagggcgagtgaatctgatttgaggtacgccaccattataaacgtattcgtacccaatggatttaccggggaggttaactcccatgatgcttaaacccatattatacatcattttatcacggaattcagctaacaactgtccatacatgctatcaccaaacagggaagtaatcaagcgggggctaattgccccgatgattttgctaaatcctgttttgttcagcgacataatcgccttatcaacggtgtaactaaacaatttactcacaccgccagtgatagcattaatgaattcgttcgggttgttcgcgttgatagaactaatagatccatcaatcaaagtatctcgaatactaccaaacgtgttgtcaaggatacgtgatgcgggactggttgcaaatacaacgctaaacaggttgctacgctgaaaatcgcgattagccatacctgataaaaattcatctacgttgtaaaacatcatatctccttagtaatttgtatcaaaaatagaatcctgacgcatatcgatcagttccataaattgaatttcgatctcaagcgagatcggggtatttggtgattctcttaatgtatttacaatattatcaatagaacgaccaaagcgaacactggtaatacctgctggcccaaaggttgaatgaggtaaacgcaaggaatccccagactggaaatcacgaataaaccagacaggaggtgatttaataacttcggtatttgctaagagatcaatccccatgttaatataactaccgtcactaaaccttcctggagtgctgggtgtcgaatcggggctaccaagaaaatttgagacagacgcgccaccttgactaaaatattcttttactttatttgcaacttctttaacagtacccccagcagaagtagaaccatatcccagaacggtaagcagatagtaaattttaacaagttcgagcaaatcattacgattttctacaacaaacgtattataatacattcgtgtgcgtttatcagaaccctgaaacgcccctcttgtaccaacatcaagggcttctcttcggtcggctaatataccaccagtgacagattccacaaccccccatacaaagttagatgcaactctgcttaaccctttggtaaaccaactatcatttgcatcctggtagcggtgactgttaacttcgttatcgttaatgcttcgaggtaacaatatttgacaaactggcgataatgttcctatacccttccctgcattcagaatttgtttatatttgacatttcctgttccgtctgctaatacttgttgtgcattctgggctgcttgtctcaacgaacgataatcatctttagtaccatgccccgcaatatcatatgcagtgagcaaaagcccgttgttatacaaactcgaagcgttataagcgttatcaatacctgcggcacgttgggccggaaattcagccgtaactattggttgttttaacgcatcttcggttattgcggcacccccagaggggataccgcgatttttaatatttttgagagtgtttatactgtcatcaataatagaaaacttcatatatgttccttatgccagcgtcacaagcggtttatgctctgtgcgttgtactgaatgagttacgttgttgttaacagttttgttgttaacctgaatgttgcttgacttatcagcatccggtttatttgctgctaacggtggcggtgcgtcgatcggggcgcttgattctgtacgcgccgcaattttgttttgtaattgctcgataagatcagaaatcctatccttctgtacatcgtccagattgccttcattgcgacgtttttcaagttcttccaacataccgttaatatctttgatgtcatcggcatcaatattttcggcgttggcgtaattggttgctttaccaagaagatcatcaccttttttctcagatccttctggtggttgtttgccttccttacgagcttgtgctaaacgttttgtttcttcggcaacacgtttgcgattgatttcattttctttgtcggctaatttctgtgcttcctctgaattattttcaatagtttctacttctttttgtgttgcttctaattttttcttcatattttcaagttcttctttacgcatatcagtaacttttttattctgttcttgataatctgtaagaggaacattatatatggaaccgtttggaacttgtgttgcccctatggttagggcttgtcttgctgcctcttcggtgctggctttttcgtaggcttctttttgatcggcgagatcttgtttcttgatcatgataatgtcttctttagacaattccagaccaaattcctgtttatcacgcaacgcgctgatctgcatactgcgaccaactgatgtgattttatcactacccgttgcttctcctaatgattgaataagacgcccaataccctctgtaatagcagtttgtatagtttgtcctaataatttcataggttctaccaaaagatcttttaacgattcgccaagcgatttattttcttcgccaaatgtttttataccgtctcgtattttttcaactatagccttgacattaccaagatacgaaccaaataatttttttgatgacgctccttctttcaggatatcttccatccagtttttgattatatccctaataacatcaatagcaaatacaagaccaccaataatgagtgtccattttgcaaacttagcaagagcttccaaagagtaaccaatgatacgactcaggatctgcgatgtaaatcctttgatagaaaccagacttttagcaatactatccagagttttgcttctcttcttctcatcatcattgatttttttctttttattgtctacatatggatcaggttcttccactggttcaggaagaggcttatgtttatcagtattttcatataaatcaacaagtttgttgatagcatgaaaaatagattcagtgttttcttccagcttaccgaactgaccattttggttaacgtttactgtattgtcaacagtttttgagttatcatcggttaaggatataggacgtatcgggccgacgaaatcaggtagttgttcggctaaagattcctttttatcctcttcgtattgttctttgaatcccgcgaatttgtcacggaatttttcttcgaacgatttcaacccttctttgatatcaagagtattgattgcactttcaagggtgttatcgttgatttcctttaggtcacgggcgctttcagcatcaagggaggctgttactttggtgaccgctggttgtttgttgctgtttctgttcagaaactttttcttttgttcttcgttgaaataagagttagccattatcattcaccaatgatgttaagccctttgatggttttcccctcatgaataatgtatacttcctggaggacaccacgcgatacctgatcatattcgaatcggtacaggcaattaattaattcgtctcgtttatcctcagttaattctactggcttaccgtcaacatatgcctctttgatgaggaacggaaggtgagcatttaacaggctgggtttgtcaaagactaaccgcacattgtcaaacgtaaaatcatagcaaggttcggagattttgaggtcatcaagatttagcccaatttctttaagcgtattggcataatcagcgttattgtgtgcatacatatggatcaacacaaattcaatttccgctgctgttagttcacgcggtttgatgtcatcaatgatgaatcgcatgatcgcaactgggtcatctttcagagtcttaatctttacaaaatgacgatacgacattttagggatctcaatggctgttccatccggaagatgaacggttttaacgtttgtcttcttgatttcaagccgtgtagtcataaatttatcaagagttttatttttcattattgcctcaaattgaacctgggtcattatttactatttagtaaataggatatattaggagggatttttatggctgaaaaaatcgtcaatcgaatactatcgattaaattatatgcgtcatacgaaaaatacgtagacaatgcatacactgaattgctacccgctcttgtctcgtttagtgaaaagacgatgattaacggtacatctgaaacgctgatgcagatatacgatgcacagttggtctatcaaaaactaaaccaaccaatcatacaggtatctttccagtataacggtacgcaagaacaacactattacggattgctttactctaacgtagataccgacgacaaaaaccgttctgtgctgcgtatgaacctctctccgctgcataaaacgttcagacgtaagtttgcccgttcatttagcaataacgccgtacagacgattacagagtgtatgacggcactgtatagcaaaatgaaactacttacccccgaagttgacggcggtaacatacgtatccctcctggatgtctaaatggtacatatcaggatatatttgattatatcagggacaacgggcaaagtgtagtttcttctgacttctgttatctgtgggaagatggttccggtattttccttaaaagttcaactgacattctggcccagataccgatcccagcatacaaatttaacgttgataatatattcattggtgacaatgtagtattcacagaagcccagtatattacccataaggataacacaacgctgtttaaagatgccagtttctttagtctgtcattgactgataaaaagatgtacggtgacatactggctgatacagacacagaaaatacatggatcttcacaaaccgtaatgcaatctatgataccaactttcagaacccagattcagaaggtaaaccgttccaggcgtctaaaatgcaattgttatccagctatgaacgccggatccgattcgatataaagcagggtcgtttagatgttaaggtaggggcaatcattgaggtatttggggaagagtatgcaggaaaatatctgatcgttgaatgtgttcgagacgtatcaaaagatttccacctgcaaacacttgaatgtatacaggtgggggaacctaccagcgccgctactacgaacacaactagcagtacttaatcctcaaacaatccgaggtggagatcgaaaacattgttattgacctttttacgggcctttatgatgttttcgtaatgttcgcgtggtaactcaaccaaaaaacactgtctgtcttctggagcattctcaacttgtgcttccagaagaggatagttcttaggatcatcatagtcaatgttgttatcgagatccaggataacacaacgccaaatttccggctctgctgatgttttaacagtttgaaccaatgacgcgtttttcaatcccagacgatgtgaaagaatttcatgggcgaattcagggtcatcataacggatctcttcaccattccaacgaataaggcgaacggttgcactcaatttaaatttgctcatatttcattttccttgtcatcaattcacgtaatttcttggttggcgctggagggtttttaatgatttcctggatctgatcccatgtttcgggggatacttgttccttttccatcacaactatatttggattatcgcaacacttaccaacaagaacagaacgcccacaattaaggcaaatcgtatcagggcattttccaagtttatcagggtcgatagattcaaggaatcttcttgctaccgataaccgctctttaacttcttcttcgctaactttcatttgtaattttccgctattcataataatacccttatgcgatttcgtagcacttcatgacttcttcgaataccaacggcatttctagatcccatgaatccgcaactgggtcatatgttgcttgatctaccagggaaaccggaattgcagaaacccaaccggaaccaccctgaacatcaacgcgcttgaccgtcatcaatgataaattgttatagaattcttcactgaatttttcgccaccgttaccaagactctctaacatttcgcggttaacgagtttgatgtttttaccttccaaatctttgttgatatcgatgaagttcatgtgatgttccttttgtctgtttcgtttcaatgaacacactatacaaaaaagccccctgcattgcaagaggcttctttaacaaaaagtgctattaaacggcttctgttttcacttctaaaccaagtttagcaagcgcttcaactgccatgaaatgattttcaaacggaacttcaacagaaattcgaattgttggcggtgttggatcagtcagatattttgtcatttgacgatctttctggtttttgcaaaggatatccgccagcgcttctaccgcgtcagaattgaaatcgtatgcataatcaagtcgggattgcacataacgcatgttgcgttgaacataatccggatattcttcaacgatcggggttgcaacagccgcttcgctcatgcattcaaagttaggttttcggaaaataccaacacacttatcatcggattcgttatatacgaaaataaatgcgttgctgttcatgatatgaacgcactgatacaccggatgtcggtaaatcactttcagtactttcttcacagaaggtttgataatgtgatttgtttcgaatcgggaaccttcggtcactgtcagcagagattttacttcgtcgatatgtttaccggacaggtttgccataagggttttgtgtttctgataactactagtcataatatattctcttagtgatttacgtttcgataggcccaatataacaaagcccccgaccggagtcaagggctttttattaaaatagatctgcaaagacaacatgaatatcgtcgggttcggtcttatcgcgtcttatcttcttgataataggaaggaagaaactgtattccggttcccctttcttacgcgttttcgacttctggaggccgtcaacttccatttctacaatggccccaatgtattcatctttatgcgccatgatgtattcgcgatccagttcaccacgttcatctaatggaatgtatacacgggtaataccatcatcatcgtaacgataatcggtatcagttaacccagatccggtattcgttcgagccattccggataaatcttccaccacaaacccgccgaccttatggtcttctttagtgtgctcgtagatatcaatgatccgtagttcaatcggggttttgtttttcagcttaacctgatcggctactcgcgaatctttccatttgaagtttctgtttttgagaatagaaccttctttaccgtcattgcggtaattgttatagtcctgcttcgcttctgcaatgttattaaccagcttagactgaatcaaacgaacagaaggcagagaaagatccaggaggatatcacgcaacaggctaaaccgctcatcataagtctgaacactttcagcttcgccgtaatacacctcatatggaataatatcccaaacaacataaacaatgtttcgctgttcttcctcggtgatcgtccctttcagagatttgtttacgatcccgttcccttcttcgcgttttgcttcggcctgttcttcttctggggtcgatactttgcgaacttcttccgcaaataacgcaatgtcgttatcatcatcgtccatgaaagcagataaagaaaaaggcatgtctgtttcaggttcaggtaatgttggtacggttccggaaggaacataaatcaattctccatccagaactacatcatatcccagataatcgcgaatctttttcagatcgatatcaagctgagttaacccttcgtactcgttacccgctctcgataccttacggtttaatgcttccagcaaatcagccatgcaacgcgcaccatcggctttaagctgcgagtaagcagggaaaatgatgcgacgtaaagccttttcactaaacggcgtagcgaggcattgaggctgttcaggaatgagtttcttccataccctgtttggtaaggttgtaccagcaccacattccagatcgcggttaatgatacggcgtagcacttcacgatcgttaatgttcactgatgatacaatatccagtaaacgatcacgcgctgcattgcctgtatacttccggcttgctaaatcttccagtaatgctttgattgcatcggaaagcggtgttgtgcctggtttcccttctaccagaggaaattgacgcacataaaacataatctgttttgtatacgtaatgcggaaaacttctttcaataattcattatcggcattacgttttaaaattgcttctttctctttggttttcagagtagacgcaagttcattaaggattgacaagatcatttagtttctcttcaatttcaaaccacgattttactaactggtgaggtgcatttgtttcttcacgttcaccacgtaacatatggaataacggcaactgactaatgacgttatgacattcgtttaagtttatcgcgagatcatcaacaaagcaaaccagacgattaccatactttgcttttgcttccaggtaacgatgagtttttgtttcaccgtggcccacgaccatcacctctttaaacgcagacgggaaaagagtattcaggttagcaattcggttaaggcttgccgttggtgttgttcccagagcggtaacggcaacgaaatcatactgcgttttcagacggttgatcacaatcaatgcatcatcatacgcattcagataacgaatgaaagaactgttattgtattcttccataaggattttagccaactgctgatcacatccgaagatttcagtcatatcacgaaatttttcatctgtaaccatttctaatgcaatatcagtaggcatgttgtgcttagacaaaaagaaaggcaaccccgactgccattttacggcgatcccgtcaatatcggtaagaataacaggtttcaagatataacctcataacgatcaaagaaaagggtacttttgaatgcgttcaattcacccaggaaataatcacgctcaaatgtccgataatattcaaattcgatgcacaacatatcatcatttgttacaccaatgccaacgacatcttgatgatatttctttgcctgttgaagcacgaacggatcgagatccgaacaatcgaaataaactacgtaactcatatcaacccttatacatataaacagcatctacccctgcatcaaaatcgactttatcaaagacaacgccgtttgatgcacattccttaacataggattcaataacaaccatgttatttgcgccgatggtaacataatacacacctgctttatagataacactctgaatcaacgttgaacgtaatgcatgttgcgcatacagtaacgctaatggattaatcgcgcctttgaacagaaacacgcattctactctttctttttcactcataacagatctcatttaaccaatggattataaaaatcaccaaaagtttctttcgctttttgatgatatgctttacttgcttcttctggagtatcgaaatatcctaaatgtatttgttttccatcaatacctatagttgctcgatacttttcagcacgagacgaccaacacacccctcgataaccacttttgttgtttttctgtcctttctttttaataacgttttgtctttgcgatgcctcttgtaaattatcaataccgtcgccatgttcaacaccatgaatgtggtctactacttgaggtaagtaacctttagcaaaatagaacacaatcctgtgtcgtctatacaacctataatcgaaacaaataacatgatatttttctttcttacatccagcaacatcaccaacatttatagattttctgggtcttttccaagtacatattccagtctctatatcaacatcgatataatgcaataatttcttgattccttcaatttctttttttaggttatcagcgcttttcataacaaatttctcaacctgttcaaatttctaataaattctcgttctgtcagaatagtttcgttcatacgagatttccccattgaatgtgtcaaggtactttttccggttgctgccagcgcacggcgaaacccttcattaaggaataacgcattatatgcgttttcaatcaggatttgatacgcctcagaggaacgatgaatagggatacctttccagtataaggtctggttagtccaccattttttctttttgcctttgaactttgcggccttgcctaccagagtacatacatgggcttgcatatctgggttgctgaatttaaggctttgtaaaaagccctccattgatgcacattctaccccgtcaaacgtaaacggatgcggagcgaagttgcttaacgcgcatgatgggtactgactacccgaaccaatgtccatagttaacccctattgaaaagattaaatcatacaaaccgcgtccgatgataacaccaacgataattgatatccatgttttccagttatccacgatcttcaccctctttcttcccttcctggcgagcgcgtttacgtcccgctcgtactaacgaatcatagtacggacgtttgcgatcgatgttttctgtgcgatacgctttaccaaaatgactcgttttgaatccgtagtatttcatgatgcggcccagtatcccaacataaaagatactatgacaagaatcacgttatttgtttcgatatcaatcacacttccacctcatgggggttattgtgcaaaccacgggccggatcataacgatcataagttgtttcgtactctgatttaatggatacatcacagcgagtgttccattgttccagagcgcttttaatttctttcactgagtcggtgaaaaattttacaatactcgccatacactaccaccttcataaaatgcatttagtttatgtaacatttcgacacgggctgattcttttgcggggctgcaagataatgttagaaccaacccaacaggacaatcaaacgcagtatcaatcgttactctttccagacgttgcccgtgatcacgaatcatcttcaaaaaggtatcagataactcagtattttcgtattccactttatatatgaatcgtgccatagttaaccccttgcacatgaaagataagaacgcttcttgaacactttaacttcgtggcccctaccgcttgcagcagtgttaagagtttcggcgtgacgcgcaccaagtaccagagttttaaccggagtaaccggagcagcgataacgataacagcggcccaacgagcaccaacagctttatcagtacccatatcgatagcagcagaagtatttttaccagccgccagaacgtaagcacgtgcttcacgacgagttttgaagaaaaccagttcattcatgttgtaagagcgtttcataatgtcatcctcataaaagtgttttcttgtctacgggattaactataagggaatgtgagaagggagtcaacaactttttacaccaaaaaagaaaaagccgctacctttcggcaacggcttgatttttaatatttttcgtcaggctgaaacaccgcacgacacgcccacatagaggcttctttcagtcggtctttcgctagttgaatttgatggatacgttcaagcacctcatctaattcttcctctatcagtgaatcaatatctgaatttgatagtcgctgttcgatatcttccaggattgcacctaatgcattttcagcatctttgatacggtttaccgtttctacttttttatcagtatggggtttataacccttgatatcatcaattgccattatagactctctgtaaaggttcgggcgataacgtcgcgttgctgttcaggggtcagtgagttaaaacgcactgcataaccagaaacacggatcgttaactgtgggtatttttcaggatgttcaaccgcatccaggagagtttcgcggcgcaacacgtttacgtttaaatgctgtccaccttccaccttaacagttggttgatattcgatctcaatctctcgcttttcaaacggagtaacgcgagctttaccgatcacagaatccatagttaatgtttttgatactacgatccgaacgtcgttaccttcttccagatagatcgtaccagtatgcaaaccttctaaaatttgaaatgctttcattgtattacctttacttgattacataatacctgaacgggttgaaatgaaacgccagcattgcacgatccaggttaactgggtcgctaacttcttgtttcagtttccatccagcataaacgcgcaaacagaattgcactttgtggatccgtagccacggtttgtaaacgtacaaaccccatgctgattcgttccacatgagcagatacccatgatttacagggttcggcccaccttctgtttttgggttgcctttccagttgaatttgcttgtcgcttcacgtcctaaaacgtgatatgcgaagttataagccttgtttctccacaaccagccaacacgttgcatgtacaccccaaaatcccccagatgatagcgtatggacgcccaacggcggatatgtccaccatcaccatcaatagggttatcgaaggtttccatccaccggaagcctttaggaagatgccctgttttctcgttgtagaatgatacaacaaacggggcaaacagaattgctaatactccagtaataatgtcaagagggacgagtacgatccaacttacatactttaaaaagcgcatagacaccccaaaaataaggctatccgaagatagccatttgattatttgtttgtgttgatgtatacaaatgattcatcaaattcactgctaaccgcttcatttgtaaacggaatttcaggatttttgaaaccaccactgataagatactggataaagaataccgaagtatcaagagaaatcaattggtgattgctcggagatatatttgttctacgaacgaggttgacaatctcccaatcaaagaatcgttcgctatactctttcttactattcacttgcggcgatgcaaagaacccttgtttggaatatgcctcaagcgctttatgaagttcagaatcaaaatcatcgaactcttttacaaaaagttccatcaactttttattgcgattcgttggattgctttctccgatgatttttctaattgtcggagacattttaaacagtttttgtaaatttttcatgttatctctttaaatttcgtatgcagagtcaatacaagattcgtaaagctgttctggcgaattctcaatgagaggcgttgttttaccaaaaatatccagatcgtaaggatcatcatccacataacattcattgaatttgaagttttttcggtagtccccatcgggcaatccatctttccattcattaaatgtcatgccataacgttctttgaattttgcgggagacatatcaacaaaaatctgtgtatattcgaccgcgttatggtatttcacagtttcacgaaatttcatataaacctcattaaaattagtgggctgggagtttctttacttcaccccgcattccggggaacctattaccggataccaacagagcctttcccgtggataaggttgcatattccgaaccatttaacggcattgcgctcgcacccaaatttggtggcaagggtaggatttgcacctacaaccaacagaatcagattctgttcctcccgcttctctaagtgccttgccttgtttggtggcccctcccgtgacttgaaccgggaacctaaccattatgagtgattagctctacctattgagctaaggggccgatatttttagaactgtttgcggtagatttcgcgaacagccggatcaacagctttggcgtatttgcatacatcctcgaactgtacgatgtattccattacttccgaagcacgggaattcagttttccctggtgagcatcaatgatcattgaagtcattacatcgatgcgggtcggtgcttcgaggatgtcgcctttgtcgaaaagttttttggattttgcgacggtatcggcgatgattgcttgaatttgtttagccatgttggatctcttattcgtaaattgcttgaatcgctttatagtgtgcggttacatatttaaccggatacttgcgagcttcttcttttgttgcctttcctgcaatcagttcaggatccggcacgtttgccatttgtgcatgaggaagcggtacgcgcttacccataagcagggttttatattcttccggtacatccggcccacatgataacactgtgccgtagatcggttcctcgccgtgttgacgaacaccagtcacaataccagaaggtgatacaatttcagttccagccgctttagcgttggtttcaatcaaaacatattcaaaggatgcttttacactcagttcagacatacatttactcatttgttatttgatccggaaatgtttattcatttcttcggggtcaagttgtactacttcggcaccgtattgctgtagacgccatatccactcgatgccaccacgatcgtatttatgtagatatactacacgcttaatcatacctgttgcaacacaaaattcgatatttttcgcacattgtgagcaaggggaatgagttgtatacaaagttgcgtctttgatttgttcatgagacgccgccagcataataacgcgcatttctgcgtgtacttcgttgcgatctgaccattgtgaatgttcagggcgcttttcttcactcagtttcccgttatcatctaataagtgattgcactgatctgtacaacgatgactaggatcaaccgtattatttgcgcctacaaacacacgcccgttaccatttctcaatgcagcaccaacattaacagagacacattgagagaacttagaagcacttattgctctaagcataaacataatatcatcaatcttcatgatacaccacgtgataaagaactttccagtaaagttgaatctttccatcatctaacactcgatgatgtgcagaaacagaactgattactactttttctggactcggtcgaaaacaacttgtgaattttcgaacaagacaagcaatgaaagtatttgggttgtcgatttcgtcaatgatagtattaacagttacttcaccgaaatgacaagggatatcatatgcttttaatgcttccaggagcaccatactcatagagccaggatgatcaagcatctttcatcacctttagtaactgtttgataaaatcaggagtcgcttcaacgatatattctgaaccgttgattgtagtaacgcgaacttctgtctgatctttgttgatatcgtattcggcgatcggacttgttactacatcaatatcagttcctttgatgtatccgaaaacaccgccataataacgaggatctgggtatacagattcatccgtgatcatcgctctatcaattacttttactttcataatacagccgcccatgtaacgtagccagtaataggatttaacaccagcccgaaagattgggtgctgttagtatccacgtcatgaatatacacaatataggagtactgagaaaccggagtggcgctaacttcaaacccgcccggagctttaccctgttcctgaattttgttagcaattttttggcacaacaaacgaactttttggttaaaatcgcccagattttctacgcgaatgcgatcgccaagttcaaccatgatgtgtttatcttcacgaataacgttcataatataatcctcttttgtgtgggtactttaacatacccacattatatgtcaatcagaaatcaccataatcgacttgtaagcacggaatcccgtttgctcgccacattccgaccggagtgtctctatcgtccactgcaataacaggataatacttatctaaaatcttgtcaaacaaaatttcttcttttacttcaaaatctgtcctggtatcaccttcttgacgcataaaaatttcatccggttcaacgccataactcaacaggctaacccatgtatcatgtgcgcattgcggattaccttcacgcccagacacaacaacacatttataccctgcatttttgtacaggtgaaacagttgctggatcgggatatttggcggatcattgatcactttggtaaagtcatacgggctacgttgtcccactttggttagagtaccatcgacatcaaagatcacacacttctgattgtggggatcaacaatttccattgctggtacgaacccacggatcttacgatactggttaaacatttcccaaagacgcgaaacgggtaatgcatcacgaccgcgtttgtggttacggcgaagcagttcaacaatagacacatcaaaatattcaatatgaaaatcagctttgtgttccaacgcaatttcacgccagtgatttttatcactttctttcagatgtgtgttgtgtatgatcacgtttttaccatctttcagagtggagataacaacgtgatcctgcatttctgcaatcatgtcttctttcgctttggtgtatttgtatccgccagcacctttacccgcattatacaaagagctacgcagatcatcgcgagagatcgtaacagtattacccaattcacgggctttctcatgcgcccaggtagtttttccactacccggaacgccaatagtcataaacagattcatttcactatctcatattcaattagttctttgttatactcattcgtcagattgagccatatatcacgattccaatcgttttctatccatagaccttctttatcctttttcgcagtataaacttttccttctgttatgtcacgaaaaaacgttttggttattttgatttgcatttctcaggatatcccaacgtacacagaacattatcggtttgatccttttgtcgtttaacgtcattcatccagctacgtaaaatcaatgaatctggatatgtcaatgcaacataaggattaccgtcatatggcattacaaggtattgtttcccgtcgatttctctaacgtctgcaattactttccattttaccttcactgagttaacctttgcgggtagcgtaggaagtaccttaacaggtggctgttcagcacaaccaacgagaaaaacaccaagtaatactatcattgctaatttcatttttcaaattcctgcatgtattcgtcgaaggatttgttgattttgatttcaatcaatccaggtttctcaaacaaaaggtgtttgcgccctgcatccttgactaactgctgatctttggatttttgttccacgtagataacagtattgcttgtatttgtctcttttactttcttcacatcatcttgcaaagatttgatatccttgcgtaacgatgcgttttcgattttggtatcgactgcaatgtaaaaaagggctatcaaagataaccccacgattacagaccatacccaagatgatatcttaggcattatgaacctcatttatattgttcaggaatgaactggtcgtaatttttaaccatcatatcaatgatgcgatcaaccagtttttgtggatcggtttcttcgaaatacttcataagaggcccgaagatgatccgaccgtcgtttgacaaatccgcgcttagactgatagcaaaatctttacgcgatttccctttgttatcttcaatggctttgaatgcttttgcactcaaacgattgagactatcaaggaaaagtttttcgaaatcgtcaatctttttcagagagaccagatccgaactgaatagctgtttcaggtcatcgaccgtattctcaacaatatttaggaaaagatccttattgttggtaatgctatcttttgtgcgatgcagattgacataccagtttgttttgatttttacaaaccctttcgttgtcagaacaacatagccttcgaatccttcattctgatatgcttcttttgcgaatgcatccagatccagtacttcgatattctcgcgcttaaccagatacgcacgtaacagcgcgtcagcaaacagatcatcataagggatgtattcacccgtgatgttatgacgaacgttcaggatacgcagatccggagaatcataaccaacaacgatacggtttttcggggaaacgtattccatattcaccgtatagttttcttttgcgatctcagttaagcgggtcagcaattcacggtttgccattaacacactttgtgcatccatagcttgttctgatttaaccgaacctttagacttgaccgccagaaatccaccgtcaaggaaagttgagatcaaggaaccatcttctttaatcatcacgtctaaaacttcgcctaattcaataggagactcgttaagcgcttcccatgcctttacctcggcatagttaaaaaacttctccatagggcggctgatgattgatacgggggtatctccatccatttcaaacatgataccgcgacattccagagcaccaggctttagccagtctgtatatgaggccatgcgatagttaaagattcgaacaggtgtacccatcacggttacttgatcaacgaagaaaaatgtttcggattcaccacacaactgcatgagttgtttgtaaagggtattgataattttagtttgtgcctttgtcatagtgctgtttattccattcagggttgtattttcgtatcatgttgatttcataatcatgatatgtattttcatcgtgagtagtcacgataagtttcacagtttttcgttttttgatagccatttccaatcgacacgtttttaagatgttgctggggttggcttctctccaatactttgcattgcgatatgtgtctaaacgcttccacatatccctacacttaccaacatatactatttcatcgttaattgcaataaaataaacacaatgcctaagttcaccacacttaacaaaacttcgatcgatgcgaccacatttatcaagggttaagttgaattcagatttcatcattcatttctcactatacccagacgatacagcttatgactcactgaatcagtagatcgattcattttaattcctattgctgggttgttgtaaccttctgaatgtaaacgaattaattcttctatctctttcttattccagtattttcgtttacttcccttcatagtgttatcggattcatttgcattaagatctgaatgcttacataaactaacataagcgtcaatagctttttgttttttaaatcgtaagtaaggaataattctaggtaaaagaatcaaaagatctgttgttttttgaacaattaagttacacatcaatgtattacctaacccagttctgctggttctttcatacaaccttgcattaactccatcattaatcaaatctgactgaatactaaccatatcatcccatagttgaatatgttgagtcagtccaacaagatacccatttttacctttttcactaatccatccatcacaatcaacacaacctgccaagtatgcgtatagattgtgatggactcccgtataaacgggaatctcatcaatcatcataactccttacgcgtatttgctggcccattttgcatacgcttcatcactgatttcagtattcaggtttccgacgaggtaagaacttacttcaacctcttgcggggcaacctgtacgttatcacttttgagccatttattcatccacggatacgggttagggatcggggtgaatggtgaatcaagccctaccgctcgcatacgctgatctgtaaggtgttcaatataagcgatagtgcttttcagcgatacaccttctacatcaccaacagagaataaatgttcagcccattctttttcctgttcatatacttccaggaagatagcagttgcttcttttttcagcctacgggagatttcaaccatttctggatcatctttacccatttgccacaaacggattttactctgagtacctttctgatgcaatgcttcatcacgcgcaatcaggcgcataattttcgcgttgccttccatcttgccttgttcagcaaagttaaaggtgaaactaaacgacacatagaaacggatcgcttccagagcgttcacagcgtgcatacaaaggtacagtgcttctttgcacttagtggcctgtttagtgtattgctcgttataatacacgacagccggatcatttggtttatagccgctaacctgttcctgtagcatcatgatggttttcagcttatgacattcatcaatcagagtatcataataccgtgtcattgatgcggaacgtttcataatcgcttcattgcgaaggatttggtcgaactgtacagaaggatcaatgtgcaagttacgttgaatatgcgtgtaactacggctgtggatggtttcactaaacgcccacgtttcgatccaggtttccatgctcacatcggatgcaattggcaaaaatgcgaggttaggcccacgtccctgaatggtatctaacagggtttgatactgtaggttagaatcgaaaatgattttttcatgttcaggaagttttgcatactgcatacggtcagtagacagatcgacttcttccggacgccagaagaaagaaagctgtttttgcgtcaggctttcgaaaactttgtgtttctgcgattcataacgtgcaacaccagtatcttcaccaaaaaacataggttgttctaagtggttatgatctgggtttgtattcattactgttaacatgtctttacctttaaaaagcccccgaaggggcattaatcaaatcttacaacccgcgcaatcttcggcggcttcttcttcatcaccagcaccatcacgcgtattatgatagtacagggttttaacaccgtagtagttagcatacagcagatcatcaatgatgtcttctgttttaactttcccgtcttcatagtttgccgggtcatagttggtgtttgcagaaatagactgatctacaaacttctgcataactgctacgtgagacagataccctttgttaccgcgtttagccatatcccagagcagatcatagaaatcaatctggttattctggttcggcacaacctggttatagtgtccttctttcgaagatttgatactcactaaaccgcgcggaggttcgatcccgttggtagagttactaacctgtgaactactttcacaaggcattaaagcagaaagagtagagttgcgcaagccgtatttcttaatctggctacgtaaccattcccaatcgcaattataaacaggtgctaccagttcatcaacggttttgcaataccaatcgataggcagtaacccgcgagcgtatttggtatcgttgtacaatccacatgcaccacgttctttcgccagttccatagaagcaacgagaaggttaaactgaaacgcttccattagctcatgaactttgtctgtatacgcttctgagtagtcgcaatagttgcttgctaaccatgatgcatagttggtgataccaacacccagagagcggcgctgtttagctttcagagcggcttttacagggtagttctggtaatccagcaggttatcaagcgcacgtactgcaatacgtgtgagtttcgggaattcgctgatatcagcgttatccagaacgatagccattagcgtacacaatccgatttcaccagccattttatcatcgtcatccagcggcgacgttgggatcgcaatctcacaacacaggttagacatacggacaggaaccgtaaaactaccctgttggttgacgtgatgagtgttgaaaatgtatttgcgtcctgtctgtgcgcgttcctgtgctaaaagttggaacaggtcaaccgctttgatgcgttttttacgaacagttggatctttttccaggctttcatacagttcttcaaatgcagtctgatcagcttcatagaacagatcatacaggcgatcgttagcaacatccggactaaacagcgtaatgtaatcacgattcattaagcgtttatacatcaactggttaagctgtacaccataatcaagatgacgaacgcggttttcttctacgcctttgttgttcttcaacaccagaaggttttcaacttccagatgccagaaaggataatacagtgttgcagcaccaccacgaacgccaccctgtgaacaggatttaacagcggtttggatatgtttccagaaaggaatcacaccagtatgaacagcttcaccaccacggattttagaacccattgcgcgaatatgtcccgcgttaaccccaataccagcacgttgtgaaatatacttcacgatcgcagaggttacagcgttaagagaaccaagagaatcacccgattcaattactacacaactggagaactggcgcgtaggagtacgtacacccgccataattggagttggtagagacagtttgcgatcggaaatcgcgttataaaaatcaatgatatgcgtaacctgtgctaacccagtttcttcctgatgcagacacattgcaataagcataaacgcatactgaggggtttcaaagatttcgccagtatcgcgatcctgaaccagatatttcccgattaactgttgggaaccagcatacgaaaattcaaaatctttatcatgatcaattgcacgttcgaaaacttgaatatcttgtttgctgtatttttccaggatctctttatcgtatttacccgcttcaaccattttaacgatgtgatcgtagaacgggataggatcgaactgaccgtaaacgtctttacgcaatgcaaacatttcaagattcgatgctacgtattgccaatctggttctttaacagaaatatgatctgctgcatacttgatagcgatacgttgaatttgtttggtagtcataccatcgcggatcagttctaatacattttcaaggaatgcacgaacatcgatattatgaccatcacaggcccacttgagcactttgtatattttttctttgtcaaacggctggcgtacaccagaggattttactactactttaatgtcattcattctcttaccttgttaagaaaggggccgaagccccatttttcatactgccatttcagcttttagagagccgtgattatgatacccttctaaggttatcgagtcaaagaattcttgatctaaatcaagtaagctatttaccttcggcatttttagaatcggtaatggcattggtgaacggttaggctgtaaaagttcttttgcctgttcaaccgcatttttatagatatggacatcaccaccagtccaaaccagatcgcccacttcgtacccgcaaatatcagcgataatatgcgtcaggagagcataggaggcgatattgaacggcaaccctaagaagacatcaactgaacgctgataccactgtagagacagtttaccgttgattacaacgaactgaaagaaacagtgacacggacgcaatgccatatcatcaagatcaacagggttccatgccgaaacgatgatcccgcgatcgtctggggttgatttcagttgttcaatgacttttgcgatctggtcaacaccactaccgccataataactatcatcatccccataaagagaaccaaacgaacgccattgatgaccgtagattggccccagataaccagaatcgtatcctaaatcaatagcttgtttttcatagttatcatcccagattgtgcgcttatcgctattttcaccccaggtcatccggcgaagttcttcaacgttggttgaaccggacaggaaccattgcaattcatgcttgcacggtttgaagaatagttttttacaggtagttgcggggaaacctctgtttagatcccatcgggcttgtgcgccgaaaatacgaatagtacctacaccagtgcgatcagttgattcaacaccgttatcaagtacaagtttaataatatccagatattgtttcattttatacctttttatatcgttcaactacgattttttcaatgcgttcatgttcttttatgtactgagtttttaaatcagaaaattcatattttaataatgcgccacccagttcagaaagagtaaatgcaacatcacgtttaaacgctggtgcgttatacacatgatgtccgtaaatgtttgtcaaaattacttcatcaaccattttattattgattgaatctaaaagcaaccccttaccaccgatgacacatacatttttatctgggtgtgttgcttgcattgtaccaatagcagcagacaacccgccaccgtggatcacgtaatcagcaacgtcgccttttttggttttcaaaaaactacctgaaccagacagaacacaatggatcctaccaggaagtttacccggaagagaggtaaacgtatttgcacccatgatcaaaacgctatctgcggtttcttctttgaagttctgcaaatcttctttacagtggccccacggcaacccttgctgatatccaaaagcgaaatcatcgtgatagatatcaattcccaatgcaaacaccgcttttactatgctcatattgcgatccacattttgttgtcttcaacagttacaatatagcctaatgcttcaatcataactttcagtttttctttgtacttctcatcatatccgcgaatcttctcgaattcaacagagaaaatactacacccctgatattttgcattgatcacgcgagattcaatatcaaaaatcatgatatccagaggacaccaatcaacagagtgaagtttttcgcgggttagtagtgttgtgttcttagggagtttcattccgtttcctgttcattcagccatgattcgatacgagatagttcttcatctcgcggggtaaatccatatgatgcgtcgatcatcccaatctgatcccaaacatcaatttccaggatctcagtcactggaggattttgtgagatatggtcacgacatacagcaagagcggtattgatggattcggtgacagtcagagtgtcaccctgtacagatacttgaataatcattcagaactccatgcatttttcaaagtaaatctttgttgggaattaataatcgtagcgcgaataacagcaagtttcatttcttcaaatttatttcgcgtcatatacaaaccaatcaaaggaaaatagagcctttcccattcgtaagtgtcgcttacttctttaacagcattgattaaaatctcagccatttgaaaatcggtaggaggaacccaaccaagattaatataaatccgtttttgtgtaccttctttcagattttccaaacgtaaccatgttggacaactcataatattttcctcaaataaaaagggaactgcgttaacagttcccattatagttcatttgattaataagtcaagcgccacaattgaattgctgcatcaacttccttcttgatatcttccggagtgtctttgcgctgtgctttgactaacatagtcatcattttacgaatagtgttgttcatattcgctttctcacgtgctgcatgaacagcctgtgatttttccacttccggtgtatctttcttagccgcctgtggtttggtaggctgtgcgccgatttcgtctttctgtttcggtgctttttgctctgcttccttcttcacatgaggtgcggagaatttacccgccttgaagttagaattcatttgatctaaagcgctcttaacagtgttccagtcagagatcccacgtaaagatttcagagtatcagtgagtaggctaatgcttgcgcctttggtatcttctgcgatatcgattcctttcaaccactcaatgtgtttctgaccagagtacatgaaatcaaagctactgaatgagtagtatgctttacggtttacaacaatacgcttgaagttgatagtaacaccagcgccgttatcaaattcaacataaccgctggtaggcattacacgagcaccaatatctttgagtgctgcgaagtattcctctttaccaatacggttaactgtgcgcttcggcttctcttctggttttggtgcggcttcctgagcagctacacgtttaacaaaagatgctgaacgatgtcccgctgcaaactctgcgttcatcttatcgatcgcgttcacaacgccttgaacactcggtttcagtttctgcaactctttgaacgtatcaacgatcatatccaggcaagcgccgtcctcatcttcgaacatagttccgcgaagttgtgcagccggacgatacttagatacagcaggatcatacaccgcgctaaacacatacgcacctttacgcatgaatacgtgacgatagaaacgaactttcagtgtaccaacttcaacaaagatatcgtttccgctaacgtcagcgcctaacagcttacggaatgacgccaggtagtcagcacgtttgtatttgatatttttctgtacagggctgaaaatgctttccagttttttagacgggaacaggctttccggagtgatcttgtctgggtttttgccccattgataatcacggcttgccattttatgttttttagttccaaccagtacaaaggtactaacagaaacgttacccagtgcagatgaatccggagcggctaacccttgtccattcggaggggtgcagttgaaaccgaaatcaaagtaagcatcaccagaagtgaaacggaacgaagcataaacaccgtgactaccttttgttacttcctgtttgaaagtggtaggcaatccagtgtatttggtgaagtattccgcaaattcctgtgcgttaaatttggtgctgaaatagtttttcgccactacaaagtaagcatcaactttttcttcccattctttcttttgacgtgcataacgtgcgcgaacatcaccagcagtctcagaacgtgcgccactaggcccagtttttgtaactacgtcgtaagcctggttaattttctgcattaattcattgctaccaccacggtcggggtgattgcgtaaggatgcacgtttgaagagtctggacatttcagcgctggtttcgctaccagttgcgcccaaaactttcagtgcttcctgataagtcattttggattcagtgatcatttattgttcctcaaataaaaacaaagcccacgtttcgttacatgggctactttactgtatttatggatttcggtcaatagattttttcgaggaaccaaacagaacttttgttgttcttgattcgcgtcaactctatagggttatctttgaatgcttcctcaacatctttcatagtaactatatgtttttcttcaagaaaattgttgtggagataaaaccgctctatttccggagcggtttctaattcaaattctctttctaacattatgcacctcgatcattgatagtacactttgtgaaccgtccaactttctgcatggtgatatgtcgatcgaagtcttgcggatccagatcctgatgactgataacaattacgttaccatttatcccatccaatagtgcttttacagcaaaactaccatcacgatcaattgcaccatcgtacacctcatccagaatcagaagggataaatcaacaccagaaattttactggttacatcacgccacgtcataagcaacgcaaggttgatacgtgctctttcgccttgactgaacgatgcgtaactaaaatcattacgacccagcgatttaatcgattcgttaaattcgtcatccagagtgaactgataatcagcacccaacagatccagatagtgcgcaatctgtttattgaagtaaggaatataacgtttaacgatgctcgctttaacgccggaatctttcagcagatccgtaacaatacctctgaaatatttttccttgacaaatccagaacgtttagaatcaagatccttttcatcttcacggagtttttcaactggggattcgtcgatcaccacgtcttcctgtgctttatccatgacagcccgaacacgtttagccgctgcaacctcattttgaagtgtaccgcgtagtgattcgtatttggatttcagcccatttagtgtacgttgttgtgttagtaaatcatccatgattttctgtagctgatcttgcttgttcttaatcagagtaagtttctgagtaccatttttaatgttctcggcaatttcttccatgcgttcaggagtggggctaattggctgtttacaggccggacattcaccacccttgcgatacataacctcaagacgttgcaactgttctacgttcattgagagccgcgtataaccatcacgcaatttttgaatatttgctgtttggtcttcgccattgatcacacattctgcgatctgggtttgaagttcaactaattgcgctttaatctgttttgctgtttctacgtgggaatcgtagatatcctggtaacgcgccgtattctgatttgcttttgcccgttgttcgtcaatgaacttttgatgtgttgcgatctgctgttgtacgtgtccaatctgcattgaaagcgtatccagttcacggttaacaccacggatgtatgatttgttcagtttgtccatttcactgatgatagacaaagacaacaaatcttcaaccagtttacggcgatctggtgtttttagttccatgaaaggtacataaccagcagtacccagaacgataacctgtttaaagcccaccaggttaatattcaacattgattcaagctgtgactgataatcaccagcggctgaatcttccggcagtttttcgccattcttccagatctcaaatactttcggcttttgtccacggatgattttatattcatcattgccgtattcgatcaacagttcaaccagacattttttcttgttgatactgttcaccagttgtccgactttcagatcgcgaaatgacttaccaaagagagcatatgtaagcgcttcgatcatggtggatttaccaccgccgtttttacccgtaatgagggttttctttgctgaatcaaaatcaatgacgatcggtacgttaccaaccgacaagatattttgataagtcaatgttttaaatttgagtttcatcaattatcctttgggatatatcactaatcatgtttgtaatcgtgctatcaaagcagtatatcacggaatcttcatccatgctattcaggacagtaaatgtccaaacctttgtttcgtgatagttgtctttaatcagagtgaaccccaatgacacatactcgttataggaatcctgctgtactgcaacaatcacatcaaatccaaacattttataaagggctttatatcgcccttcttcgtttaaaatattaacgtaatcaactatttccattgctcgtaacctctgcatacaatgcactcattattgcagatacttcggtcttttcttctggagtgatctgcatgttgttgatgtactcactaatcaatccagatacacttttgatttcaaaatcagtatcaacttctgaatcagtgatcacacgatcgacaatgttcaactcataaactgtttcttccagttttgtttgaaacttaggcaaatcgttatcaacttcgcgaacaatcaaacgaacagagcaatttttgtaatcggcaacatcaacatctttttgatccggataggtgatccggcgatggtggcatactgggttagcaatgaaagttaattcacgtttaccgtcgccataagatagctcatagaagcccctggtttcgtcctcatcgttcgcgctcatggtaagaggtgtaccgatatagaaaacgttagcgccttcgttagcgtgatgatagtggcctgaatacacgatatcatatttctttaagaaatccggttcaagcccatgatccgctttactgttcttatagaaatagtatccggacagttcaaagtgtcctaagcagtattgagattttgactttttgatgaaatcaaaaatctgctgtgtattttcttgacaaatccacgggatcaaatcgattgattgcagcggagaagtatcaagatttactgtcatcggttcatcaacaacagtaaagcaatcatactgatcaagaatctctcgcggtgagttagggcggatcttgtctttaaactggcaatcgtggttcccaaccagaacatagatatgtaatccggcttcttccagtagtggcacaatacgttcacgaatgaatttcatcgtggtttgtgtggtggccttgcgcacatcaaagaaatcaccagcatggaaagcctcggtaatgccatttgctttgcagtgttctacgatttgcacgaatacattgtataggttttcttcattccaggggttgtcctgacgcaagccagcgtgagtatccccgatcattaagtactttctcataagaccctcatagccccgaaaggggctacttgtttgttagtgcttctgttgtgaagctacgatatttcgaattgatgccagtgaagtgttccacatcgtatcaatgaaatcctctgtatacggctgtttgagcatatcacgaagtttcttaaccgcatacacatactgaaccttattacccctgaatagggcttcctctgcgtgtctacggaggcgtttgatctcagtccggttcttcttaatgaatttttgtgctcgcttcaatgcgtcggcttctacacgtgcctggatcttttgtcgaatttcctcttccggatccacttcttccacactggttagtacttctttctcttcatcaatcataagtgatctccatgatcatagtttcggcgtttatcatataagacaaaaccccttcttctacttcgaaatcggggtttcttacgtcagttggatcgatgataaccgggattcccacgttttgcaactctaattttacgaagtagggtagcaagtcaatttcgtaatcgatatcagttaatattttgtttaagtcaattattgctttcatagaaaatcttccaatgttgggaatacttccgcttccttgtctttggttttggtggcggaagcctcgtactgagatagtttgtcatgtagatcttgaatgaaaccttcgtctgcaatactaaccatatctgaatcttcgcagtcgtaaacgtgctcaaggaagaatttatatttcttcgcgttctcttttttctcgtacagaatacgtgttacgaatgcttgccaacatgctttgttaatgtaaccgtaaacgttggtataacgagtttcatcgaagttatgtagtcctgagattgcagcggaaattccgtcatcaatcatatccattttccaatcttcggaataacggttgaagttgtaacgacgtgatagcccgtttgcaatatccataatagcagcacctaactcattaggcattttgcgatcacctgtttcggcgatttgctttttccatgcacagaggatagggtataatttttcattgtctgcgtagatattggttgtttctttagtcatagtattcatatttcctctttgaagttaagaatattatataataactgtagacaaaatcaaatttcattctatattatttaaggttaaagtagatctaatgatctatagatcagatctaaattatataaaatttattgattttattacttgacctacaatgatcattgtagtaaaataattattaattaataaattatagatcataattttgatcagatcaagtattattgatcaaaatttttatggtcttttgtattgacttcatttcgtaagttactacaataaccccgttctttgaaaaattgaggtatgtatgagcagttttgcaagcatgtttaacttgaacaagctgatgcaagatgaaggggaacccgatgatactatggtcatcgatatctctaacatttccatcgctacactgatgaacaacttcaaaccaaaggaacaagcatccatcacgatcgaaatgattcgtcatctggtgcttgacactttacggtttaacgttgtaaaatttaaaggtgagtatccagaaatcgtgattgccttcgatgacagaaattactggcgtaggcaaaaagcctggtactacaaaaaacgtcgtcagatcgaacatgaagaatcagaatgggattgggatcgtctgaacaacttcctgaacccagtgttcgaagaaatccgtcagaatatgccttatcttggattaaaggttgaattcgcggaagctgatgatataattgctgttgttacgaaaaaagctgttggtgaaggcagacgagtattagtggtttccgctgatagcgactttacacaactacagaaatataacggtgttcgtcaatggtcgcctccccagaaaaaatgggtaacgcctaagcacggttcaccacgtaacgatctgcgatacaaaaatatcaaaggcgataaaaaagatagtatcgcttgcattaaaattagaaatgattatattgtgacgaaggttgaaggcgaacgcgccccagcggtaaaatcctctgagttagaggcatggctggaggcagacgacccgacaacgttgatgacccctgaatgggccgcacgttacaaagaaaacgaggaactacgcgatttcgaatttataccaaaagatattgaaaattcgattattgaagcgtataatactccaaaatccggaagtaaagcaaaaatggaacgttacttcatggataacaaactttcccgtatgttcgaaaaactgagtgatttttgaggtaacaaaatgagtgtagaatttttacaaacaaaccctgatgtagcaaaacaggtaaaagaactgatcaaagaagcatccaacgtgaaaactcaagttgagatcttcaacggtacgttcaaggatatcaaatccaaagcaaaaactgatttcggtatcgacggaaaaaccttcgggaagctgttcaaactgtatcacgaacaggcccgtaccgctttcgaagaagaaaacaacgaactgatcgaactgtatgatatgatcgataaggcgtaaagcatgatcggaaataaaaccgaagtcggtttgtatatcgaaaatctggttgcctctgagggggcaacctacatggaagcaacgctacaatggatggatgaaaattccattgattatgcgatgctgaataaaacggttcctcgcgcgatccttgataagattagcgacgaagcgatcaaaggaaacatgcttcgcccatcggttgcgcttgaacatagttcatcaaccactctggacggcttcatgtgagatttaaagctccgtttgctgatagtgaggcgaattcacggcttgtgcctttgtctgtatacaagttatatctggcgatgaaaactcatttccaggggcgttttgatgtccttcaatacaactggcagatcaaagttagtgaaaacgcctttaacaagcgaaaggatagatatttctttgtaaaattagctcaacgctttacattcaaagaaatctattttatattcctctccaacttcgtagccaatccggatttctgggtaggcgatgttgatgaagatagtattgtcttttacaggcagtacataggaaagttacaaagactagataacgtgtttgtggatgacgttaaaaacgtgtacgaattcgccaaaatgaaagagatccccgtgtctctggtgttcaagtacagcgaaaaatcatcaacgtcctacataagcaaacttgtcctgtcaaatgtgatatcttacgaatcgtttttgatttttgactcatttttaggtatcataaataaacacgatcaagtagctgatgatattatttggtctgactttagcattaagttaaaggcatacagaaaaatatttgaccttactgaaaaagatatcataaaatatcgaaacttaatgaaacaaacgttaatcaaactaaactaaacgagaaaacagaatatgagcagcatttttaaacgtcaagatcccgctaaactccaggcacaggtagcaaatctgaaaggtggttccggcttccagaaagatgagaaagaatggaaactgaccctggacgcacagaaaaacggttccgccgttattcgattcctcccagcacgttccgatgatgaactggcgttcgtccgtatcgtgagccactctttcaagaaaaacaaccagtggtacattgagaactgttcctctacccacggcgattatgacggctgtcctgcatgtaagtacatttccgaaaacgatctgtatgagaaggctaaagccaacaaaaacgggccagaagataagctactgagccagatcggtcgtaaacaaagtttctgggctaacgtcctgatcgttaaagacccaggcgctccagaaaacgaaggtaaggtgttcaaataccgcttcggtaagaaaatcatggacaagatcaccgccgcaattaacggtaatccagaacttgatgaaccgggtattgctgtaacctgtccgtttgatggtgctaacttcaccctgaaagcgaaaaaagttggtgattggcctaactatgacgatagttcgtttggtgttccggctaagatcaaaaacatcgacgatgaagaagttcagaaagcaattttcgaaggtatgagcgatctccgcccgatcaccgccgaaagcgaattcaaaccgctggctgacctgactactcgcttcaataaagttatgggtagttcgatcggttctgctggttccagcgcttccgctgaccttgatagcgaactgagcaacttcgataacgaaatggctaagtttgacaatcagacatctgatgtgaaatcatctggtggtgtatcatcggttccggtaggcgaagatgacggcgtaccgttcgacctggatgattctgatagctccggtgatgacgacctggataaactgttagacatgtaatacaagcgggggcttcggcccccactcaaagaattataagttagagaagaaatatatgaatgaaagtaatgtttttgttgactacatgaaccgcgtccgtaaatcctgggttgctaaactctcggacgaaacaaaagaactgtttaaagctatgcctcaagaggaacgttttaaacactatcgtgacattgatgaaaaagtggttgcggaacatcgtaaacttaccagcgaacgccgcgaagatcctaagcgcacaaccgttaaagaaatggctgatatgcttgacacagcagcggaaaccgttgtaaaatcacttattaagtaacacttattgaaaactaaaggctgaatatgaaattctctaaacaaactattgatatcctgaaaaacttttctcaaatcaactcttctatcatgctgaccaaaggttcattcatcatgacgaaatcaatcaacagcgttgtatacgcagaagctgaaattgctgatgtgattgatgaagatgttggtatctacgatctcaactcattcctgaacatgctgaacatcgtcggcactgacgcggaaatcactcatgatatttccactggtgaaatcgtgattcgcggcgacaagatgaagatcatcgaacgttcagcagacgcaacaacgatcccgaaaccgaaaaaacgtctggtgatgccagtagcagatctgattttccagattaccgctaacgatttcgaaaaactgatcaaagcgtctcgcatgatgaaactgaccgacctgtccgttgaaccgattgatggtaaactggtcatcaccgcgaaaagcaaagaaagtcaatcaactttctccgttgaagtaggtgagtatgaaggcgacaatgttttcaatttcgatatgaagattgataacatgcagttcatcaacagcgattacaaagtagagatttcctccaaaggggccgcaaaattctcttctgataacggcgttgcttacgtcgtcgtacttgaagcaagtagcacattcaagtaagatagttttaaggggctacggcccctttcttttacaccatttattttgaaggtatattatggaacttagtgaaaatattgaaatcatcgaaaccaaatacggtaaaatctcccgatctcctgatgaatttgcatgggatcagcgctatcgcccaacaacgattgaagagtgtattttaccttctggtgacaaagccgctatgcggggcataatcaaatctgggcgtgttgagaacatgacccttgtatctgattcccctggcactggtaaaacgaccctcgcgcttgtgttggcccgtgaggttgatgctgaggtgttctttgtcaacggttcgaactgtggtgtaaacttcattcgtaatgaactggatcgttttgcttcatcaatgacgcagaaaccaggcggaaagattatcatcattgatgaattcgatcgttctggtatggcggaagcacagaaacacttgcgtagctttatcgaagcatacagtaaaaacgtttctgttattgtaacagcgaacaacattaacggtgtgcatagtgctctgctttctcgttgtcctcctgttaaattcggtgttccgtctgatgctgaacgtatcgaactgatgaaacagttaatcaagcgttgtttcggtatccttgaaatcgagaatatcaagtatgatcctaaagtcattgcagcgtttgttaaagagcattatccggatgcgcgttctattatcaaagcgatcgggttctactcgaaacgtggtgaaattgatgcggggatcctaaatgagatcgttggttctgatgtgtctcatatcattaccctgttgaaagaaaagaactataaagggttgcgctctgaggttattaaatatgcgtcagaatacgatacctttatcggaaaattgactgatacgatttatcctatcgtgaatcaggattctaaaatcgcactgatccagattgtaggcgaaaacaacgcgcaatacgggctggcgatgaataaagaaattcatctgcaatatctgttgatgaacctgatgctttctatggtctgggaggcataatcatgagcctggcggaatttctggatgaagaagagttatccccgcatgaatccgcttggctttctaaagattgggataaggttgaagaactggtcaaagagtacggcaaggataaagaaaacaccttgtttaacatcatagacgaaatcaacaacggtaaaacgccgctggttatcgatgaagtgtatgataagtactttgtagacaacgcaatgagccagcacatagacacgatatacaacgcgtatgtgatgaatctggtaggcggtagtatctctgaccaaatgcactataactattatctcaactctgttaggaaggctaaacgcttcggtgcatgggctaaactatcggaagattttgaagagaaaattattatcgaaattcttcgcgaaaaatacagtgtaaatacacgtacagcgatggaatatttgcaggaacttaaagacctcggaatgttcgaggattggaaaagaaaacacgcaaaggtcgctctgtctttgttgggtattgtgaaaaacaaagctgaacaaaagaaattggaaaaattgattaaacaatggtgatgtatgttagaaattcaactaatcagcgacgattcttttttaaagatccgtgaaacgctaacccgtattggtattgcgaacaacaaaaagaaaatgctctggcaatcgtgccacattctgaaaaagcaaggtaagtattttatcgtgcattttaaagaactgttgaaacttgatggtcgtcaagtcgatatgacggaagaagacgaactacgccggaacaacattgcgcgacttctcgaagagtggggcatggttaagatcgtaaccactgggttgaagtttgcagaagaaaacaacttccgcgtactgactcactcgcaaaaagcagattggatcctcaagtacaagtaccggatcggtcactaatcaaaaagcccttgcattcgtgcaggggctttgttatatttggtgtacaccattgagagggatatattatgactattaacgaaatcatggattcaatcaaatccaacgaaactttgatcatcccgattgtaaaagatgacatcttgttatcgttaacttgcaatctgtcagatacccgcacttacagctatgcacaacactactttcctggattttacgatcgtaacatttcagagtacacattgttatgcaatcaagttgaaaccactcatttctatgagcgtattaaaaaatctctgggcttgatccaacaagcaaaagaagtctttatgaaaagaatggaggacgcgcaatgatccgcacttacatgaataagattttcgcggcccgtatggataacgttattgaccaacgtgcttatgatgatttggtttcccttgcaacctgtcaactggatgaacatacagtaacggaaaggaaactaatggttaacaaagctatcatgatggttaaccagggaattgcagaagcaaaatatcatagtgtcaattccagtattttcagcatgttattcgacgggtttaaacttgaacgccagcttgttcaactgagaaagatccgtgacttgttagcagaaggtttgttggttttagaacatcgagtaaacttgaatttgctgtaggtggtgttacaatggaacattatattaatggagaagacaagatccaatgaatgaattttacctatcagttgaacaaatgggagataccatttatgagcgcttcgttgactctaacggcaccgaacaggtacgtaagacgaaatatgcgcccgtaatgtatcaacacgctatgaatggcgtagaaaccccatacaaagacatttatggcaagccttgcctcaaaaaacagtttgacagcatcaaagaagctaaaaactggatgcagcgtatgcgcgatgttgggatggaagcgctaggtatggacgattatcgactggcttacatttctgacatgtaccggaatgaaatcgaatacaaccgcgaacacattcgcattgcttctatcgatatcgaggtgaccgccccagaatttccggatccgcgtgaagcaaaatatccaatcgatgcgattacccattacgatagcattgaagataaattctatgtatacgatctggttgagggtggccttgcggaatggtgcgcggcaaacgttgatcgaaaagacattagcgaagaagatttaaacaaaattgtttatcggtctttccagaccgagaagtcgttattgtctgcgtatatcaaagattggaaagagcgaacccctgttattgtaaccggatggaactctgacaaattcgatattgcatatatcatcacgcgatacctgaacattttcggtcaaaacgtggtaaggcattttagcccatttggtaaagtaaccgccagaaccactaccgacgcttacggcaacgaacaattaggatatgacatttccggcgttgctcaaatggatggtatggcgctgtataagaaattcagttttaccccacaaccatcttaccgtctggacgcgatcgcggaatacgaaactggtaaaaataaagttgagtatgaaggttcactgtctgaactacgccagcgagatcaccaactgtacatcacgtacaacattgttgacgttatccgcgtacttgatattgacggtaaacgaaactttattgaactggttctgtctgtagcgtactatgcaaaaattaacttcccaggggttatgtctccgctgaaaacgtgggacgcgatcatttataactctctgcgtgaagataaggttgttattccggaaaacagacgccatactaaaaccccttaccctggggcatttgtgaaggatccagttcctgggccttacaaatacatggtatcgtttgacttaacaagcctgtacccttccatcatccgacaggtgaatataagccctgaaacgattatgggaagttttgcggtacgtgctcttgaagagtatattaataagaccgcgccgcgccctagcgatgaatttagctgttctcctaacgggtggatgttccgccgtgatatcaaaggcgtgatccccgtagagatcaagaaagtatttgatcagcgtaagatgtggaaaaaacgaatgatggcgggtgagcgaaatcttgaactcatcaagcacgaactcgaacacttaacagacgcacataaccaaatggttgatcctgactttgatttctatacagatttcagtgatgaatcgaaagcagttctgaaaactcttacaaaacaaatgcttaaagcagttaagcgcgtatgtgagaagaagatcgcacaagcgaacacagcacagcttaaccgtaagatttctatcaactccctttatggtgcgttgggtaacgaacacttccgatacttcgatctacgaaacgccagcgcgatcaccatgttcgggcagttggctatccagtggattgaacgtaaggtaaacgaatatcttaacgacctgtgcggtactacggatcatgcatatgttcgatactgtgatactgactccatttatgtttgcatggataacgtgattgcaaaagttggtggtgaggctaaatttaaggataataaccattgggttgacttcctggatcgctttgctaaagaaagaatggaaccgatgatcgataaagggtatcgtgaactttgcgaatacatgaacaacgtagaacacctgatgtttatggatcgtgaaatcatttctgggcctccgttgggttccgaagggttgggaagtttctggactgctaaaaaacgatatgcggctaacgtgtgggactccgaaggaacccgctatgaaaaaccgaaactgaaaatcatgggtatggaaacacagcgatcgagtactccgacctctgtgaaagtattcctgaaagaagcgatccgccgtatcctgcaagaaggtgaattatctttacacgaacattataaaaagttcgaagaagaatataaggaacttgactacagggaaattgctggtgtatcatctgccaacaacatttcgaaatatcgtgatggggctggctatccaatcaagggaacaccaaaccatattaaaggggtgcttttctttaaccgtttcactgctggtattgatggtgttacgccaatcatggaaggtgaaaaggtaatggttctaccactaagggataaaaacccgtggcaagccgattgcatcgcgtggcaatccggaaataaactaccgtcagagatcgaaagtgatattctggcatgggtagattatcctggtatgtttgaaaaacatgttattagtccattgactaatatcacggaagtatgtaaaattgattatgaaaaacgtgccagtttaaacgatctgttcggtgactggtaaactataggggcttcggcccctttcattaactagtgagatatatagaatgagaatgaataaatcggaaaaattaaatgtcaaacaaagcactactaaaaaaactgatcaaaaactcgaatagccaaactgcatctgtactttctgaaagcgacgtattcaacaatattaccatcacgcgaacccgtgtgccgattctgaatctggcgttgtccggtgcgtttaacggtggcctaacttctggtcttacccttttcgctggcccgtccaaacacttcaaatccaacttaggtttgctgactgtagcggcttatctcaaaacgtatgaagatgctgtgtgcctgttctacgattcagaaaaaggtgttactaaatcctatctgaaatcaatgggtgttgatccggatcgtgttgtgtatactcgtatcacgacggtcgagcagttgcgtaatgacgttgtaagccagcttaacgcgcttgaacgcggtgataaggtgattgtattcgttgactcagtaggcaacacggcaagtaaaaaagaacttgctgacgcgctgtctgataacgataaacaggatatgacgcgagcaaaagcattaaaaggtatgttccgtatggttacgccttatctggctgacctggatatcccgatggtttgtatctgtcatacctatgacacacaagaaatgtacagcaagaaagttatttccggtggtactggtttaatgtattccgctgatactgcgatcatcctgggtaaacaacaggtgaaagaaggtactgaggtagtgggttatgatttcatcatgaacatcgaaaaatctcgattcgtgaaagagaaatcaaaattcccgctgcatgttacctatgaaggcggtattagtatgtattctggccttctggatctggcaatggaaatgaactttgtacagaccgtaaccaaaggctggcgcaaccgtgctttcctgaataccgagactggcgaactcgaagttgaagaaaagaaatggcgtgagtcagaaacaaatagcgttgaattctggcgtcctctgtttactcatcaaccattcttgaaagctatcgaagaaaagtataagatccctgatcgtgaaatcagtgatggttccgcgctggaagatttatacagcactgatagcattccagatcctgatctggatgatgacgatatcccagaatcatttgatgatatcgaagaaaacgacgaaattttataaaaactatggggcttcggccccataaccgaggcaatgtatggatatcgagagcaaagcaaagaattatattgatgaagcgatgaaagatgttattcaggaacttctgattaacgatgaaaaaggtgttgcgcatctggtttatattcataaggtgttttgggatcatggtctgaaagtagaattcagtaccccagacgaagacaaagaagcgttgatcccgctggtgcatgatgcaatttatgcacagattaaagagcttgaaaagggttcagttgtcccaaagcctaaactgacattatgggatgtattcaaacaaaaggtttacaactttttcatgatgttcagtaacctggtataaggcaatacaatgatcgttgatacaatattttctaacctgatttataacgggacatattttgtccaagcatggccccatctgaaaaaggaatatttcgaaggcaatgcgcaagttttgtttgacctcattgataaacatgtacaggaattcaacggcattccgtcaaaaactgctttagaggttgcgcttgacaaacgaaatctaagtgatgtagtctacgaagacacgaaaaaggcgattcagtcgctgaaaaatgcgccagaagatttagattggctaatgaaggaaacggaaacatattgcaaagataaagcaatgtatcgtgctctttctcgtgcaatcgaaatccaggcgaacgcagaaaaaccactggcagaacagaacaagaaacttcctggtgttggggctatccctgaaatcatggaggaagcattagcaatttcattcgatagttcagtaggtcatgactatttcgaagattatgaaaaacggtggatgctttaccaatcaaaagcgatgaaaattccgtttggtatcccgatcctgaacgcaatcaccaaaggcggcgcggaacgtggtacactgaatatcatcatggctggtgttaacgttggtaaatcactgggtttatgttctcttgcggctgattatctgcaacagggtaaaaacgttctttacatttctatggaaatggcagagcatgtttgttctaagcgtatcgatgctaaccttcttgatgtgactatggatgacatcgacgaagggaacattacatacgcagactataagaacaaaatggagcgccttaaagcgggtaaggttgggcgtttggtggtcaagcagtaccctacatctggtgcgggtgcaaaccactttagagcgcttgtgaaagagcttaaattgaagaaacagtttgtgccggatgtgatcattgtcgattacctggggatctgtacttcaacccgcgttaaaggtgctgaaaatacctatattctggttaaagcaattgccgaagaactacgcggtcttgctgttgaaactaataccgtaatgtggacaggcgcacaggttggtcgttctgcatgggatagttcggatgtgagtatgggtgatgttgcggaatccgctggtttacctgctacggctgattttatgttagctgtaatcgagacggaagagttagctgatcagggtatgcaactgttcaagcaaatcaaatcccgttatggtgataagaacactttcaacaagttcaagttggaagttcgcaagggtaatcagcgctggatggataccgacaacagcgaatacgggtttaaatctgactaccacggcaacaatatgcctagaacagtagaacagacacaaggcccgatgattaaacaggctgaatccacccgacgtgataaaatggcgcagattgcaaaatctgacattcaattttaattgactggggcgaatagccccataaagaatgtaaggtaatgaaatgactattactaagactataacgattccgattccggctatcaaactgctaactggactgactatgatttttgccgccgctaaagtgttcggcttctcgcaaatgtcatggttctgggttctcttcccagttctcttacccgtctatattgtagtaggcgttgtgttggtgggtgctgcgatctatctgctgttctcaatgcttgccagtgacaaggccgaagatatgtatcgctgggtaaaagccaaatacgaaaaacttttcaaaaaatcgtaaaaaggtattgacctgaatctccattgtggtaatataactcacgtagacaagatactgagttaaacaaaggagattcaaaatgaacgtattcaacaacccttacaacgaaatgctgaacccgaatgttgatttcagcgatggttattttgacgcaatcgtaaacagcatcaaaaacaaaggtttgctgttagcgatgctggaaaaaggcaaagatgacgttgaaggaagtgttgatttcctctggaacttcctccctatcgaacctggtttcaaagttggttgtaatgaggaacaagcgaaaaacgttcttcggtatctcatcaataacgcataaaaaattaagcccctttcggggcttttttgtatctataggtattgcattctttcaaaaaagatgataccttaatcataacaaaggaggacattatgaaaatcgcattcgttatcactttcttacttgcagcactcaacatcgtaactggtaattcttttagttggtgggtggtggcaatgccttacattttcgtgtatagcaaaatcatggtgattgctggcgtgaatcttgtccttgctatcttattatttgtatttgccgccctgaatggtgaagcaggttctacctggaaagctatgaaagagggtgttaaagagggtttgaaatgatgaatttagatttttgtaaggctgaaataaaagctgacgcagacgaagaagaaccgaagttcgatagtcctcatagttcccgctggatcgtagctgttgacgatgaaggttatgttacggtattatctcgaccattcattcatgatgcattctttgaatgtggacgcagcgcggaagatatcgggcttcctgattccgtcgaaatgcctcctggcgtgtatgaatggatctgtggttttgaacaaactactgactgggaaaccggatacgtggacggatgggaattctatccgaatgaatcaacattattgtatagctgggacaatggcaaagttaacgaaagcggaaaccaagaaacacaatcagataatggatctggttcactctgacaaagcgctaacttacgaagagaagttgttcattatcgaaaactttcatgaaggcgcgtttacaaacaactctgaattaggggcgttctttacccctattggacttgctcgcgatttcacaatcgatgcttgcacaggtggaagcgttattgacctgtgtgctggtatcggtggattatctttcgctatggttcattacatgatgtacaatacgccgcgtgaaatcgtctgtgttgagttaaatcacacatactatgagttaggtaagcgtatcgtaccagaagcctcctgggtgcatggagacgccttaacaactgaatttaatcaggtgtttgatatggcgatcagtaatccgccttttggtaaaatcaaaacatctgattttaagggtaagtatacaggggcggaatttgagtataaagtaatcgaacgtgcatcacagatcgcgcgtcagggaactttcataatccctcaaatgtctgcaaatttccggtattcgaaaacacactgtttccgacaagatgacagcaccacatcaagtaaatgcaaaaagtttcttgatgaaactggcctcgttatgaatcctggatgcggtatagatactgggtattacctggaggattggaaaggggttaaaccactatgcgaggttgtttgtatggagtttgaacctgaaaccaaatctgatttattcactttcacaatagagtaataatcatgagtgatcaattagttaaaaatatggatttaacatatagcgtccggatgatccggctactcaaaaagccctggactgaatggactgcttacaagctggggatccttgatggacaaggcgaagtaattcgcaaccccaaaacaaaagaagagttagaagcgtattctccttttcatcgttcagtacgccatatcaagcgtagaatgaatgctgttccgtatatgagtgggtttatgaacttaaccagttcatatgataccctacgcaatcgctacaatctgacagaacaagagcatgaagaaatcatgttgaacgttccacgcctcaaagaatattatgataaggggcgcatgttagaggatatggtcgcgggtgattctggcggcgatacagaaaagattgcttctggtgtgactactggagcagtaaccaacatcgggccgaaagtattaggcgttacccgtgcagggaaaaggaaaaagaaatgataattcctccgctgaatatcactatctgggctactgctaacgattatacatggtttccaatttgtatcatgtatatgagtgacaacgcgaccgtttatcagaatcgtcgaaaaggttctgataaaattgatattgcaataaattattcgtttaaacaggcatttcgtggttggaagttaatgcttgacggaacagaaaagcaagtaagttcttgacagaaaaatcctcttagtctatgatattgaaatcatttgattaggaggatttacaatggcggttggatttggccctgctgacggtgttcaagataccattcaggcaacaatagacaatgcgatagattttgcacgttctcaaatcagaaacggagaatcattaacgcattgttttgattgtggggatccgatacccgaaaaacgtagggctatcgtgaagggttgccgttattgtattgaatgccaaaaagaacatgacgaaatgatcagcgcggggtataatcgacgaggatctaaagatagtcaactgaggtaagaaatgtatcttgatatagaatttgcaacccgaatcatgggatcactgcctcaaagcgaaatcgttcgtaaatcgggggcattaagcatcaatgcgcgttgtcctatttgcggcgactcaatgaaagacaagtacaaaaaacgattttggatctacccttctaaaaagggtgatcatatgaattgtggttgttttaactgtggttatggtgtaccgtttagcgtattcctgaaagaatattatccagacgattaccgtgattatctcatggaatcgtttaaggatcgcaattcgttaaagccaacacatacagaaccaccaaaggaagagaagaaatttattcctactcttcaattctgcgaaaggttagataccttgccggatgaacatccgatcataaaatatgtgcagaatcgttgtattccccgtgacaagtgggaacggttgtggtttactcgcgaatggcaacaactggttaatacggtgaatccggatacctatccgatcgcaaaaccagaaccgagattagtgatccctatcttcgataagaaaggtaaaatagaatctttccagggccgtgctttacgtgacggtgcaaagtcgaaatatatcacaatcaaagcctgtgaggaatcaaccaagatttacggacaggatacgatagatccgttaaaaacggtttatcttcttgaggggccattagatagcctatttgttgataatgctggcgctatcactggtggacagcttgcgctttctgaggttccgtacaaaaatatgcgtgtctgggttcttgacaatgaagcacgtcatccggatactactcaccgcctctttaaattgattgaggctggagaaaaggttgtaatgtgggataaatgcccgtggccttccaaagatatcaacgaaatgataaaaacggacggcgcaactaaacttgaaattatgcagtatttgaaagacaatactgtttctggactcacggcaaaacttcgatttaagtcgtgggacaaatcaccgaaaaaatgagattgatatgactactgataaaactcctgtatttaattcatgtgcgcacctggttaacccggaagatctggaatttgtagattccgaatatcaaaaggttctggcccgtaatggcgatcctttacaatccatgctggatttacaaaaccatgcacaacaaagcctgtctgatacgctgcattgggttccgcgtccagataatctggaaacttgcggagaaatccttgattggctgaaactgcaagacgacgcgatcgccgacgaaacccgagaattgtataccgctctgggtggaatgtctcgcggtgttaaacctgcatccggtgtttggaaaccgtggaaagcaaatcaccaggaattgcgcaatactaaatttgcggatctgagtgaagaggatcgtttagaagttctgtttgaaatgatcgaccaattccactttgtactatgtaagtttattgcattgggtatggatgcggaaaccatctacaaactgtatgcactgaaacaagccgaaaacctccgccgttgggctaacaactactaatggatccgatcatcgcgctagtagctgttggggttctttcttatggtgtttgcgcgatgatcacatatcttttcggttggtgtgtgtttcacgtaaatggcgttgaaagaaaacttttactgattatactatcagtgttttggtttgttggaatattctacgtttgttatgaggggcgagaatgattacaaaatattatatcgtcgttagtaaggataaagacgggtttaaaattcccttcattaaggaaggagagttaacaccttcgttgtttctatctccggacgatgctaacgagtataaaaattcgattatcaaagaatataatgataagatgaatccagttaaacaaagtggtcttagccgattctttcgaaaggaagaagttgaaaccgtaaccgaaaagaaaaagaaagatatgcgttggtttattgaacacgcaagtattcaaggggtattgattaaagtatgagcgaattaacttttgacgatctgagcgaagaccagaaaaatgcacatgatcgagtgattaaaaatatcagaaacaaaatccatactactatcacaggtgggccgggtgttggtaaaactactctggtaaaatttgtgtttgaaacattgaaaaaactgggtattagtgggatctggttgacagcaccgacgcaccaggctaaaaacgttctctctgaggcggtgggtatggatgcaacgaccattcactcagcactgaaaatcagccccgtaaccaacgaagagttacgagtatttgaacagcaaaaaggcaaaaaagccgctgatctgtctgaatgtcgtgtgtttgtggttgaagaagtatcgatggttgacaaagaactattccgtatcatcaagcgtactattccgagttgtgcggtgatcctgggattgggtgataaggatcagatccgtcctgttaataccgaagggatcaccgagctttcaccgttctttgatgaggaaatttttgatgtcattcgcatggataagattatgcgtcaggcagaaggaaacccaatcatccaggtatcacgcgctatacgcgacggtaagccgttaatgcccctcatgaatggtgaactaggggtaatgaagcacgaaaacgctagtgacttcctgagacgttattttagccgtgttaagactccggatgacctgaataataaccgtatgtttgcttacactaacgcaaacgtagacaagttaaacgcagtgatccgcaaacacttgtacaaaactgatcagccgttcattgttggtgaagtggttgtgatgcaagaaccgttagtgacagaaggccgtgtgaatggggtttcgtttgttgaagttatctataacaacaacgagcaaattaaaatccttgaaatcataccgcgttctgatactatcaaagctgaccgatgcgatccggtacaaatcgattatttcttgatgaaaacagaatcgatgttcgaggatacgaaagcggatattcaggttatcgcggatccggttatgcaggaacgtttaggcgattatttgaactacgtcgcgtttcagtataagaagatgaaacaggaaaccggatacaaagcaccctggtattcgttctggcaaatcaaaaacaagttccagacggttaaggcgcttccggtttgtacgtatcacaaaggtcagggaagcacgtatgatcattcatacatgtatacgcgcgatgcatacgcatacgccgattatgaattgtgtaagcagttgctttatgtaggaactacccgcgcacgattcactgttgattatgtctaagggcttcggccctttgaggttattatgaaaattattgttaaagtcaaagatgtagaaaagattttgcgagaagttgaccgtattggtagagaggggcttgattatctcgaagggttcaattctatcgatatcaatttgttgtttgcaaaattgcgctgcgttgtcaacgcaaacaaagaagttgggttatactgtcctaacgggccgacctacacgtggggaaacatttcacaagatatcgaattcacttttgaagagtatgcagtgatcattgatactttgaaaatgggtcgtaacattcgtgaaaacaaaaacatgcttgaggggttttaaatgaatattcaccttccgcgcctttatgctgaattggttgccgatctgattttgaaaagtgatcgttctacaatggaagattaccacgattgggaacatctggacaatttcgcagaggctgtagaaaacatgatccgactggaaaaatcgattgctcgttgtgggcttcgtcagttcgggatgatggcggtaactccaggcatgatcgaatccgttgatgttactccggaagtcgcgctatcattggcctatttcatggaatcgtataagcggggtcgcgaatgagtcatttacccgtagatttcgtatttgattatgaaagtattggcccgtttccaaaaggaaaactagctgaacttagctatgttccgtttgttgatgatccttatgatccgcctacctttcaggaactgattgctaaaggaagaaagtacaaatttgacatccggaaacaaccagaacgcatcaaagatgaaaaaacgatcgaatggtggaaacagcaatctaaagaagcgcaaagggttttgttcccttccgatatcgacatggatttgtacgaaggtcatcgacaattctttgctgatttagcggctgacggtgtgagtcgttggcagtcatacgattatacgcgcggccctgaattcgatcgttctatgctaaccgatgttgtacgaactatgacagggaaacttgacacgtttgaagatatgccgaccgtgttctggaatagccgtgatgtgcgtacagctattgaaaaccgtttactgactcgcggagtgaccacgtgtccactgcgtaaaggcatgttagatggattcattcagcatgattcgattcatgattgcgctaaagatgcattgatgctaatctatgctaaacgttatgccctggggctggaagaacctccatccttagaagagacagacgaaaacagcataggaaagaaacgatgatcacattaactattatggatcgccattactacgggaacacgattaacgaagcaaaagcaaaagcctttgaagatatcattaaccaggatctggttaagattgaatcggatcgctatgtcgtccaaccgggtgatagcctgtattctatagcaaagaaactgtatggtgttggtgaacattggcctgatatcgccaaaatcaaccgtgatgctattccggatgcacgtctgatccatcctggtatagttcttcgattaccaaaactggtaaaaatttaaaacaaagcccttgacttcggttgagggcttttgttatattgggttctaagaaaggagattgatatgaattttactaaatttgaaatccggctgttgattacgctggctatttgcggagcggtatcattgattagtttgttaacgtatatcgcggtaagaacaacgatatggcttcatgactggtttactgtacttgacacaattaaggggtgatttatgcgtatagcgattattggggcggctttgggtgtaattggtgatcgtttagtaaactgtgtgatcgaagaattcaagtcacaaccttatccgttttcgatggaatggaacaaccaatttcctaatttggttgaggaagaacccatgatccacaaagtaaaaccgtaccgaaatccggttgtgcctaaatcgttacaccgtcaatcagtaaacaggggtaaatgatgtcagaattcgcgttagctatccttgttatgattgttgtaatgggttcgatcctgttttgtcgcatgtatcagttagatgatacacaggaatggttggacattaacgaaaagcagttccgtaagcactttgcaggtgaatttgtttttgtgaaatttcgtagtgactacaaggtcgaatttgagtttgacggaaaagggaacaactaccacataatcacttctgttattgatgcaaagaaaatctttgataagacacaaggcggcgggatccgtaaattactcaaagaaataaaatagcactttttgttaaagaagcctcttgcaatgcgggaggcttttttgtatagtgtgttcatcgaaacgaaacagagaaaggaatacgaaaatggttaaagtaaaatatgcagcaaatgttaaagcaggtgagattgttggtttatctttcggtgctgaaattggttctcagtgggcgctggttgaaaaggttgaagacctgggcgataaagtagcgatcactgtgaaaatgcaaaaacgttttactaaccgtccggtaatcactaagaaagtgaagaaggaaaaacgtgttaatactcagactttcgaagaattcatgaactggtgcaaaatgtataaactggatacttactaatagcactttttgttaaaacattctggggtagctttgatatagttaccccatcgaaacgagggaggaaatgattatgatggttaacggttctctttatcaacaagcagttgcgcaatggaaacagaaagttcaggatgcagaacgcgggatcgcttattgtgatgaagcgttggcaagcaatcttgaaaactgggaacgcaaagagtacgagaaagttaagcaacgctatttgaacgaactccctgcattaaaagaacacttaaaatatttgatggataacgaaaaaagccttgcatagaataaccatctttgatatagtacttacatcgaaacgaaacacactttaggagatataccatgaacactttcgaaatcctcgcagaaaaagcagcccctttcatggaagcaatgtacaaagcgcgtaacgctcgtttccaagattctcctttcgaaactgttttctttctggagaaaggccgcaaatatcatcgcgttgttcaggatactcgcaacaaagaaactggtgaaatgttcaatcagcgttctgttgccgctttcatcgataatgatggtaatatcctgaaacctgcaagctggaaagcaccagcaaaaggcattcgtggtaatatcttcaatgacgcagaccgcgcgattgaccaaagcggttatgtggtttatcttcgttaacaaaggggcttcggccctttttcttaaaaggaatatagcatgagtaataaaaacgaagacgctaaaatctggaaagctgtaggggttatggctgtaatcgctgttgtgggttactatgcgtataattcctggcaagaaacgattgatgcgcaagtacaggaacaacaaaaagccgatgcaatcgaacagcataaccagcttatgcaattgcgctctctgggatacaccacgaaggaagattttaaaaattcctttggtgactataccggatccctctacaccgtgtggggaatgactgacggcgattacatgtacattgaaacagaccgttataatgtcccacaaagtgtatgtttctatagtacaccgagagacaacggcaaaatcacgtcatacgcaccagaattcaaaacgatttctgttgatatgaagattgacgggggagaaaccctatcatttgccgctaaaggaaacaacggatccgagcggttgtgtcttctttctcctactcgtttcttacgcaacattcaagacgcgagtaatttaaaaattgctttaccatacatcaaccattatgatattgttgatgacgtaaaagaatggaacgtatcgcaaatcggggtgaaattcaaatgagaaaagcacgtaaaactaatgcagtgttaatgatcaacggtgaagtaggaaaaccttgcaccaattctaaattcatgcacattgcagggcttccgggcatgacgcttaaaacgtcgtatgatacccattacaacgaagaaactacttctgtatacatgggagaagatctaatggctgaacgcatcatgcaatgcattcacttccctggtgaacgtccttcaattgattgttatatttttggctaccataaaggtattgtaaatgaatctgtataaagaaaatgatctctatgttcctgcatttggcctactcacgtatcacagtatgttggctggatacgggaaagagttcgattttgtagcaagcgttaaacgacatttggaacgcagcggcgggttttctattccgcgccaaatccattatgtttgtaaagaaggggtgtttttgaatggtgttcctcatgtgatccctttcaacgtgtttgaaaactattttacaaaatacgttgttcaacaaacggagacgacatccgagaatactgcaacgcgagaagaaacggcgatcgtacttgataagttttttgaaatcgctcataaagtgaagaaacgcacgaagagtgatgtggttcatcacctatcagcggaagttggcgagatcagcgaatgtctcattcagcctcaacgcggcggtaatatcgttgaagaaagtattgatgcgattgtgtgcgcacttgatgtgatttacctggaactgggtactactcacggacggtacgaaattgcaaaaattatcaacgaaatgcttgcagaaaaattagataagtggtatcgtacttgtaaaccttgagtttacttgtgaggattatatcatgttcgtatatcgtgtggaattttcttgttctttctggaatgattgtacagaaaaatggcaaacaaaaagcggcccatatgtcaatcgttatgtgtcaatggatactgctgaatggttggatcaattctgtatgaatcctgatatctatattgatatggatgataaccgacatccagcgccggatgacgataatcgattgatgcgcaaccttgaaaaagataacatagactttcaagcggctgggttatactttggttttcagtcaatacagcgcctttctcgttggttcaatgcatatgaacgcgagtacatgcacaatgttggtttcgtctgcatggtatacgaagttgaaaagttgtatccgggcgcacgtcaatgtgtttttgacatagacaaagcccgtttagttaagatgttaagtttaaaagagatttattaatgcctacctatacctataaatgcaccaagtgtaataaagaatttccaaaaatggcaagcattgctacccgtgatgcaccgaaagattgcgattgcggaggcgaagcaaaacgaacggttgataaacctcaaatggttcgtgatggtttcccttataacaagtaaaccccgaaaggggttttctttttcatagaaccctatataatgtcagtgattaaacaaagaggtgaatatgagtttagattttcttctggcagatgatgaaccagaacagaaaccacaaccagccaaaaaaggcgcaaaggttgacgaatcattttgtatgagcgatcgcgatcatattcggttgcgtccaaatatgtacgtcggatcggttaacaaagaagcgcatgaacgtttcataatgggccaatatcgcaaggttgagtacgtggaagggttggttaaaatcatcaacgaaatccttgataactcgattgatgaagcgatccgaactgaattcaaacatgctaataagattgatgtaaccattgatcataatctggttaaaatctctgataacgggcgcggtattccccaggatgatgtaaaaaccccagatgggaaaatagttcctaaaccagttgcggcatggactatggcaaaatcgggttctaacttcgatgataaaaaccgcgtaacgatgggtatgaatggtgttggttctttcctgacaaactgttatagctcgatttttattggcgagactgcaaacgggaaacgcaaagtaaccattaactgtacggacggcgcacagaacatcgattaccgaaccagccccagtaaagaacagggtactactgttaagtttactccagacttctctatgtttggtgtaactggtatcgatgaagaaaccaaagaagtgattaaggatcgcttaatggcccttgccgttgctttcccgtccgtgaaattcacatataacggcgaaacgctctctaatcgcttcccgctgtacgcttccatgtatggggataaaaccattgtccagacaaataatcgcctcagcttcattctggcgagcactgaggacgggtttaaacagaaatcctttgttaacggtctggatacgaaaaacggcggtgttcatgttgagtgtatgattgatggtatctattctgaacttgaaccgatgatcaagaaaaagcatagtatcgagatcccgaaagcacgtgtaaaagaatgcttaactcttgtggtattcctgcataactttaatgcgcctgcattcgatagccaaacaaaagagcgattagcaaatacagcaggtgagtttaacaatcatgcgaatttgaactacaaaaagatcgcaaaaatgattatggatactccagaaatcattactccgatcattgaatccgcattgattcgtaaacaagcagcagaagccgccgcgatcaccaaagcgaaaaagaaagcgaaaaaggcaaagattgctaaacacgttccggcttccggtattgatacccctggggtagaaacaacattgtttctgacagaaggtgattccgctgttggtcagttcatcgaatgccgtaatgaagaaacacaaggcgctttcccgctacgtggtaagcctctgaatacatggggtatgagttttacagacattatcaaaaacaaagaactgtttgagctaatggctatcctcaatattcatcctggtgatacttccggaatgacttatgataatatcggcatcatggtcgatgctgacgttgacggcggtgatatcttaaccctgttgcttgcattctttagccgttggccttctttgttcactgagaaacggatccgatatattcgaaccccgatcgttatcgctaaagttggacgcgaggaaaaatggttctattctcttgatgagtttgcaccgttccgcgataaagcaaaagatgtacgatatatcaaggggctgggttctttacgcaaagaagattacgatcgtgttctgggtgatcagttgaagtatgatgtcatcgtacttgacgacgaatacaaagaagtgttagaactatgcttcggcgacgaatctgatccgcgtaaagattgggttaatggaaaacacaaattttctaaggttgactaatggaaagaagtattaaagatgttgtacaggtggaagggctaacgtttgccctttacacgatttattcacgtgcgatcccgcacctggtagacgggtttaaacccgttcaccgtttctttattcactctgcgatgcagggcggaacgggatttcagaaagtagcttctatcgctggcggtgttgctatgtatgggtatcaccacggggaaacctctgtagaagaagcgttatcccttatggcggcgcactggtgcaataacattccgttattcgaccgtgatgggttctttggttcacgtttggttaagaaacctggcgcacctcgttacatcaagtgtaaactatcgccaatattcaaagcaatttatatggatggtgatttaacgccagttcatgaagatccggaacatgtaccgccagcgtactatctcccgatcattccgatggtactggttaacgggtttagcgggattgcaaaagcatatgcaacaaacattccgcctcatgatcctaaatcggttgttaacgggtgcattgcatatctgaatgataaagatttcacactggatctgaaatacccttactttaaaggtgaaatcacagacggtacaatttacggcacgtatgaattgcaaggtaaaaccaaattggtgatcaccgagatcccagtgaagtatgaccgtgtgaaatacattgcaatccttgacaagctggaagaaaaaggcgttattgttagctacaaggatctatcgaaagaagattttcgttatgaagtaacgctcaagcgagagtatgccaacgggttaacccgcgaaaagatcctgaaagatttcgggttgattgaaaattcaaacccaaacattaacgttatctttgagggcaaactatactcatacgaacgccctgaaacgcttctaaaggatttcgttgatattcgtatgaatgtatatcaacagcgtatcaataagcgtatccaggaaactaaggaagcgttagataaagcactggcaaaggttgcgtttattgctcaaatggtagaatctcctgattctctacgtggtcttagtcgcagcgaagcggttaaatttgtgtctacgtggataggttgcgagaatcatgccgaaatgttagtggctatgaacatctaccatctaaccacggacgaaagcaaaaagctggaagacgaagccgaagaattgcggaaacagttgaaatactgggaagaaacaacccctaaaattgagtatctcaatgatttaaaagaactttctaagaagttgaaataataacaaagcctcttgcaatgcagggggctttttgctatattggttttgtaccaagcaaaggagattctaaaatgttgaaaactcgtagtgcaatggaagtaacccactgggcgcgtaccatgatggaaaaacacggtttgatcagtaatggttggacattccggatcaatggacgcattacaaaaactctgggccgttgcagttataccaaaaaactgatcgaactatctggtcgtcatgttgcggaagatatctacgaggatattttagacactcttttacacgaaatcgctcatgctcttgtcgggcgaggttatgaacatggtaaagtgtggcaagctatggccttgcgcctgggtgctaaaccttcaccgagtaaaacaactacaaaggatgctaatctggttgataagaatgagatcctttactgtttgttcatgaaagattatcaaggccgtgaagtctatcaggctaaagctgataagaagttttacaacgatgtgatgaacggtgttaaggatatgaaaaacatttggatcagtgggcgcaaggcatacacaaaaggccgtctgtatatccgtccagtaacccatgaagaacttgcatatattcgcaaagaggggtaaggtatgacacgttgtaatgcgcctaagttgggaaaatatctgaccatattcggattttgtgcgttcttttctatcattatcggggctatcgtgtggggtatacttgatatgaagaaacagcaggtcgaggaagaaaaattagtaaaattccttgacacatattgcgaagtagtagaatatggcctgaacaaaaagccaacgaagtactcttgtgaccaagttatttttaatgttaagtgagaaataaacaatgaaattacgcgaagatacaccgcaaacaatctaccgagttggtacagataccagcaagggacgaaacaaactatctctacgcgcaaacaagaaagcgtataagatcctttcttcgacagtatacaaatacaagatccgcgcaatcattcgcgaactgtcttgtaatgcgatcgatggacacaaagaagcgggaaatcagaacccgtttgatgtccagttgccaactgctgttgatcctcgttttgttattcgtgactacgggatcggtatgtctcctgatttcgttagtgatgcgtttaccgtttacttcgaatcaactaaaaatgattcaaacgacctgatcggttctatgggtctgggttgcaaatctccgctttgctatgccgatgcgttcacagttgaatctgtaaaagacggtatcaaatgcggttacacaatctatatggatgatggggaaccgttctgcgatcctctgtatgagattgaaagtgatgaacctaacggggttactatcactgttccggttaaagttgaagatatcaaagaatgggaaaacgaagcagcaagggtatacgaatcatttactgatattcgtcctaactttgttggtgcttctattctcaaaatcaactatcagccgaaagaagcaaccaacgatagcggggtgatccgtcataaatcagcatacactagcggtgtatatgctcgcatgggtaacatcatttatcctctggataaagatttgtatgatacctcgatgttctattgctatacagaaagccagtatacgtatattattgacttcccaatcggtgaacttgatttcatgccttctcgcgaagagttgagtatggataaaatgacagtagggattgttaaagaacgtctgaaacaaatcagccgggtgtatttcaatcgagttaaatcagaattcgataagttacaaaccgttcgtgataaactgacgtggttccattctctgccttcaatggtacaaaactttgttggtaaagatgctaattttcgcatcaacggtgattctattggctggatccatagcgaactagtcaaaccaaacaaatataatgatgattatattgctgggtattgggcgaacgaatacgacggtaaagatgcatggtatcaggtaacgggtagcggaggccgctggagcaagtataagccagaaacaaccaaacgccaggacatcacacgcatttattatccgtggaaacagaagaaactcattctgttaaaagtggataccaacacggttaaaccgtatatcgtcgggtatgctaaaatgcataacctaagccgtgttagctttgttgcatattacgatagtgattcaaagcgtgagattgttaatgatatcgttcggaaaggtcattttgatgaatcggaaattgtgtatctccgtaccagtgaaatgacaaaagaaaaagagatctatgatgcagatcgcgaaaaatcgaaagcgctatatgcaccgaaaaattcagaaccgcgcccaaaaaccccgaccgtatatcgttatgagttggatagtaacggcaatctggcaaaaacttctctgtttatgacaaaatcagagtttttatcactggataaagccccaggtgttcggttgtatggtattgatgaatatagccgcttagatggtgaaaattccaggttgtctatggattcagcaatgaaagaatctactttatcgcgtatcatgcgccatactgggatccctgttgtgtttgctatccgtaacagcctctggaagtggatcccggattcaaatctggtatgctttgatgatatgctgtgcaagcagtatgttaaatccgaaaaggcattgaaagataattgcttgcctggatggattggcaaggaacactcaacagaaacaaacgcattgcatagccgttttggtgtatcgcttgatcggattgtgaaaaaccgatataatgaaaaactgtataagattgttgataccctcgaacgtatagtgtgtctggaagggtatgagaaagatggtaaaaatctttccagggtgcgttgtccgattctgcgtgaatccgtagcatcaatgcgcgttaaacgcagcaatatgaaaaaacgtgttgatcaggcatgggaaatctttaaatcactaaacccgttactggcttcacttgttgaacatagcgattcttattcaattcgtccgatttacaacaacgaaaagaatctcagtgagtttaagaaattaatacggtggaaataatggtcaaaattctcgacgaagtacaacagaaagctatctataatggatggttgacgggggcaagtaaaacagcactggcccaacagttcaacgtaagcgcccgaaccattgggcgcgttatcaaccgcaagttagcggaattccctaagaaaagggatgtaaaacaaaagcctaaagtatcagacactgtaccgcgtatgatcggatctgaatcgttcattacggttgtatacgaagggcgcgttttcatggcgggtgaaacacatccgaactttaagaaagcgcatgaaatgctgaaagctggtgatgtcaaaggtgctgtaacttgtttggatactcaagaagcgatccgaacctatagcaaaggcaacattaaaatcattggtcatcagcttctatataaagatgtagtgtttgattctgatatcactcaacgaatcattcgcgaaatgtataacgatcgtccgtatgaacacctggtaaacttctttgaacggttgatgcgaaacccttcacgcgatgcggtataccagctttacgggttccttgtacataatgacattgaactgaccgatgatggttgttttcttgcctggaaacgtgtacgcgataactataaagatctcgctactggcaaatttgataatagtcctggtgtgactgtctccatgcctcgaaacatggtagacgaagataaaacgcgcacctgttctactggcctacacgttgcggctaaatcataccttccacactacgggggcggtgttggtagagtcattcaggtaaaggtggatcctgctgacgtggtagcgatcccagtggattacaataacgcaaagatgcgtgtatgccgttataaagtcatgattgatgttacatatggttttagccattactaactaaacaaccgcgcttggagagttctgggcgcataggagactatcatgaaatttaaaaacatgccttcggctaacgaaacccgcgctagtggtgaatctattctcaaaaccgcccgtgaaatgtgggccgacgaccgggtagaatccgggaaaggttacgtatttcgtaaaggatttggtgcattttatgttgcaaccacctttatagtagggtatagttgtttaggaatcgcgtggatgcaacgatatcttgaacgtgctgttctttttgtgatacgttttctgtttacattgatcagcgtagtgattagcatcccatttctgagcatcgccttgtttgttaacgtaaaaacaggcgaaattacaaaattaggcaaactggtatctaaaaaatatgaaaagaattctgacaagacttgacattcacaaatatgcaattaaaattggtgacatgaaacgcggaaccttcaagaaattcgaaggcgtggatctgaaagaaaacgggttttacctggtagttgatgataaaacagggcgcgtagtattccgtttctacgtagcaccaaatcaacgccgtaaaactggtgctagtcgtactctgttacgtatcaagcgccgcgaacacgaaccgtctgcgatggttgcgatgctggaaagtgcttctttgtactatgtagcacatgacaaaatcaaaaacctgttcggtttcccgaacctcaacggatcaacgttcgaaagtgctattcaaatgcgttatggtgctggtgaaaactacaccgagtggaaccgcgcactgaatgacatttatgattttgaatttcaaccatattgatgtatactgattaaaactaaccaattgagataaattatgaaactgtttaataaaattcgttctgtagatgaaatcgtagcaactttcgacaaaaccctgtctgaactggaagcgcgtattgctcacgataatgagcaggttgcacaggttgcagcagatcgtcaagcagcagaagaagaacatcagcgtaagctggcggaactggcttcaaaagaaagcgatcatactgcaagtgcaacccgcgccggacgtatcgcagacaagatccgcaaattgctggattaatacaggggcgaaagcccctaaatatttttctttaaggggcttatatgaataatttggtagcgaaacatgatttcaaccgcgcttctactcaccgcgatcgcaagcgagcatttaaagaagcaaaacgtaaacagaaacacaaaggtaagtgtgatgaaaaccgctttgatcattcttgaagaaattcctgaaaatacaacgctttacaaagtcgaaactgacgatagcgaagtaattgagatcctcaaaaccgcccacgggcattatgtaaacggttccggcaacaccaaagaacaggattatgctgttgatgttgttaacctcatgctggggccgaataccgatgataacctgaaatgggcgcgtgaatccaacattcctgaaaagtatgttggtatgttctatcagtgtaacatcgatagcaaatcaccgtttgaaccagaaaagaaaatcgatctgattgttcgcactgggttcttcttatgagtatacaaattctgttcagtaaagaagatccattaggtacggaatcatcggttcagcgcttattctggcatacagattatataaaaaatcgatgtcgtggcccaaacaacacatggggaagcaacaacgatattgacaaagcaaaaatttatcctcgcggaaaggcgtactggaaaatttttgatattcatcttcataaaacaatgaaagattcgaatgaatgatgaaaaagcccttgacttcggtcaggggcttttgctatattagccatatcgaaacgagataccctttaaggagaaataccatgactaacgcaaccgtagttactaccacttacttcatttcttctggtcgtaaaaatgcaatgtacaccttgcgtgttgagcgtagaggtggcggttatacttctgataactatatctgcaacttatctaccgatccggagaaagcggaagcgaaagcgcgtgagtatttcgaccgtgtttcagcccgtttaactgaaactgatactttcaaaatggtattccagggctttgcagatttcgatctgttcgaacgtcgcggtaaactgtcagtgttcgatactgaaaaactggaactgctggaaaaagggatcatgccgattggcaagcgtaaaggcgaagtaattgcagaaatgccaatgtttactgttctttggtgggctgaccagtctaaagaagacaacaaaaacagccctgtatttgacgccgtgtgcgcttactgcatgggtgttgcactggagaaggattatatcgccaaacgcgaagaaatccgcgaacagtgggaacaagagcgccaggaacgcatttctaaagctaaccacatcggtgaaatcaaacaacgtctggaaatgaccggaaccgttgagaaagtgatttcactgggatatactcaagtttcttactacacttctgtagaaagattcatgaccaaaattaatgttgatggtaatgttgttgtttacttcggtaataacattgcaaacgaaggtgatgaaatcaccttcaaagcaaccgttaaagagcacggagaatacaaagacgttaaacaaaccatcgttcaacgtgtaaaggttttataatgacatacgaagatatgcttaatgaagtgtgcgcgggtaaaaccgcgtaccgcactaccaaccctgatatgattgtgtttcgtgaaggggatacaatcatcagacgtacacaccgcaagtgtgaagtaaaccaggtgttcattgccacggtagaagaacaaaaggctactgattgggatatcgtcattgacgaagaaaaccacgatgagctagatcatccgatattcattttgagtgaaactatcggaattcgaccattcatgcatagaaatttttgggggtatcaatgacgttcgatgaggcgatgagagccgctaagagaggttgtaaggttgcgccaataggtaggccattcttcgtgtattatcacgacagcgctggatacaggcgggttacgttgggggtttcggcaaggaatgaagattatgttccggatccgtgggacaaattgaaagtttgggatatttacgagaaaaatagcccggtgatgaacttctttaaagcaatcaaacgggctattggaagatcacacaatttaacaccagcattacgttaatcacctcgctcgacctaaaatacgcgcggcctgaccacatatgatgtttagcttcatatctggtatatcaggccgctttgcgtaccattccatcaaaaccgatccagaatagtagttatcaagattaaaataagggcaactaaaagtataagctactggcacaaaatcacgtgtcggtaggtaggaacttgctttagtggatgaataatacaagccatttatatgattcgtgtattcttcggatgttttatcgatcggataaccaccgaggtttttaggatcgatctgggatggtaattttccctgatattctacaatgtcaacaaaatagtttatattctttggtctgaatgccagtaccgccgaaaaatccgcgttggaagtaagatgaactatgctcaactgttccaacgcggattgattaaacttttctgttctttccatttcgatagcccttgtatcgactacaagggcaccttttatcatcgggaatatatcagtccatttgtaccaagttactaccataagaaacataaccattattagaattatttttatcagcaattgtttccatgttttcacacccatcacaaacgagattacccgatcaaataaggctagtttatctacgggatttctctcagccattttataagactcttcttaggttactatacgtatatttaggatacaacaaaaaaggctacctgtatggtagcctttaaaattacatagattctaattctttttgtagcttgattagatccgccagtatgtcttctttggttctttctttttcaacttcaacatctttagtcattatggtcttgccatcgataaattcgaacttcctttttgagaattcatcccacgaatcaacaggaaaatcgtcgagctgatatacatccaaaatcatttctttatcagcaaacaaacctatcatagtaggatcttcaccgttgtagtaattaattatcttatttgttttagcatcaacgataataatatgggaatttttatcaagagagtttctaaaagaataccaacacttatcattacaatctcgatagtaagcaccaccttcaaaattgtgatgccatttaatacctttcatttgtttaacaatcattattttacctttaagtttaaaggggccgaagccccttattatcaagtagcagaatcaacccattgaacgcccggtttccatacttgtaaccgtccgccgataagttgcatgttctggttagcttcgttgctgttaccgttaagaccaacaagcacccaaccagcaggaacagttttaccaggtgctggacgaccaattggaccaaagtcttgttgagcaccagtacgaacccattgagcacattggttaaacctatcgttgatatagttagtgatataaccaccgtaaacatcaccctgtaagttaccatcagaatgaattctccagcgtgctcctggtcctagcatttgacctgtagggccatccaattgccattcactaccgccagctcttaatcccatcatggtattattgtcacgcggcatataaatcacaccacgctcaccaccgttagaatgtcggaaccaaaggtgggttgtaccattatctgcggcaggggccttaacatcgacagcaccaacaaagctaccaataccgtaattactaacaacattaccgtcaacagttaaagcaccattaacagcagtatctccagtaacccagagcgatgtagtctttaactggtttccagtgatatctacttttcctgatacagtcaagtctccgttaacagcaccaccagtacaagttaatgtaccgttggcgttaatattgccgttaatcgtgatactaccgtttgcatcaatacgggtttcgtttgtgctggatgcatcaccttgcggtcgcagataaattgcttgacctgctttagcagaaacaatcaaatcaccaccattattagaacgaattttcgccccttgttcatactcgatcgcagtatcaccaccacttccagaggtagcagttactttgatcctgttgttggtttgagttgggccaccaggacgcaattcaacagcattaccaccaccagaactaccaataatcacacgaccatcagtagtttctaacagagcactacctttgccaatcacaacacctttatcagcgtatttcgttgaagaagcaccacctaaccctaagttaccacctacgcgagcgttgttagcaacaatcaaatcatttccgctgttcaggtttcctgtagtcgtggtaacagatttaaatgatacatcatcatcgtttccgttaacaacgttcattctccacggtgtccaggctttagtagtaccgctaacagttaaccaacgttcccaactgcggctattgtccgatgcgcgtaatacttgacggttagtgtaatcagtaccgctcactttacggagacattcaacgataacaataaagttaccaccgacgccagaaggtttattggtgatgttatcaccgccacccatactacgacacgaataaactttaatatgacctggttcggtatagttcaatgttaaagcatcaagatcctgagttaccccagtcaaatcatatgcagtaacagggccagtaaatccaccagttgaattaaccacaccagcaacgttaatatcacgaccgaagttaacagtccatctgtttatcgtatccgaagtcaacagccatgcgttttgtgtctggttttctgcttcaccgtaacgaatatcaccgtttacatcaatacccaaacgtttcatgttcattccggaaagtttgaacccgatagacaagttcgagttagtcggtctattcagtaacagcggagtgtgctgcgaaccactaatagaaacggtttgttcggttgtggttgaacttgtgttattaaagttcgcatactgagtattgacacttttaccgttgaaagcgccgctagtgatattgatatcactaggtgatgtaaatgtaccgtctgatttaaacgagaattctccaccagtcgttccacccgacgttctggcacgaatgcgaacttcaccagaagaggcagtgttaggcaacgcccacacagcaccagtttcagcccctttatacttaaaccaaattacggagtttccgctctcagaatttaaatggaatccgggagacactttggagatcgttagatcgccagacatcatatcaccagtacgagcaacagcattaacatcagacggtgatggcttattcaacgtagtatatacttgagataccgttaaattagtaccatcaactttatccgtagtgacgacactaataacaccgtttctgtggttagctgaaagaattaactggttgcttccagttttaacataaatgctaggagaatactgtggtattgtagcaatgttatcttctaccctaaagaagcatgttccgtatgtattaagatacttaacggtctctgctaaagatccctttgcaatatttccagcgcctaccgtaccaccaagaccaaatgcacctctttcgagaacattaccatcgccttcgccaacatcacgggttgcagcagtacccaaccctaagtttgtacgagcagcatccgctgtacttgcacctgtaccacctttagcaatagacagaataccatcagtaccattgtcaaggttaggtttattcatttcgtcatagatacgaatagccacactctcaactaaaccttccggagcagttgcagagattgtgtaaccagtaggcagataatattcagtaacagtaccgccagcgatagacagcagagcaactttaacaccaccaatgaatgcgcgttgagcaaaccacagttctaaaccttcggaggtacgaaccaggctataacgcatctggttagtattatcaattccaggatcgccgattcgacgaatttgcagataagaacgaatgtttgcgcttgttaatgttgcgggaatacttctagcgctacaatcgataaagtcgatagagccacgcgtagaaccatagttaccgccgttagtcaccatcagttgcaagcgactctgccctgagccagggtcttttaaaagagcaactttaatccaacgagattcgttgcctgtagttacagggaaattatcttgctcaagctgacgcgcgttttcaacccgtccgatccccaattcggttaaagtcggtttacgaccgtcccagtatacaggtttggcttgaaacagtaattcaccgccatcagtgatcgttaactgatttgtcgcaccgccagccatgttacgcatatagatatcagcaccgccagcgccgaaatatgctttgttttttgaaataaaagcagaaccaccaccgcccatagcttcatcaatatagatgttacctggtacgcgagtgttaccaccggaatcaataagtttcagagtacggcgaacagtatcaccagaaccacgggaaacgaaacggatctcttcatcaccgtcatcaattgtaccgatttctaaaaaccctttattactctcaccaccagaaccaatgtaccaaccatcgttaagagcgtttttaccagtgatatgacgaaccatacccccgctcaaatccgcgttggtgaaagtaatagttttaccttccgctacggtaacggtatcattaagagcactaggcccatttactgttaattttttggtatttgtttctgggatacctttacccgctaactgaacgatcgaagaaccatttttcgtgtaaatggcataatcagccatgttgatcgccagttcaccatctgcaagctgacttgtagtaggtgttttccccgcaactgtgctacgtaggaattgaatttttgctaaatcagccatgtttcaccttaataagatccaaaatctatgatagtccctttagtaattacctggtcgagccgtggtacgtgttcgggacgggaagccgcgcctgtgctcgcgaattgcggggcagttaatagccctgtcattgtatcgccagcgcgtaataccctgctattagcatttgttgtgacagtatttatctgtccatcaacataactttttcgtgttgcatgacttgcgtcagtagggttagcggttgtaatactgatttgtttttcaaccgtaatattaccctgagtgtttaaatcaccatttcgagcgttgatgactaatacgcgaccattagtaccggaagatgaacgaataccaataccataccatgatacaagatcaatgttggcttttgataatgtcgcgccatcaccatcaccagaatataaaccgttctggtcacttccgcctgtgaaagtagcgttaatttgcagcccctgtttaaaggcaactacacccaaatattgaccaccgcttgctttagaaacgaagtcgttatttgatgcttgcggtttatcgttttcagtataaaccttatatccgcgataggttagagtattaccaaccggaaccagcggaaatgtgccggagtgccaaataggtaaacccccgactgtagaaccagcttttaaatctgccataataacccctttttacatatttataaggcccgatgatccgggcctttgtttatgcatcaacttcacggaattcggaagcagaataatcgccaccaggataaaccttagtattcggcaattcaaatatatacggtgttccaccatcgatcatgttgttcattctgataccgttaaccccaaactgtgcagcaaagttttgatcagcttcggcagcagatacctgaaccatcacgaagttacggatcgcagataaactatccgtagcgggtttaggataacgagatacagcaacgttaaatccatcacaaccactagggatcgtatagaactgttcaaatcgtaaccactcatcaggtttatttgcaggaacttcaatcaccgatgatgaagtttgagcagtacccgtaaaccatcgaacagtaacccttgttgttgatccagcatccaataatgctttacttgcgtaaaaatcaccagtaatcatcatagccaatccaggagccataccgtaatcagctagtttagagatcactgggtttgcaacaggatatactttatattcagatccattggttgaattgtattcttccgtatcttcaacagatctgaaaggtacaccagttcgaccaacatcaccaacgttatcatagacaaggtcgattgatgcgcgtgaatcttcttttaaaattccatcgttagcgtaaaacgattcaatcagtatacgagattttgcggccccatacaatgcaacatatgcagaatttgggaatctctgagcgaaatcagcgccttgccacataacggatctgtttttagcaaaccaatcatcaacgatttggcttgttttgtattcaccgttagtcattatcaaatacagcccagaaggttgagcatccatatattcaacaaacgctttgtttgcagttgctgaattatcattcgataatgtgaaggttttaattggatcaactacagcattgttaattctccatacgttgatcccaacactaggcggtgtccctaccgccttttgatttagtgtaaactcatactgattaggaaccgcattgggatgtgttgcctttgcggttattctgtaagttacgctgtttgtttccgatagaatttgcgtttctacaaaatcggggccgaaccccgccattaagtttgacattatgccacccactcaaatttaactgtctgagtaactggatctgggtaaatcttaacgttaccaactttgatccaatcggtaacagtcatgtttttaaccgtagtaccaacagcagacgttgcaccaatctcaccagcagtaggcgggttgttgctagtatacatgcggccccaaccatcaaatttacccgtaattgggttcatttgacggatccagaaggattgcgccagcgcatcaacaccagtaccagaggtcggacgaggtgcccaaatctgataagtgaatgcagttccgttaccaaactgcgttaaagtacccggtgctttaacataggtataacgggtcacaatcatgatttctggattaatcggatctggttcaagaaccggaaccgcataaccaggaagcaagttgtattgtgccgatgctgtgatctcagccgtccagttgcccctagatgcttctgttactgcatccagcgttgaccaagccgcttgacctgcaatgataattgaactgttgcttaccgtcaagcgcccagacatcgtatcacctgctttacgtacatacgtaggattcagcaaggtttgcgcgttcttctcagtaaagactttataagagttcgcagattcttccgctacgatgttgccagcatcagaagtcaggatcttagttgtcttatttttagtacccacagagagaacagaaccagcagccgtgatcactgtatcattacccagagtcactttgctaatcgcctgaatttcaggagcctggaatttaacgttagctacaacgccgcgagtatcattatacacagaaagatgaactgtgccagtgttacccgtcgagatcattgcaatacgcccagaggctgaacttgcttgaattgaccagtcgttagatgaaccaccattcaaacgaagtttacccattgacgaaccatcaccaacgttcagatctccactaacattcattacccggaaacttgcgtcagcggttgaattaatgtcagcctgtacagtggttgctttcgttagagtcaatgccccgttaaccgtctgatcaacatcacgacgaatgaactgggaagaatccaggttatccagtttatcagcgtcaaccgctttagcaccgatcggcagataatgtttcagcgtcaggttcaattcataaggagaaacagcaacacctacagcggcataaccatcatccggaagagtagaaccagccacatcattaccagaccaagtaccaagccccttagacagcttcacagtaccacgtaccagatcggtagcttgccatgaagtatcaacctgaattgtatttttcaagttcttcggagaaacagccttgtttgcaacggtgccagcggtagtttcagcagccgtagccacctgaatgataccttctgcgctctcagtcgctttcttagcgtgtaacttcttaggggtgacaaatactgtatctaatgtccctgcgttcgtctcagactgcgtagcaacgcgtaaagtaccacgttgagtttcagttgctgattgaataccgatgttaaccgtagtccagatagtcccagattgagttaacccgtcagcagtagcaacagtaatatggcttgtatcgtccagataacctttcagtttagacggtacgaccgctttattcgttacagtacctgctgatacttcggcagcggttgcaattgcaatgatacctgtcagcgtttccgttgcagcacgatcattaagcgttttaggtgttaccgctcgcgtgtaatcagtaccagcgtttgtttctgtctgagttgcaatctcgatcaaaccaatacgaccatcagtagaggttttcttgtgcagcatttccggagtaactacggtcggaatgtttgcacttgcaacagtaccattaataacttcggtttcagaagccagccatacagcgccagattgtaactgagtcgctttatactcacgaagagttttaggcgttaccgctttctgataatctgaatggtcataaaccccagtaccagcctgagaacgatccgtgttggtgttaggagcaccaccagtagcaacaagggcaaggataccagtcaaggtcggcgatgcaatacggttatgcaactttttcggggttacaatagtaatatcatcggtgcttccgttggtttctgcctgagttgcgatttctgccaatccacgacgggtttcagtcgctgttctttcgttcagcttcttaggggtaacaatcacatcatccagatagctatcggttgaaagtttgttaacctcagcagttgttgctaaacgcgcaataccacgacgggtttctgtagcagttttatttgctaacgtcatcggagtaatagcagtttcgtcgttcgggttgtcttccaagtttttgtttacttctgcctgtgcagccagagcaataacaccagtacgcgatctgttagttgcgtcaacacgttcaacgatcggacgataattagcaacaacccattctttcgtagctttcatgtaagaaaactcgatatacgggaggtaatcactagcagcattaaatgctaatgaagttacactaaaccaatcatcaggcggatagtctttgcgctgcgggaactgcatcatatttttgttggtgcggatcttgtccgttgtaccatctttaactttgattgtacagttctggtttttacccatcatataaagggatacgtaaacgcgatcaccatcagcaacatcagttggaagggtaacagtaacgtttggtatagtcccagaagggtttgcagtaacaaaaacgtaatcgttaggaaccgtgtttaaatcactgtagatacgacgcagacgaacacggttatcagcatcatatactttccattggctattttgtgcatcaaagatgaacataccgaagccggatttctggctagttaccgaagtaacaccagtaattgcaccgtcagaaatagtgtgtccactacctggataaatctgcaaaacggctacgttgatagagttcattttatcagcgtcataggttgtgatcacatcaccatcatttgcatatttcggcaactggagagtgattttacccgtagcactgttacggaaaactgtcataccagattgtaactggaatgaacctgttccggttgcgttcacgatctcagaatcgcggttgtccagagtttcagcaacacgccatacgttaccgttatagataaacgttgcgatcatgtacgggtgagtcagtctatactgtgctgattgtacagtacgtaaacggatctgacgggtgttagacttaacaaggatactgttcacacctactaaaccaccgcaatctttaaacgtgattacgtcgccctctgtcgggttatccggcagcaggtacagaagttcagtaaagcgtccatcagccataatgtaactaccagattcaataatgctaccgtctggagtggttacgttactataaacccatttcgggtcattacgagttgcgatccatttggattcgtcgaaagccccagcaggggaagcaatattctgttttgcgtaccagatacgacgcgcataaatgatcgccatgtcttgagaataaccacgggtcgggtcatactgctggattccgttaaattcattgaaaaagtcaacgttaacgccgtcactcagcgtattacgatcagccttcccaacgttgataactttttcaccagcagcatcaaggccacttcgtgcgcggaatgatttagctaccattatcttttttcctatattgtattcaataccaatatttatatacaaaaaatggcccgaaggccatttaactgattatttattacttccgaaccatctttttatatttcttgattgtttcgtctgtaatctggtttcgtttatatagaggggttacaccgaacgcctcaacaccacgttcattaaggatcgttgctacgatttcctgtctgataaaccagcgcttaaccttttccggaaactgttcattgatacttttaaacagtttggcttcccaactatccagcgtttcagggtggataatatgatcaaacccttccagaaaatcaatcgttgttgcgtgaatagcgtttgctactttgcgaatgtattctttattcatgcttcacccaaatactctttcaattgcatataaccaccaataaaattaccatctacaaagatccgagggtaagtaaatgccatgcttcgactacgaacacgtttcgctaactcttcaatgcggggccgatcgtaatcaaaccccacactgttatttgctggctttagaacagaataaaattcgtattctaatccatgctcatcaagtaatttccgagcttcaatacaaccataacatttatgaagcgattcgggaataccgtaaatctcgattttcatcaattgctttccttcgtgccggagtgattttgctaatgatatctttctttgtatcagaaagcatacgctcaatcaattccaccgcttcaagttgttgatgcagagaaagaaggttgatgatttcctttttctgttcatcaatagcagcttccttgttaatcgcgtacagcttattatcaccgaaaacatgctgtaatgcaaattcaagtgcctgtgaatccgtcggcgctggtagtacagaaatcgaagtgatccgcttgacaaaaggataatcaaatcgcagatcattgatatcttgttgaacaggttttacagtcatccacattttaggatcggaagatacgaaatttaaatcaggcgcggcgatttcttctttagtagcaatcttcggttcttcttccggtaaatcatatggtttgaagtatttccagatatggctagggatctcatattcgaaatcatcttgcagaacataagcaatgtcctcagtatccccaatcgcaatacgatcgattgtaatatagccgttgtttttgatcaattcagctaaagcatttcgccaggttttttctgcaaattctttagcgtcgatgttcagggtataagatttaccttctaataattccatgtgtcacctcataaaaaagggtgccggagcacccagtttaatttacttgcttacttctgctacttttcgagcagctttgcgaaccaggtcggaagcagtacgcagattttgaagcgcgtcctcatgggctttaaccgcttcttcaagctgtaccattgcttttgcgatttcttctttcttagccgcttcgtctatattgatagtgatagcgctattagcggaaacgctaacaggttcatcaacagttccggttgccagttcacggaagaacgaacgttcagaatcaagcagatagtaaccaacaattccggtcggggaatcaatggtttctaccgttttgctcaattgatgatgaccgagcgaattcgtatggtaaacggtgtatataccattactgtgttcatcggtatatgatttgatcccagggttagcgccacaacgatttttaaattgctgcggtttaaccagaacatacgaacggccttcaacaaatttagtcggatccagttcaaccgacattgccgaaccgccatcaagcatttgatcaagatctgcggttgctggtgcaacaggcgcaaccggagccgtaacgttggcttttttcgggttggctttctttttcttagctggagccgcgccaacttcgacgaaataacgagcttcccacgaacgcagagagctaaaagtcatttccggagtatgctcaattttgaaagtatctgaattggttttcgagataatttttacctcgttattcaggaatttttcgatctgtgtcgcctggatagtgtttgcggtgttagatccaccgtgtgaattggtagtaaacccttcacggtcaaccagtttgtaagttttaccaaccacgaacgttttcagttcatttgcttgaactgtccacggacaagaaccgcgccctgtattacggatggttttcaggggaatgttccacttccagcagtagttacgcgcttctttacgggttttgaaattcaggatcatgatattatctctcaattaaagttaatcgtcatttacgatgtggtaagattaccatagttacacattaggtcaagcaatatttttaatttctatcgaatttttagcgaattcgatcatacgttgattatctgaaccgcgaaacggctttttagttggtaaatctttttcatacttaccatcaatcagaacatcaatgtaaggaagtagcttagaacgttctgggtcggcctgtaaagcctccagggtatatcctgtccataaccatacgtttttctttggaagttccttagaaacgcgctcaagcagttttaggatagtaggatagttgtcacggtaaagcggatcgccgccagttaatgtaagtccatcaacatgcggattactcaacagagaaatcagatggttttctgtctcttccgtgtacggtgttccgttgcaagggttccatgaactgcgattatagcacccatcacacttatgattgcacccggccacaaacaaaacaacgcggatcccttttccgttgaccacatccatgttataaattctaatataattcattcaaatctccatgtatagcctttataactttttatttcaccacgacagcaagaatgaaccttgccttgactgaatccatgattgcgtatatcagttttgccgcacagccggataacaattgacggatctttgatattcgttccgatagcaactttcacaaatctagctttagaaactaaacagctttttcgtgttttctcttttgtttcttcactatgagaatatcctttatgggattcactcatttttctacgagattcaatagaatatgttcttccttgtctggattttatcattttttctatagtttcaggagaatgctttcttccagtttgattgagaattttattctcttttgcagttttatactgccttgctgtgataggaaacccacgagaaaatgacataatccaaaatgcgttatgcatactaccgccatatattttagacagaagatgatgtgcagtataatgctgttttggtgtaagatatactaagttatctggttcatcagatccacccattgattttgggtatatgtgatgaatctcgtaacctgatttcttgtgtctgtaagatattggagattctcccctatatttcgatatgagagaatcgtatattttttgataattcatattgggttccatgttgatttacatggttatttattacctttcttcacgaggatcagttctttgatccgttcaacaataacgatgtattcccatttagctaacttttgggtatcacaccacttttgaaactctttcatagcctctaagtgacctttactccagtacatttctgcaatttcgttgcaaagagtttcagtagcagtgtttttgattttcataacatcctccttagttgacaagaaagatgttactacattcagatatacaggtcaatacttttatggataatattgaatgaaaaatgaaggatgtccttcgtagttcacatcaacagcaccaattttaactattgcatcgcgacgggtagcctcttcaacaatctggtcggttaggcttacaatctcacctgatacccaatgcaatttgtgttccggatctgtagccccacagaaaaacagttcaatttcgttagcttccagttcacagcgtagatagttcaaattacgtgaatttgttttgttgaaaatcataatattgcctcaaagttaaattatcgtatatcatcccgaatcgaatcaagaacaatgtaatctatcccattcactcgtttaccactgggtttacgatagcgaatgttacggcctttcatatcagttgcttttgaaatgtagaatgactttgtttcacgtagccattcactccattcctgatatgaattcccgacatttcgacgcactttagcgtataacggaaacatcacaaagcctttaatttagcaagggtggatttatggatttcagcctgtttttctgaatttttcagattgcgttcagcttcccggatcaggtaattccggcgagagcgcaacaagttgagaacatctttcgctttacgggcgcgtttaccgaacagatgacaagtaccgagattgtcaagcatgttcaggagatcatagatttcctttgcttcatcttctttcggtaataacggtttctctttaacaacgtgttttttgaataattcacgatcgctattagtaaaaatgtaagattctgattcaaactttgtaccaaagtaatcagtaaaccctttaacaccgaatacgtcatactcagtaactttaataggaaatactaccttagacaaatcattagccgaaaacgaaccgccacgaatagctaagtttcggtatgcagtcccaaagcacgtatcatcacgaaaaacaaacttatcttttgcccaatacatcataaagccctcaattttgcgccgctaatgagaacatctttcatttgttttgcggtgcggatagtagttgccagttctaaagagacatcattacgatatgctgtgccgtcttcacacagaaccaaaccaggacggcccttgatagggttgatgacttcaacgcgagttggatgattttcaactttgtagcctaatgcaaacgcacatgccactacatcggtcattttcttagtcagtttcataatatgtctcctttttcgataggcccaatataacaaaagccctcaaccgaagtcaagggcttttttgattaattttgatgcttaatgcgatgcatcatttctttgttcttaccttcgttgaacccacggacagcaggagcacccaaatagccgcatgtacggcgcgtgacgctcattttttccggatcatggttcccacaatgggtacaatgaaaaccgtcttctgttggcttaaattcatcatccgagccacattcaaaacatttatcaaccggaaggttagttccgaagtagtccagtttatccattgcataatcccagactttttcaagggcttctaggttgtttttcatatcagggaattctacatagctgatatgtccagcagttgcaatgtaatgataatcggcttcatagtcgattttctcgaacggtgttaccttgcggtcaacgtccagatgaaaactgttagtgtaccagcctttatctgtgatccctttgatacttccgaatttctcatagtccagtttgcagaaacgatgacatagagattcagcaggggttgaatacagactaaacccaaatccggttttctttttccatgcttcggtcgcagcgcgtagatattccaggatcagtctacccatgttttgagaaccgatccggtcgaatgggtgctgtccagatccgaaaagcatcagagtttcatgcaatccgatgtatcccagactgatagaactgcgtccatttttgaacagttccagaatttcatcatcgggtttcaaccttacaccaaacgcaccttctgtataaaggatcggggctacactggctttaacacctcttagactatcaatacgggtcatcagggcttcaaaacacagttccagacgttcatcaaggatacgccaaaatgcatcatgcgcgtcttcatcttcctgtgcttcggcttcaatcgcaatacgaggaaggttgattgtcacaacgcccaggttattacgtccatcaagaatttcattaccgtgctcatcattccacacgctaaggaaactacgacaacccataggagatacaggaatgctagagccagtaatacgacggttattagccgcgctaataatatccggatacatacgctttgaagaacattcaagggccaatttcttaatatcatagtttctgtcttccggattaaggttaatccctttttccataaacataaccagttttgggaatacaggagtaatgccctttttacccagtccacgaatacggtttttcagaatcgctttctggatcatgcgttcgcgccaaccagtacccataccgaaagtgattgtgacaaaaggcgtctgtccatttgcagtatgtaaggtgtttacttcatattcgtatgactggaacgcatcgaatacatccttttctgttttttccatcgcatactgttttgatttaggaaccccataccaaacagcatctttaaagtgtttgttgtacgtcatttcaacgtaaggggccagcacctgatcgacgtttgcaaaggttgtcccgccgtactggtgagaagcaatctgtgcggtgatctgcgccatgagagcggtagcaacaccgatcgatttaggcggttcgatatccgcgttacccattttgaaaccattctcaagcatacctttcaggtcaaccagacagcagttagtgtaaggggtgaacgggctgtaatccagatcgtgataatggatgtcaccggaatcatgcgcttctacgatgtgtttcggaaggatatgattacgggcgaaatgcttcgccacaatacccgccagcaaatcgcgctgtgtcgggaatacccttgcgtctttgttcgcgttttcgttggtgatctctttgttggacagattcaccatgccggagatatctttgaacagtttacttttctgctcacgggcaatatcgcgatcgtggcgatattcgatgtatgcacgggcgaccgctgggttcgttttcatcagggattcttcaacgagttcctggatacgggcgatcttcattgcgctaccatcgcggatctgattgtactgaaccagcatgattgcggcatcagcatccgtcatagtcccgccagctttatacacagcgttgcgaattttttctttatcgaaatcgacgtttttaccgtcgcgtttttctactttcatttcgttgccttatggataatatctaaattgtgtccaatctcgttaagatatttgatcagttcaaccccgtcaacaggtatatcccgtcctacaatctcaaggagttcccacatatcaataacggtgataggagaaaaattagtcaatgtgcgaccgcgatcatcaaacatcgttcggtctttcggtttgacataacacaaatcagagtcaccccttccaagcatccaatcatgtagagatatgatctttttgtcagtggaggatatcaacatcatcagctttttcttctgttgcgttgataatcgagcgtttagatatttcatttcgttgccttcattaattgctttctatattttgcggttaaggctttgcgttcgtctttgtcggcgtactcgaagcccatagaaaccatttcggcaatcatatcaggtttggtaagtcttgaaaaccattttaccttatctggtatgaatttgtcatgaatacggttttcggaataatcttgtttcagatatgcaagcaggttttctaaccactggatgtagtcaacatcacgggacacaagaccggatcggttgaatttgtgcttcacgataccttctgtaccgttgcataggttgcacagtaggccgcgcacacgtccggcgttttcgccgtctaaagcatggtcatggtcgaggtgatgtttttcgatctcaccctctaaagggcgcttgcagagagcacaacgccctttttgtttttcaaagagggcttgtttgatcgtgggatagtcttttttggtaattcgtttcgtcagcataataacaccattcagtaaggtgtcattatttattacagggtgcggacgtactcacgaagttggtcgaatccgcctacgtgtttcccgtcatggaaaatctgaggcatggtcatccgtcgcgtaccaaccagggcttcgagttcgtcgatcaccgcttcgttcaacacgggtttgccgtcttcaaccgaatccgctacagacacgaactcatatggatgttttttcgcgtccagcaaacgctttgaattcaggcatggagcgcaattgtaaacagaagggatataaccaaaaatcttaaacatatgttaccttacattaagtcatccagtgtttcagggtatgtatttacgtcgcgtttctggtagttgcacacgtagacttcttgcgttttattttgttcgtaagaatcagtatgctggcctaacagatactttttatcgaggttatgcacattatatttttgcatccactcgatcaggatatcattttgttttcctgcatgatgtgtcacgtttgataaaccaaacttgataccattagagtttaaattatcgagaaaatcatataattcatgctctcgttcttcgttccagaatttgttataaactgcatcagtgatcaggtacggcggatcgcagtacacaaaatcattcaaacagatatcaagatccttaaatgatgcgctagagaattcaattccccgaacattgtttttgaagtgttcaaaccgtttaacggtagaatcattcaacgttctacaaccaaaattggcgttaaaatcgcctttatcgttggttcgattaacattactaaacgaatgcaggatcagaacatagagccatagcggatccttgttcttattatatgcatcacgaaatgtgagatacgcttctttctcgttcttacccagcccatgttgtttaatcaattctcgcaccggagagaggtcaggaagcatttgaaggcgcttatacatatcaatcaacgtccgatcgtaatcgttgcttagaacgggtttagggacgtttagggacacactcaaaccaccacaaaaacagtcaatgaatcgcatatagctgtttctgtctggaaataatttgaacagttcaggaagtagcttttgcttgtttcctgtgtatgggatcacaccataataactcataattcacaaagccctttttcaaattttgcaatggtatcgtacttgtaaccacgattcactatgaagcattgagtttcacccaatttattgatcatgtcaatagctctttgttcgtctttcttacctcttaactgtaaggcaattcttacgatctcttttagtgtttcgtcgttgatttcttccagtttaaaggaatacccagcgattttagcaaaaagccccttgcgagctacaaggggcatattgtcatagaaaatcacggttcctttgtcgtttttgcggatactaaatcccggcacggttcctaatttcctctaaagtgtcacgggcagtaatctttccgttgacatagtatgtgatcatagcatctttccagccttccggcactttctgttccagagtatcaatggttttaaagttaacaccatcagtgatagtcattaacaacccttttttactctttttccattcagcgccttttggacatttatacacaccagtccacacaccgttaattttgattgcgcacattttcatcgcatatttttgagtgtcgcgggtaacttcttgaagcaatccgccgcccataccaaacgcgatgttttcagacgcccaacggttagactccatccagttcaacacccgattgattgtttcagggccatgaatttcatcaccttgaatgatccttactgctggatgtagtactttatacccttttgagttcactgtatagccaaagatacggcccagttcttcaagagcgtacatgatattatctaccatatcaccagaatccggacgaactaccagagtaccgcccttagaaagaatcgaatctttatattctgcgatacggcgaaccgccgctttaaaatcccaggaatcatacacacatgcatacatcccttcgccgaagatctcaatactgtttttgtacgcaaggtcttcgttttctttgccgtaagaaacggtagtggaatgttcgcgagcaggaattgaaataccagccgccatttcaccatcatcaaacgctttctgacaatcttcaaacagagagatagccataatcagcgcttctacggtatcagtaccgaggaagttatacaggtgcgcgaggccaccaataccagcggattcagcagaagaggttccacgtgcgccgaagtcatgcaaacgggtacgtaacaccatatcaaatgcttcaccttcgagatcagaggttttcttgagatatttcttcaacacttttttacattcgcgggatagagttgctacggttgaagggaaccatactcccctgatcgccagggtttctacgtgtcctgctaaccacagcgcatttttcccagcgtggaaagttgcaaccggatttttaaccgctactggggttccttccggaatcgctctgaattcaagagggatgtaacccagttcagcaatttctttccaacctttgtagttgaagatttcgcgcccaaagtgcattttgtacaaccgattagcaaaatctacgttttccatagtcaccggacgtgataggatttgcgcaaggcggttacagccagccgtaactacttgatcaaatttaccaccacgagattcaatataaaacagcgcctcttcggagccagttggatattgcgaccagtgagaaaccttataggaatctacggaagtgatgatgctgttcagttcttcgaaagttttgttgttcataaacgtactccacgttttaggtttattttaaaatacccgatccagtcgttcgggatggattgtattgtgatatttagacttacaatccttactggtttttctgccattcgaacagaaaactttgtgatacgttgtctttgtgtgtttttctttgcacacagggcaaacaatcacagaacctattttagcagccttagccacttcatacaagttctttacatcaatttgtctttcttttgtgataacccgaccacggaattcagcaacaacagtttcatcacgtacagaaccatcactatactgaactttttgtttactactttttcgtttggatcctgatatttgagaggaacccgataaaagtttacggagttctaaacggtctttataagcaccacgattaacgcagaaatattcaccgtcttcttcgtcatcaaaatcagcccaatcttctaaagcctcagcttcatcgctcataatggttccttagaaataatctttgttgctcaacaggtaaacccggttatcgttgtagtcaatgtaagcatcccaccaaccagcacaatcaacaccatcgacttccaacgcctggataagaacactacccgctacgttgtcatattcgtacattgcatgtaattcatccagcattgcttcaacattggcccgtaagcctttaccattgttagcaacaccttttgcttccaggcagtatccagcataagttgctttcattacgatttccatgatgtttatccttctgagttagtgtcttgtctacgggagttagaatactactataaccaacccccgtcaacacctttttaccaactaatgtaaaaagtgaattcacttacacggcgatctgttttcctttcaggaattttgaaaccgaacacttcacgttcttcctggtttctatacgtttgattgtacttactagccagagaatttgtgatcttagcggcgttgcgtttttcttctgtatcgaattttagcccttcttcttccaaccattcagaaactcgttggaatgcatagcgagtacattcaatacccagacaagagccgatatcgtgcttcatatcatagataaggttttgttgtgtcgcgtgtttcagaacaccttttgtgattgtatcccgcgcatgttcgatcatcttagcattctgatcgttgataatttctcttgctcgttctgcgagagtgggcgatcggccttctactggagtttcgccgtcagcaccgatactacgtacatgaatcatattttcacctattgcgttattaacagcccatctttcgtatgtttcacgaagtaagggcgcatgttcaattaccataaaaaatccaacgttgggggtttgatattgatccctaacgtatcacacacatcgttcaatacactttctttgaagagattgaaacatggaaccctgtacaacctagccaatcttacagcgatcgcggttccacctttaacacatccttcacgttcttccgcccaaaataaaacaaaatcagttggattgtcaagattttcacgaagaacttgaatcgtgtttcgcgcataccttctttgaacgtattcattctgtgtatcgaagttacctgctacctttctggcttcgtcagcggctttctgtgtgtttaaatctcgaaagtcgatgatatcctttccgtttgagaaaaggccgttaaacccgttctcaggaaggattatacacctgttatccggactatagtcaaacagaaaatgactatccataccaggagcgccgccagaataagccctgatcccgcgttcgttcaaagcacgtccgattttaacagcaatgtttgcgatacgttcaggaggtttacgactgccaattaatgttactgtcttggcagttttaattactgtactaaaatcattcgacataaaaattaccgaacaattcttttgctttttcgttgtaaacttcataagccttttcagggttatcatatgaacctagaaaaatctgcttaccatcaacaactattcgcgcttgatagttatttcttcttttatcaaaaataacccctctttttccagaagcattgcttcgtttctttatctgctttcttatgttctcttgttgcgttgcctcttgcaaattatctataccatcaccaaattcaacaccattcttatggtcaacaagagcgggaagatacccattagcaacataaaagatgatccgatgtctgcgataatgtttcttttgaaactttataacacaatatccatctttcatagtaccagcggaatcgccaaccctcctaccttgacgcggagaagaccatacgatatttccagaagtaatatcaactgaaacgtattgaaggagttctcttattgcggctatttcatcagaaatacttctatagtttccgtgactgttcatagtttaaaattcatggttcaggattttgccccatacagggcgaatcatgttttgggcttcggttacaaacagcttcttagccattgctgggtcttcgaactgttcgaggaaaggcccgtgattacggctgatttcttcgatagcatcctgaaccgttaagcccataatgcgaccgaaatctttcgcagtgatcgaagccagatccagtttcgaaagaacgtttttcacacggttctctgtaaggtaacaaacaaactcatcgagttggtttttgtctttttctgacagtgaaaccggagcattaaagcgggttgctttcttcgctttcttctcagtgaatttggttgttttgcatttgattgcaacgcgttcaccgtttggcataaaagcaggtgaaacaggtttcattacaaaaccttctgcaatgttgccctcttcaacttccatgataggatatacgaattcaccatatactgtattatcgctaccaatgccgctatttgctttattcacaacagattcaaacgtgatcggcagttctttgatctcttcaaaagtaccatatcccaacagcggggccattttcaggccatgagatcgagagatcagcgagcacaggttatccggaaggaattcaccatttacacggatatcgaatacgtagaaatctttttcgccgtaatcaacatctttctgtacaccgcgccccgcaaattcaccgtagacttgaataaccaaatcatcataagttccggtctttttgagggtttcccacatcttacggatccctggggaatactttgcaactactgctgaacagccataaaaatcttcggctggcttaacaacatcagtacgctttgcgggggtaacggtaataccgtcatcggtgataaaactaaagttagcaccgtggatcttttcacgtgcaacccacacaccgccagtaagcccgttcataattacaccattgatgaacttaccttcataatggttagtcagagaagaatatttcttaaacataatttaacctttcattttcacacgtttttcgacttgataaagtgctttacgcagcaacttcacttttacttcatccagaatgacatcacccttaacgaatgcatcaagctgtgatttttcggcattagcggcgttgataaccgctattgtattttcttgtgtatatcccagacgtggattaatacgttccattgtacgggcatatgggctacctggtttattgctaaacatcttgccggaatactgacaacgttcagttgtcatcaacactttccaatcttccagagtaaggtcaaaagaatggttgttctttgcggcgtgttcatgcttgagattatatgaacgcgcaatacgcaaatccagttcaatagcagacgcacggcggcgatgctcgatgagttcagggctaagggccacgatctcaggttcttttgctttacgaaccgcttctacatcaggtgcggcttgatttggttttacgtttgaagtagcaatactagcccaacgatccatcgcagatttacgcattagataatccccgcatcttgaaacgccagcgccatagaggtgttaagatgttcacgtttaaacggacgaggtttcttttctttcttcatcggacgtttagcacgttctaaattgtacacacgcttacgatggatttcgatcgcttcgcggcgcattgcatttttaacagggagatttgcagaacggaacgcgcggatacgttcaatttcctgtactacctggtaaatatcgccgttatctaacccatgttcacgggcaatttcggcataacctttacgcaaatcattgaatttgaaatgaatttgcactttttcagcttgagacagttcggaaatgctacggtgtacaattttcatattattttcctttggtagaatcgatttttgcaactacattcaacacgctatcgtttcggctgtcaacattttttagaacaaaagttactaccgtatacactccagcgctcatgttgaaattgtcaacaaacgggatctgctgatcatcaagagtattaaccatttcttccatgtcatttggatggtcaacgttgatgaagatactttccgatacatgatttttgtatcgggttccaattcgctcatcgagttttttacacattacatcaactaacatttgtttgtcaatgcctaaaacaccagagtagatcacatgatatagtttcatacaatatccttttccgattcattaacaattgcaaaggaaaggaatgtaaaagcaacccctaacccgaccatccagatagccgttaaatcaccatacattgatgaatacgcgcccatcacttctaagcgatatcccagcaagaaaacgagatacgccaacactttatcattcataattcctcacaaaacgcccatgctgcatggtaaacgctcgcgcctttgtcttcgttcatgcatacaacatcaaccggacacacaaccctgtacagaacaggatccccacctatagaacgtgcggcccttccagcatatatacgagctaacccgatatcagcggtaaagaaaacacggtctaaatttttctttctgcctttttcagacagagtatcagaatcacagggaggcaataacatgctttcaataccagcagcagtacacgaaccgtgataataaacaacgttttcatttctgcaatgtatcgttttcatgtatcctcccttaaaaagatgcttacattatatcaaaggcacaaatccatgcaagaaatttctcgatctacatcttcttttgtcttgttgacatacgccaggtattcatcggtatacattttccgctttttggcgattctttcagcagccgcacacatttgagcttctgacagtttataaggcaacctttctccaaatccttcaacagttagacgaacgaaaggaatagcagaagttataatgtcattaccataagcataaccatttttagcaaatacggctttgttgaatcgttcatggtgtacgccttcaacctcaacctgatcgccatagtaagcaatagtatcaatgcgatggttaagaatgatagcaccagattcaatgattttcagtgcagcggcctttccttgttcgcgagcataagccacgatttcataagaaccgatatctatagcggaaccatgattaccaacgatgtaaaacatggaattaattagatgcttagagatataggcatacgttttatacatcggatactgttcattacgcagacacataccagctttgtattcacgtcgtaactgcataagggtttgaatcacttcatcaatacgccagccgttagggaattctgcctttttctcacgtgcaatatggatcaaagcgtttccatacatcgcgttaaaagtcatgatccggatcccttcaacgtaaccattgatcggggcttgccatgtgatagggctatacttcggatcgtggtcagggcgcattttaggagtatggtggcgacggaacccaacatgagccgcaaaacgatcttcaatttcacgggagtaatagttgtaagaatccatgtcgcggtcgcgggaaaattctgcaatgaagcgatgtaaattgattttcatatcgtataccttatggtttaaagttcttccggcctatccgtcgaacaccataaccatacaccactgtcagaaatcatgtcaataaataatagaaaataaactggagaattttacatgaagtcatttaaacaattcacagaaagcaccttaaccgaagcgctgatcaccttcggaggccgtgcttatcctaagttcggtcaggttgttattcttgctggcggtgctggttccggtaaaggattcacactggaaaaactgctaggcatcgaaggtattaccctggacgttgacgccctgaaaaaacttgtaatgggtagcgataaactcgcagcagagatcaagaaacaaacgggtcatgatgtcaaaacaatgaacctcaaaaacccagaaaacgtatctaccctccatcatgtgatcgccgacgttttcaacatttccaacaaaaaccaaaaccgtgtttattccggtattatggcagcaccagaagatcgtaaacctaacctcatctttgacgtaacgttaaaaggcatgagcaagctggcaagcatcgcgcgtgatgtcgaaacgctgggatacaaaaaagaaaacgtacatatcgtatgggttatgaacgatgtgcatattgctatgcagcagaaccagaaacgcgatcgtgtagttcctaaagaaattctcatggatacccacgaaggcgcggcccttactatggcgaagatcctgaacatgggtgattctcttaaacagtatatggacggcgacatttggatcagctttaacaaagttggtgttgatagcgagatcaagaaatcaggtaacaaagggatgtttgttgttaagtcaaactacatcaaagttaaagcccgtggtaagcctcagaaatctgtagctgaactggataaggaaattgtggctaaagttgcagcatacgcaccgaaaactgacacttggggttgacattaatgattaaacattatagtatgcatacacaaactgaggaattgatatgaataagtttttctttgatatggatggtgtattgttcgactgggaaggttcatttgtgccaatgtatggcgaaccctcgatgatgacagaagatgagttgaaaaagtgcaaagcaaaaattgccaaaactgatttctacgaaaatctggaaccaatcaaagaaggatttgaattattccatcatttaagaacacttggtgatgtagcaatactaaccagtgtcggtaaattcaattctgacggtgttgccgaacaaaaacgtaaagcattgcaaaaagtattgggttacgttccagaattccactacgttaaaagtagccatgaaaaagcagcattcgctggtaaaggaattctatttgacgatcgggcaaaagcggtgttgcctttcagaaaagcaggaggtaaagcaatcctctttgttggtgataagaaaacagcgcttgatgaattaaaaagattgtaaaagaaagggaaccattgcggttcccttttttgttattgattagcctttgcaagcgcttccgtgactagctgaatattttcttccagtgtttccgcaaggaaaataccaggaactttattagctagatgagaattgttccagatttcaagatgtttctggttgcgggaaatcagaacaccacgataggcgtgttctgcgaactgttccggatagtcaatgcgactaaaatcgagacgagagatccccagttcagcgcaaatcttatctgtatagttcagtttttctttcataacccaaagagggctgaccgcttccgcgcgaagcagcaaagtagcaggatcaccgattcggcgttggaaactccattgaaggaggtcgatcccagcctgaatacggggaaggtttttataaaaatcagtacgcaccaaagaagccgccatttcgtcatatcgttcttttggcgttccttccggacgtacaccgaacttatcataaaaagcctgagaaaattctgctaaagtgtcgtcgaaatcaaaaagaagtgtattcattgtttgccttattttattgggtcagtaactggttcaggagcaggagtcaatgacaacagactaaccagtttaccattacgagattcgattacatgaatatcaccataatcttcaaacgcctctttcagagtatcaaactctaatttatatttttcttccgcataatcgcgccagtcgtcgcctttctcaaaagcatcaacgataatatcgtatagccagtatggaagatatgtaaaactggtatttctccacggaataggatgaaccgtagtccatttttcagttgccatttaaagcctcttagatttcactcattttatgaatatagccgtttcgtgaatcctggatctcacattcaccattttccacgaacgctttcaggatcgtttgtacttcctcactatacttgtaatcagcataatcagttttccaatctttaccctgtgctttctgatacagaatttcatcaagtacccaataaccgatcggggtaaagctggtatcacgccacggaatcgggtgaaccgtccatttagaaacgagatcatcagaataagtggtcacggtgattgtatctgacgtggtttctgttgctgattcttcatcagcaccgtgttttaagatcagggtataatcgccagcagttgtaccgtcaaccgtagttgtgtaagtatcggcggtttcgcctggaatatctacaccatctttttgccaacgataagccagaaacacatcacccggatctagttcagtagtttcaacctctaaggtcaaagtttcgccaatcaaaagttcggttttgttggcgctaattgttacagaaggaattgccataaatttaacctcttatgtttattggtatttatagccggagtattttaccgttacacgttccgcatttgtcgtagccgttaacacgtccatatccattacattcaggacaaaacggagtagtaaccccgaaaatgttacggatcgcataagtggattgttcttcggtcaacccaacgaacccatcagttttaataaaatgatctttttgtgaagaaagcatatcggtatcatcatcaagaatgagatagtttttacatccgaaagtatcgatccatgccttgatttcatcgccacgcattccagtgctatgagggaagttagtgcaagttttaccaatgatccgatacaatccccacggataaaatatttcacgtagattatgggtactgttgccgattctccacgtagaggaaatgacgatatcacaattagcgtgattcactatccggcgtaagtgtcgtgcgcattcgatgtccatatgttcaccaaatttcatgcaccgcatattatttagaacgccatcgatatcaagaaaaataacgttaccaatctcgttaccatcgctcaaatcttttaaacattcgtgatttaagttcatatttcacctaaaagaaaaggggccgtagccccttgttaatcaatagaatccgcgagcttcattatccagtctacgatctgcaatcatatgagcttccatttgacgagatacgtaatcaggatcacactccattctttcttcttcgtagttgtcccaggtatcagcaacccatttagtaccgttccaacgagcataaccaggttcggcatgagcaggataatttgcttccgcagcgtggcgaagtgcttcaccaacagtgtaataaggagctttagaattgacgattttcttaacttcaccattagcccaaacaaacagaactgggtagtaagcatttttcatcatgttcattttgtatttccttcttcactgcgagagacattcccccgccttcgaatacaaatatactcgaacagcagggtaaggtcaactactttttaaaattattttttgaacgtgtcgaactggctgtttcttgtttcccgtacagtaaccatcccatcacgatgcatgtaccatgccagcgacttgagggtttgacgcgctgaataatgaggacaaccatcagggtgcttataccaatccggattttgtttcatccaatcatagatccaatacggacacgtataaaagccagtattcgaaacagagcggcccatcatgatgatagacggggtaaacccttccatccatgccagttcatcagaaaccgtctcagaatcacttacagtagcttgtagagcgtcaggaacaatttcaatctggtctgcaatttccggagcaacctctttaacgtaatccataaaatcgttagtcacatcaataacaacatcaggaacggattgtttaccttcgtatgtaacaatttccggatcaggggagtcgatcaacagttccggcttttctgctggtacggcagcttccagatcagcaagcatattttcgaatgacttctggcggttcagtttgacatcaaacgtttcttgcgcataggtagcaagctgtaatttggcttctttttgttctaaggctttgaaaccttcaaccttttcgtaatcaatactcattgtagttctccaatgtttatcattatttagcctataaatattcatataaaccgtatataggatacacatagtggatatcgaagtcaaattccttaacactagtcatgtgcagattcaggcagaggctaacatagtctatgaattgcgcgactatttcagcttccagccgccaggttatcagtaccaggcaaaatacaaatatggtggatggaacggctacatatacttgatggactataacgggaaactgccctacggtttagcctatcttgtaacaaaattcgcggagtctcgcgggtattctatctggatggatcctaagatccacgaaacagaagaaattacccagccagattttgacaagtggttagaagaacacccagtatacgacggaaacaagcaaattgatccgtattggtatcaaaaacaatcggtgtttcatgcgattaaaaaccgccgtgctgtgcttaacctcccaacgtcagcgggtaaatctcttattcaggggttgatatctcgttggtgtctggaaaattacacaggcaaagtactaatcattgtcccaacaaccgcccttgttgatcagatgatcggtgatattgtaaactatcgccttttacctcgcgaggcaatgcttggaatacgttcaggaactgctaaaaacagtaatgcattgatctacgtgtctacgtggcaatcggctgttaaaatgcctcctgagtggtttcagcagttcatgtgtttgatggtggatgaatgccacaaatcaacaggacaaagcatacagaagatcatcaacacaatggatcagtgtattttcaagtttggtctttctggttctctgaaagaaggcaaagcaaacatgatgcaatacattggcgcttttggtcaaatcttcaagccagttgatacaaatcgattgatgcaggaaggtcaagttaccaaccttcgaattaataccatcttcatgagatacaaagaggatgagattaagaaaatgaagggggccgattaccaaagcgaaatcaagtatataacatcgcataccaggcgtaacgcatggatctgtaagctggcgttgaaactggcaagggaaaaagatgaaaacgtgtttgtgatgttcaatcagatcaaacatggtaaatggctgtatgagcaactcaaaaaggtatatgacaacgttgtatacatttctggggaaacggggattgatgagcgaaacgaaatgaaacggatcgcggaatcaacgaaggggctgatcgtaatcggttctattggtgtactgagtacaggtatttctgtcaagaacctgcatcacatcatcttcggacatccttgcaaatctgctgttatagtcaaacagtcaattgggcgcgtactgcgtaaacatgattctaaatctcttgctactgtttgggatttggttgataacttagcaacgctggcaaagtccaaaaatgctaaaaataaatattcatacaaaaactatggtatgaaacacgcaatcgaacgagtacgcatttacaatgaagaaaagtttgactacgtgatcaaacaaatcgaaatttagaggtcaaaatgaagagtttcaacgattttcgactttatgaggcggctattgatgatttcatgagcaaggtcgcctcttgccgtactatggacggccttaaagagcttgaaaaatattacaaaaatcgtgtaaaagaagttgatgttgcgccgtcagacgatatttctatgcgcgatgcgctgaaaggtcgagccgaagaattaaaggccgaactcgaaagcggagaagaagaaaagttctaaaaagaagccccaaccgaaaggaaggggcttttgtacatttgcttaacgccagtgctgtactattctggctattctattcacatgcccttgatcgaaggtatattatcaatcaccccgccgaaggtaaactccatcggacggcgcaaaagagtacgcctatcatccagcattcttttatcaagcccctttcgggtacgctagtatttatgcactaaaaatcaggatgttcgtcagattctaagagatctggacgttcatcacgatctgtaattccttcaccgtatccaatcataagatcctcctacagcaacatttgaacttcattcagatcatcggattcgttgatctcgccgctttttgttttttctgcgatgtagtcagcacagatagtgctacacacgcgcccggattcagtcacataaccagtagaaggaaccggacacttgcacactacacatttttcattttcagtagacattatgcaccactttctaatttacggatctccagcatgtttttgatagagtatcctttgtttttgacgatatccagtgctttactggtgaaatctaccaccatgtcataatactggatcagtttgttggtttctacaatcttcggatccccagcgatcgcgattttaatttcagtagtcccagtatacaccacttcgcacatttctttgtcatgccttccggtgtagtacaacatacgatccttcacatcagcttcttttttagcatgaagttggatcaattttttcttagcgtttgaatggtatcgaagccatttagcccaaatcttcgggatatccgctgattctgattgcaacttgaggggatctatcagcatatccttctcaagttcattttgcagatcttctaatttcaaactcataacatactcaccaatttacccagttgatctataatatactatattaatttgtagtcaaattttatttgatctaatataatatattattaaaagaataattatacatgatctaattaataaaatcaaatttatttttacttgatttcaaaaattatttgatctataataattataattaataaattttatcataaatcatttataaattcaagatctaatttaatattaattataataattattaaaaggtggagtaagtttccctactccacctattgaatattatcccagttgggttatactatcaacccagtttaggaagtttgataccaacaatctgactcattttagatttgcctgagaggtttacccagtcatcacctttcacaagtctttcattagcagcagtggtatacgggttaaccgataaaccgtagcgcatcagaatagcaactttaggctgtaaggattgaggatcaacagaaatcttgatcgaacctgcctgatcagcttctgtgtatggcgtatagaacagagagccaacatgatccatttcacccagatcgtacttgcaaccagtcagcaggtaatcaaacggtgtattggtgtcagtatagacatagtaaccgtttttaagtcgacctgttgctaacgggtgggtttcatcagtttcatgcatccaaccagacgcagacagaacgcttacaacgcgagaagaggccagtacataggtagcttcaaatgaagtcgttctattcatttcctgccccatttcacacactaattgatacaggaaacgacctaaagccggagcatcctttgcagtgtatgcggttgtagcatcgaaaatgccatttgttaccacaccatcaacgttgtaacgatgtgatacgttgatcagagtctggatgatatctttgtttacttcttcgctggcaacagtacccaaaacatcttcaatcacattttctgcgttgaattggtttgcttccagatcctgcataagttccacggtcatttcagttttgaatttgcgggaacgaacgttgatattccaacgatccatttcgaaagaagttgtactaatatcttcgctggtttcatattgacttgttggcgcggcttcgcttgccaggcgtaatttattgctgaatactgcgaccataattgcttcatcaatatcagcacctgcgagagttacgctatcagttgcttcgtatacgacatcgcttgtcggatgtttaaaaacttggcctttggtataggcagtaccaaccgcaccatttgaaatattatcgcggcttgcatacttaccggaataggtagcagcgctggaaaacgtcatatcgcctttagggttacgataacgcacaccgaacagggttgcggtaggcaaattagtttcctgaatcgctacaagttcaccgtagatcaggttgtttaccgcacgggtaagagataccagatctggacgggtattagctacgttaattgtttctgttccggttgcctcatcaagaacctttttagacaggccaggcggtagctgtgactgacgcaccagcttgttaattgtgtaaaatttttcactcattttatgttcctgcgtaaagtgtataatggtatttatgcaacaaatttccaggtagggtatttgtcgctattaatccgatattttaaaccagagtgggacatactaagggattttgccgcctccgatccggatgagtatacaactccatctatcgatacagaacggcctaatttcgccttgtgcgcttctgtgagaggtttatactctctgtctatacgtccattcatatatttagcttttaacgtctctgagcgcttcctgttggattcttcggactgtggtttacctaaacgggattgtctcatcttctcccttagttctggtgttcgcatagcctttgcagtattttcagaaatctttttcctttgttcgtcagaccaaccaatcaatgacataggagcacctttaccacctatgccagcattatacgtatctggacgatttatgaattcgagattgacgatctctctttctttttcatacatttcttcacgggtatcgaaaacatgtaatatttcttttacaaagttattcattccatatttcttttgtgcttttttaaccgcaatccctgaacccatgtatgaatcattgatgtcttctgttgaatgagcaccaacgtaaattttattattgaccaaatttgttattttgtagataatatgtttcataatatagcctcaatcgttttcactatttatagaaatgaaaaagggaacccgaaggttccctttaatatcgttatttttcaataacttaggatcaaagtcctttcacataaaccttgcggaagtatgcgtttttaccgaacatttctttggtaatcataccagaagtgatacggtcggacggagcctgagagcgagagttcgcaaacgggttgataccgataccgtaacgagttttgaagcccattactggctggaagttcttcggatcagaaccacgcagcggggtcagcgcaacatacggagcgtagtagataccagcatccatttcgttatcgcctttgtaacccacggtgaagtaatcaccacgtgcatactggtcgatgtatactttatacacgccacccagaacaccagcgaatactgctttagtggtgtcaacgttcagagtcttctggagaccttgacctgccggagtgataccgctatcgatacgagccagagcggaaaccacgttacgggaagcgatgatgaagttaccagcaccacgaccagtttgacgtgcgatttcgtttgcttctttgtcgatctgaatcagcagagctttgtagctttcaccagcccaacgagcgccacgaacatcaatcggatcctggaagtcaaacgcaccagctttagagccaacggtctgagtgaaaccagttttaccaacctgtgcggtatagttgatcatatcaacgatttcgcggttgatttccagcatgatttcggttgccagaatagcagacagttcggcgtcagcgtccataccgtgaacagcgcggagatcctgagccagttctacagagtactgtgctttcagttggcggctacgtgcttcgataacctgcttatcgatacggaagcccatttcgttccacgggttagagctggaaccgttgaagttctcttgcagttctgctacactggtagccataccaacagagatttcagccagagtacctttttcgttctctgcgattacagcagcatccagagcagccggattagcaccagttacagttacgttgccagaggtaacgttctggaagtatgcaataccagtttcctggaaaatgtggtatacgatagcgccagtagcgatcgctgtaccagtggtgattttcgcgaatgcagtgtgagcaccttcaccagaatacatggtatccggggcaaacatcggatggaatgcttcacgaacatctgccggagtaccggcagccagcggatctttgccgtacactgcgcggagagcgaacacctgaccagtagggccagtcataggctgaacaccgcagatatcgaacgcgatcaggttaggaatcgcacggcgaaccataccgattacagcagggccgatgttggtgatagcaccgcttgagttaccagaagcgattttggttgcgtcgtaaccgtggtcaccagcaatttcagcttccgccaggaaaccaccgaaggattcaacgattttctcgtcgcggtaaaccggatcaacttctgcgtctttttcctgtgcttccataatggcagcaatcagttgttttttggatttggtagcgatatccggtaagccttcctgagactccagaagatcgttccatttttccatcaattcgtttttcttagacattgtttcttaccttttgaaattaagaaagggcttttgccgcttgtacatatttattgatcttggatttctctgccggaacactttcaactaccggaacaaagttatctttcgtttgcggagtatttacagactcgtcaacgggtttttcagctttggttgctaccatttcaacaattgcgctgagtttattttcgaaggttgcggaatattccagcccttcaatcagagattctactttttcgacctgagattcggtcaaacctttagttttctctgaaactactgcattgcgtttcatttctgaaatttctttggtcagttcctgattcgcttcaaacagggttttaacttcctgctgattctcagtcagttcgtcttccagttcggcgactacatcaacctgttcttccggaatgacaacgttatgttcaaccagaacttctttgaggcccatgatcagggattcaaacagatcggctttgatgtcacgggaaacggcttctttgttttctttcagccattcttcggaaatgtgcgcaaaatatttatcagcatcttcgtacagcttagtttcgatttcagcggcacgttcagttacctgagcttcgaccagttcgtcggaacgttccgcgatctgggtaatgtgggattcagcgagttttgcagcgccagcttttacagcttgttcgaatacagtggtgaatgtcgctttcacgtcatcagaaagttcaactgattcgaaaatgctgtctaactcgaccggagtatccaggttctgggcttccgccagcagttgttctttaagcatttttgattttcctgttgttttgtttaatgtatttatagacctttcaaacgctcggacaattcccgaaaagcgtcatcagcactattattctcaacaagcggtttgctttgctgattttccactataggcttaacatatgcatcaggtgcgcttggcccccagacgacatcaacgcctacagctaatttaaagcccttttgtacaacgccgtagcctttgccggaatcggagagcttacctaatccacgggaagaaacaccaggaacccaaccagcacgaatcaacgccgccagtttgtcaccatcaccaccgtcgccttcaacaacaacagcgcggccccaaacatcgttacccttccaccacaatttttcaatcaggatgcaagcatttcgcggatccacattcgggcgcggagggtgattcatttcacctaatgcttgacgggtgttaacttgagttctaatataatcgttaactgcttcttcaagtacgtttttaggatacaaacgacggttacggttaaccttttcggcttgaaggaaaataccttcgatccgcaatttaccgtcttttgattccccaacagattctaaaatagattctgaaacgtcaccgcaaggtaaaccccattcttcgattaaaagcatatcgccgttttcgttgatttgggattcattcatatttatagccccagtgcagcacgtttacgcaatgctttcttgcgcttacgttgtgcgcgagtagcaattgacgggttagcacgttttgttttgagagcacgacgcgcgatctggcgacgttgggatttggttaatccggtagtctgatacgcattacgctcacgggttttcctgtctttgaggcgttctacgttgccacgggaatcaacatgcttgacaattacctcatcaagtgttaaaccttcaacaaccgccatcatagcaagggctaaatttggttcggtgaccgccaaattttcgatgattttaaccgtgccttcatcgatacccagaatatctacacgggctttcgcttcgtctaaatgttcctggagatcttcggcggtgatttcgatgtcaagttgcattacacacctcactcatcatctttatcggatttatcatcctcggctggctttttatcgccattttcgtcatctttatcagcgccttcgtcgtctttttctttgtcttcttcgccttcgatgcgtacagcttcggcaagttcaacgcgcaattcgtgacgaagcgcttctttgcggtcttccatgatggagtaaaaagtttttttagcttccaccagattaccgcttttgattgcttcgataaattctttcatcaaaagttttcctcttccgcttctggatttttaaaacgttcttcttttgattcttcttctatctgtttggcttcgctttgaatttcctcatcagacatccggagaacttctttcattacgtatttatgggagatatatttgccgaccaccccttcaagttgtcccatcaggtttaaacggcgttccaaaatttcaatatctttgatttcggaatagtaagaatcttgctgatatacaaaagcaatcttacttacgttttcatcccattcatcttctgtaatgattttcttcgcgatcaagttagtttttaacggatccgcaagaacagggttgaattgaatttgcaattcgcgaataaatttgctaaagttcaattcgtcgcgggtaataccgccatcgttacccaactggataccgccatcatcgcgaggcatacggcttaacggaatacgtaacgcttcatacagcttacggttaaaccatttaacatcgtcgatatcagagaaggcagtgccaccaggaagcgttgaaacttcggtaactgctttaccatcacgacgcatcagccaatagtcctctgtcattgacaggttattttgctgattcttaactttaccagtgctcgcgtcatatacaacacggttttttaagccctgtgcaatgttatttacgtactgtgtagctttagggccacccatctgacctacgtcgatatagaacacacgacgttcaggcgcacgggtaatacggtaaatcaccatagcatcttccagcaaacgcaactggttagctggcttgaccgcgcggtgcaggtagcctataatgttgttgtcgcaatcttcaaggccgctatgagcgtaaacaatcgcagagcgaggaatttttaccttgtcattgtgactataaatctgtccgttgtagctataaccgtttttcggtgcggtatatacgaagtattcacgatagccacggaaaattttaaccccaccgggtagggtttctgtaaccgattctcggatcagttccatgcaacggggatctaactggcgcaattctttgatgccgtcagcttcatttttgtgcatgattttatggaaatagatacgcgaatcaacataccaatcacggaataaacgagagcctcggttatcgaaatcgtgaatattcattacggtatcgagttcttccatgatcttatcttggatatttttactaaaattcgttttagtaagatccatcgtaacaatatcttttccttgttcattaacaatcgcttcgttaatgatttcagaaacagcgttttccacttccggatatgtcatgataccacggtatgtatttattagctgtgttttgttctgaattcgcggatcctgtccggaatagaactgttggaacacagaagaataacgctggtttgataagtccgtttcgatttcgtgcgccccatcgttatttttcggaggcgcaatcgaacctgtatcatcttttaattgggcttcaaattccatttcatcctgtttggcgaaatttttgaaaaaccctaacacattgtctaatccaaaaaagttcatttacaactccgaaaaataatgataaggggtattgctacccctgtatttatagcgtttaaacccaccagtctagcgcgaaagtacactcaaaagtgctcacttcgttgttgctatcccagtctaaagtaacctcaccaacgttggtcgggaacaggccataaatggtatgttcggcggttacttcgtcgttacggtttttctgtttaaccgtagcggtttttttgtagtttgcagggatatcccctgtaatgtcttcacccataccatgcagcatgtttgaccatgctacgattgcatcacgggttgtgtgtgcatcgtcgttatataccgtgattgtccagtcatcataggtacggtcaccagcaacgttaattttgcggttcatgtaacctaccggaactttttcaacggtagacgctggcatagtagcggctttacattttaatttaaagtttttgcccaggtacgggatctctacttcgaacaggttcggacgtgcgaaatcaccggattcaaaggcgcgtacaatatcagtaagcattttctaacctctatgtgtatttataggggcttttcagccccttacatgttatactgacgttgaaccaatcaactcatcgaaatccgcaccagttgaggttgctacgaagttcagtgtgatgtagttgatagaacgtgctggtttgacgtagattgatgcaataaactcattgcgatcaataacatccggcgtgttgttcgtagtgtcacaaaccacacggtaatcgtatacaccgcccagagcgcgaacgttagacatatactgtcctgcatccatacggaaggaagaacgagtgaaatcatcgttattctcaaacagtttatattttgcgttatcgccaatgtctttcttgatcatgttgaacaagcgacgaacgttgatacggtcaaacgggcttggaacagtcgttgcggttttatcaccgtacagaatgtatccagcaccaccagagaaaccagtaaccgcgttaatctgtacctggtacatagaatcgcgatgcgcgttagtcggttcgatagccagtttgatgcagttacgcagttgaccacggttgtagccagccggagacatccacggttgcgatacctgatcggtataaacacagaggccagccatatcacccgcgagcgggatccaacggttaacatcgttgtatttatcatactggaacttatagttaccgtcgatgaacgcataacttgaacttacgttcatgttattatcaactggggtagtattaccgattttgtagcctgtacgccattctacgaggttatcaacggcctgagccagtgggatattcaccagagcagaacgcggcggagaaacgaatacgacgcaatctgaacgggtttcaccgatagacacagcgtgtttctgtacagtagacgaaatttcggcagtttcgccagcacaagcacccgcaatcagcagaggaacatgcagagattcacgatctgcgaacatatcccaaccagccatgagttcatcagcgcctacagtggcgtttgcagaagtaccgccgcccagttccagaacgccggagaatccgacaggccagtttagggacgtaccatacagatactgcgaaccaccgtttgcaaagaaatcatccatgtagatcgttgaaccgtagatatctttatcacccttagcggttgacacgataaacgtttcttggataataccaccacggcgaacgataaacgcgtattggttatcattctgagggccaaagttcatcgaactgcgaccgctgtttttaccagacttaccagaaggataagacttaatgacagccgaagaatcgtatgcagctttagacagaatttcaaccgttacggtgctacccatttcgccaggataaattgcaataacagacggtagctggtatttagtgcaaagttcctggaaagcagttgcctgaatagtttcttttgcggtgtcaaggttgagcagagtaatacccggatcaacttctacgccatcgattgtaatcgtagcagaaacaccagaagaactggaaacgatttctgtagtccagccactagacagatccggatatacaccaacctgtttagcgtgtgcgatgatcttagtgctcggaatgaacacagacaggattttaccctgatcatcaacgctggtaacaacaccatcttcttcaataacaacgttattgtgtttaactttgatctgatcgtctactgcatagttagaaccagcagcggtgatcgtggttttgatctgattatagatcgcggttgcgttttttgcggcttctttatcgacgacacgaacaacacgcagatcctgaccgaactgtaaaaagtttacagcgttcatgaaataatcagcggtgtcattgtctggggagccaaaataatttaccagttcgacttcgttagaaatctgacggatctggtaagctggcccccatgaaaatttaccaacaatagcagcacgaccagttgaatttcgaacaacggtagattgtaccgatgtttctttagtttcaatgcctggagagattaaagccattattaagtttcctctaaatttatataaacgaaataccgtgttggccgacagatattgtttcgtcgccactcgttacgataacaggacataacatatcttcataaagcagttcgcgctcacgtgcgaatacctcatttgccaaccgcaaatcgtctttctcgcaaaattctgcgaatttcatttgtgttgttagccatgcaaagcaaaccagcgccataacgagatcgtcatggaaaccttcttccgcagcccacgaaacacctttttctgagaaagtacgaaattcaagtattgtctttttgttatttatgatgagtttatctttctctatcaagtcttttagggttgagcagccaatcgctttcgatcgtttactctgtttcatccccaaatcgctatagctatcacaaataacgttatcgtaatccaactcagaaaacaaagatttagccactgagtgacctgtgctatttagctcgatataaacccatgcttcgttgtacatcataagataacgtaacaggacatcaggcaaaataaggtgcgatgttttgtttgaatggtatacagcaacctgttcaaacggcatagatgtaatatctataatatgcatcgcgtgatagtcttgaccgcgcccttcggctgggtcgagtaccgcaatatatttatgtccctctactggagctttatactgatagaaattagtttccgtttcatcagtatcaacccatgatagtttagacaatttccagccagcgatcagggttccgttggttcccatgaattcagcacagtgttcctgtaaaaatgcttctttacttgaactggcgatcatcttcgaagaccatgaatagccgtcatcaaatacgccatcatcaccgtctgtatacaaacgctctttaaccgatgtccagatcgccgtgtatggcacgaagccggattttccttctatagcagcgttccagatatcatagaagtggttaagcccgttaggtgtcgttgtgataaggattttcgatttacgaccagaagaaattactggctgaatcgctaaccacgcatcaataaagtttggaataaacgcacattcgtcaatgtagatcattgcgaaggagttaccacgtaccgcatcgggagaagatgcaaacgcaccaattttacatttgttatcaagttcaatagaacctttgttccattcaacgataccaggttgcaagaaatcggggagaagttcaatcgcctgttttgtacgatccagaacttccgcagacatagaggctttatgagccaaaacgccaacatatttatcctcgttgaaacacacaaagtgtgcaaggaagatagcaacaacggttgttttacccaactggcgagacaggttacaggcaaccatacggtttttatgcatttcgatcagcatttcgcgctgatagtcacgcaactgaaccttaattgtaccatagtcaatgtgggtgatcgcgcaatatgtttcagcaaaataaacaatatcatcacgacatttaacccactccatcaacatctgttgcgtccatttcgtttggatgtacgcgcgtttcaggtttgggtttccgttatatcgagttttcttgtttcctttgtttttatacgtcgcaaagtttgaactgtcttttgcttgaatatcaactttatggataccgttaatttttaggtaatcgctaaactttgtcggataccattttttatcatgttcgctttgcgtccactccatcccaaattcatcaattttctttttcagataatcgggatgcattaatccgattgggtgatctgattccttactcggatcgatcgtcggttccatttccatcagggtttacctctaccgcttcaccattaatgaagccttctttgggttcgtatgcactaccatatttctgcattaattccgtaggggaaccaacaaatacagttgcattctctatgttcatttcattaccgccgccattacctttttcagatcctggttttgttgtttcttcggtaatttctcgcatttctttatgaattttcatcaatccctggttagaattgtttaactgattcatcagggttgtaaaaacttcaacgtgtctcggagattcagagtttttagcgttatgcaaggcaatttgtgccatatccatgatcatctgattcatgtaatgcgcggttttacgcgcaagtgcatagtcttcctctaaatcaggttttcgatctgctgggtgtgactcgacatcaacgagttcgagtttttcatacacaaccatttcttccccagtttcagcaccagggagattttcaagatcaagtagttgttttacgctaaattcttccattattggcccctcggtttaggaggttgatcaccgctaggaattgggatatcattagcatacgtttgaacgtattcttctcccgtgtaatcctgtataggcatatcaaccggatccacctgagcatcaacggattcaaaattgtctttgtccaacgggttcatattggaaaagaaatccgtgtatactgttctgatctcgcctttaatctcgttaacaggcggatacaggtagccctgtaattcaaacattaaagaccattcaatgtgtcgccgtgtcgttgtatcaccttcaaacgtggtatcaggggaaacagattgcagagatattttaatatctcggtctattttaatgtcgtttttatgtaattctgtaatacgacagttgaaatgcggctggaagtatggcagtatctgttctatgatctgaaacacatcatcttcgtaacgggtatacactcccagttcgaacatgagacgatacggagcagggttaaactgcgttactgtttttccaggtgcgcgtaactgcgtcattttttggtttaccgcgatccccgttttacgaattgcgttatactgcaaatcaacgagggatagattcatacgtggtaaaattgtttccgttttagcaacattttcctgactgtatgcatagttcagcttgttcatggatgccaggaatttttcttttgatgcgtaggtaatcggaaccttgataaatttttcttgttcgccgcgaatgcgtttaacttgcacgtgattgaaaagacaacccatcaagacaatataatttcgcagcgaactattataccagtagccaaaaattttctaatccccctgctggactcgtccagacttacaattatcaaagtgccagcgttttgctgtgttggcggcgcacattatcccacaatgggggcaagttaccttttctcgtttcttgcctttgtgtgcagcaacgaggtttttaagatgttctggtgacagttttttacctttatggacagaacttagttttttcttaacttcatctgaatgagtttttccataaaaaggattgttttcgccattatatttacctttcatttgttcttttttaactagtctcattgctttgcgagctttcactttttcttccaaaacctgttgttggtcttgttttgaaagttctgagtatcttttgtgctcataagtaaacatcatgaaaaaagcaagtaccattttatgatctttggttttggctaatgtcctatgggccatcaaatgattcattatatcaagttctacaatattttctggatcgtgttcgaattctggaaatatagaacgaggtagtatgtggtgtttttctgtatgtttagttttcggagaagcctttatgatatccacatactcactgtataaatcatcaggcaaccattctctaagttttgtatatatcataaattcctcatataaagcgggtataagatttctcctatacccttacatgtatagggtttcccctggttatatttatgggaactgtgcgaacggtgatccgcgcccgttaacaacatcaaacgattcaatgaattcatcgccttcatcttcaaaggcttgatcttcttcgtactgttcaatattggtatcagccaacccatcaagatttcgaataggttcgagatccagatcagcatcgggagcaaggttaatcccttcatttcgttgcagtttaggatccaattcttcaccagtatagataaatttaacgaggttgattttacgttgaggacgatcgccgaactggaagaacgggtcaaactcaatccatgtaatttcaaacaggctgttatccatagggaaataaatcaaatctcccagaacagggatcccgccatcggtttgatgtgcaaataaacgaggattgatcacaagtgtcatttcatcgtttgacatcataccaaatttgctgtaaaagtctctctgtccttcgtagtttgcatacgaatcgatgtatgctgcaattttccacgattttgtaaacttcgattcacggtcttcgcccaaaattttatcaatattaacaaattctcgacggacgtaatacatatccggagatttcatttgaattgcttcggctgttagtgaatcatgcaactgttgagtagggttatacttgtaccagttaacatacgggtttgttacttcttgtcttaggttccgatcgacgccggaaccatcttctaactgtgcaaacagactttcatcccaattttgcatttttcctccttacatcatcaacactggaagtgcatcagacagtaacagaagttcttgacggaggttttctttttcttgcatagcttcctgaatcagtcgggttccatccggagcaacaccaccaggcaattgcataccctgaaacttagccagcacctgaccgtttacctctttaacaagagcagttgcgtaatctttcacccaacggttgttatacgcagaggatgaactatgaacgcttgtaccttgaccagccttcacaccgcctgagacggctttgtaggggttattgtatatatctgctatagttggcttatcttcaccatcagaacccgctgtagcgtatccagcgacgttaccgaccatactgggtacatcaacaaaggatctgatcattgcttcgataacaacaatatcaccatctttaacggttccgtatactgcaaactgtcctgtgtcgtcgttataccagtaatccggaagcggagacaggagatcttgcattgaccgctgatagctcatcatctgggtaaaatagcccatatccgcgccatatgcgttcattccgtaggtacgtgatgcacaaccaccgccgcccagagaaccaccagtaaggcccatcaggaaatcagtaaaccacggataaaccgcagtaccatccatcgatacaagggaacccatgttagtacgcaacactttagtaattgcgaaaatgtgttctttactcagatcgaaaatatttttcgggttgtccggccccagggtgagaatgatataccctttgttagatccattgtaatgatattctgcatataggtctaatgctcgttgaatgcagtcataaacctgatcggttgtcacttcgattttgacgatcggagcacctaaacggcgcagaatttcatcttttaattgtgctgggttgttcgtaatcataaagatcctcaaaaggggccgaagccccttgttaatcgttaagcgacagtgatcgccagttcatcagaaacgatgactttatggcttgcatcagttaccgttactttgtaagttccggaatcagaaggctgtagcgaatcgatggtaaatgtgttagcatcagtaccaacgtttacgccgtttttcgtccactggtaagacagcggagaaacaccaccattcatagttacgcttagagacaatggatcgccagtagtgtattcagtatcaccagttaggttagtaccgaatgacagaggcgggtttttgctctcataacggagatcagcgtcagcttctttgatgtacagagccagtttagcattcagatcttcgatagttacgcgatctgcaagtgcctgtgcaatgttcaacgcttctaaatcctcaacacgtttattaaggtcggcaatcagtgcataaatgcccgtttcgttaccttctgcgttatcgcctacctgagtgaacaggttgcgggttgtcgttttcaaaccagcgcgagtaacaggatcggaactaacaccatcaccatagatttctttgttaatctgctggctagttgcaacgaggccactagaagagttacctacaacgccttgcagttcccagagtgcgctagtgttggtgcgtaattcaccctcaacaacactcaaacggcctttgatactggtaggatctgaatcttcaccaacgtcaccagttaagatcgcaacttgtccctgcaatccatcatcgccggattcacccagaatcatttccatatccatcaatctgcgtttagtttccgcaatatcataacggatactaccctgagcagaagccgtaccgatttgaccgttaatggttgcaatttgtgcagtgataccagttaccggatcattgatttgtgtagccagagaactaacggagttttccagactgttcacacgatcgttaatggaactggttgaacctgacgtgcgaccgatataactattaatcgcatcaagttcattttgcattacaatagaaccatcctcaaggatcttgattcgcgcatagattgatcgggttgtggcaagaccagaatcacccatttcagcacgaagttcttttacctcttctgtcagttgtcctacttcggaaagcgcccaatcatcttccagtttggttatgcgagtttcctgcatagaaatagcacgttggttactcagtacgcggtatttaaggccagtaccagtagaagagggatcaacatcaccatcaacgttaaatccaggatatgaaccaacttctttcttaatgtaaatgatatcattacgaattgtgcggtgtttaggatccttttctggatcgtattgcccaatttcatcgttctgagcatttacagaaagggttaactgtgctaccttgttctgtgtttgggtgttagataaagttaatgcctgaacatcctgatccaactggttaacttttttgattacgctctcatcaccaatagcatcaatgttttcagtaatcaagttaacctgatcgattacttcgttgattttatcattatgggtgatggtattttgttctaactgaaccgcgttctgctggatgtttacaccagttcggttaagactaccagtgtttgacactttatctggcgaaccgtccagagtttcaccgtttttgatccaaataatcttcgtttgagtcgtggcgtcatctgggacgccatcaacaaacgggatcttcggcaacgggtttaatttgtcgatgatcatttaataacctctgttataatacgcgaattacgtagtttaatgcgatgtttttcatgcgggtttcttctccgcccacaccagtagctttagttatggaagaatcaaacacgcgagcactctgatcgtttttctcggcgcttttaagttcataaactgcttgccatttcggaatattaccgccgttctggtagataagctgtaatgggtgttcgtgccagcccaacatatcgccttcatatgtaccatacccacgattagggtttaatccgcgtccacggtcatgaccacgtactgcaacgcctcgacaatctggaaggttaaaccaatcaccgccaccaccaaatgtataacctatacgctcaaaaagtaacggatagttatttttattcagtgagcgaccatcacaaatatacaaactaccgtggtcagtctgaaaaccagtcatgacaatagcacctactgggaaatgccaatcaagatctgtccacgtctgatatttgttgttatatattgcgctattctcataaagagaaccgttaattaccgcatttcgatcactaggtaatacagcagcgtttgaagaaagtgcagtgtttgccacataaccaacagttgttgctaatttgacaacaccgaactgagatccagttgcacgggtattgattaattttttcgcagtaatcgctttggtgtcatcagtacccgcgtttgcttctgcctgtgatgcgatacgaataacgcccaggttgctttcagttgcagttaaacgaataaacgtataaggtgaaattgcatacccttcacggatcgtaccagcctgaacctgtgcaactgttgccagttgtaccaaaccttgcgagctttcggtcgcgcttgactgaacaggaaccagggacgcgatcgcttgcttgactttaagcggagtcatagttacagtgttatctgtaccagcaaccgcctgtgcagtggtagcaattttagaagaaccccaaaccgattctgtacctttacggttattgaacacatagttcagagatcgcggagtaatagacgatgcatcgttagttacggttgtagattccgcatcagtcgaatacttcgtataaccccatacggtttgtgatgctttagggttctgcatacgatatgctaacagtttcggagtaacaatcttagtgttatccgtgccagcgtcaatatcagcttcggttgcgatctgagcaataccacgaacagaagttgttgcgataggaagcccagtatcagtacgcgcccaactacctattttttccaacgcatcttgtacgttggttatggtatcaggccaatcagtacctgttgggtcaaatgtcacgtaaatggatttatcacttacgtggttgattgtattgttactcatgtgttatccttatgcaattcgtttgaagtaatacacggttacttgcggagtaacatcaggtaagaaaccagaacccaacttaacccatgaaccatagccactttttgcggctacgtcgatagttccgatttgacgaataccgttttctgagatatttgttgccgggtgcggaacactatcaataaatcgacattctaggatcgtaccatcaacacctttacggttaacttctgcgaaatatttttccgctgcaacgaattcagtaaatttgttgtatgccgtttcacaaacagttgcggcgttagtcccattatcaaagatgaaaggaaagccgtacacgtgaactacagcctgttcttggtctgaatcgatgttctgtacaataccatcaaaagaaacgctctcaacctgctgtacagcgattggaggggcatcctcagtcatggtaacaacgccgttaatcgggatttgctcgataagcgtatacaggtcatcaattgcggattgtacgtttccatacagaacaccgcgttttgtttggtcaatgtttggttcgccgatcgaacgtttaccgccgatcagaggcaacttaccataagtatcatactgtaagtaatctgcttctttagagaggacgcgagcgccctcccttgtttttgaaatattgttgtaagccattatgcaacccttatccagcgatgtgcagtcatatacggtggaatagttttgattttatcaggtaatgtgttaccatgattcactttcaatgtatcctcacggtatttagtgtatccagggccagaagcatcaggatctaactgacaaccaccaatgatcacagcaccattttcatcagcaatcagaactttatcttttgatacaagttcaggaacgttgatgattttgatttctgtaccacgatcaccgcctgtaccacctgccgtatgactcggttgaccaccactatctaaatcattattgtttaatgcgaaatcaggatccgctgcatttgatgtccagccagccaggaaataaccttctgcgtaacgtttccaaccaccaaatcccatataatcagcagggtttgccgggttgtgtgcgttttcatagatggttccgatcgggtggataatatcaaacatagcctgaatatccagaatacgtccctgataggtttcccctgtattacgcattgttttctgagaagggttattataatcggtatattcgatacggttcgtcaatataacttcttcttcgttattgagataaaccttatcagctttttctttaataccgccagttccttcccaatccatcagagtaccaatatcattgttaaaccaacggatcgttacaacgtcgccggattccagttcctgagcaaacttgattgaagtcactacagaatcagtgaatactaaactataatcctgtcctgacggaacccatacaccagagttaccaacacacgtactttcatcaacaccttccgcaccttcacaggaaaacgccggatagtcagcgtcacctcctttaaccagttgtttaccgttgagaagcagttcaaacgagttagggttaatcaacacgcgagggttaacaccaaattcagcaggtgtaaactcttttttggttgccagatcacctacccactgttcaccaggaacggtttccagagaagtatcaccagtctgatacatgcgcatcacatacgcttcatagctcgaacgccatgttgctaacccatctagataggtaacaaattgaagcgtgtcaccagcgttacacgggtttttaagacgtactgaattaccatcaagtgcaaccagttcaccaggagcagagccaattgatccatagtctgagttatcagcattgaatccgtctttctcatcgatgaacagcaagttaccgcgatagtaaacttcgaacgattgcaggttgtattcattaccaacaccgaatacgttagggaagtcagtttgtccctgagtagcaatatacgtttcttttgctactgttgccagatccgaagttgtgattttgtcaatctgtttgttttcgacgtattcccaacggcccggagaacaatacaccaattccacatccataaaatctttaaacagatctttaggagttggggaacctttgatagtatcaccagttgcggggatcagtctaacgttgttggtagcccaacgcgaccacacatcgcgcagacgaataactttgttataatcgcctacgccgcctttcgggaggtttacggtgattttgtttgcactggtattcaacgcccatgattcaccaaattttggtgatagcgtcgtacccgcaaaagttttccaggcacctgctggatgggggatctcaccatcccccagcatgttatacaattctgtaaagttgctgttagtcttttgaccacctcgacgcaggtaatcgcctgtaccatcgtctacaacctgacctattaaaatttcttgtttcatgacgcgatccctgatttaatcgtatcgattgctttaatcgtgaatttaattcgatcttctttgatcgcttgcacgttagcgtatacgacatcaccagcaccgacagtaaagtttaatgtaaacatttcatcttcactgtttttcaaaatagcgtattccgttgaataaatcgttttgtttacacgatccacggtcattaaaacttccgccattttggtaactgtaccagctacgttttctgcgtatacgagaaccttagccccgctaaattcgctatatccgaacataggaatagcagtcgggtttgctttcagtacaagcgccgtagtgtcaacaggcatcgttttagaaccgaacatagattctacagaataatcccatgttgttaccgcaccttcttttttggtacaccagatttttacaaaggtgtaaggtgacgtgatgtacaactggtctgcaacccccgcgatagtatcgccaacttgaggacgaaacgcgataggacgatcaacagagacactacccgtactatttatgaagtagcaaccttcgccaaccttaccagaaggaagaacaacggtaatcgaacctgttgaagtatccatgtcatgcaaggaacccagttcgatcggtgtgcttgaatagtaagtgcgtggtagtttctgatagtatccggtagcatggatcaccatgttaccgacaccttcatttgcagacagcatacgcacatcaccaaacgcattataaacgttggtgatcatttcgttcagtttaacaccaccatcataaagcgggtcgcctgttgatgggttgccgatttcaccgacatcaattagtttttttgctgtttggtaagccattgtttttccttagaattcgaatacaatactcacttcctcggtctgatcaagggagcgaataataggttgtctgttttccatgtaaatcatacgtccggaatcaggttcaagcgcgttagcattatagtaatcaccagttgctttcttttcaggttcggtcgggcttgcctttttaatcaacgggtttacaataatacttatctgacggaaccctttgttaccaggaagcgtagattgcgggaagaaaagagaatccatgtatgcacgaaaacgcattgaattcaccttcaaccgatacactagatcgtattgtcctggataccattgaatcacgttatcataaccccaacgtaccggatcctcttccagttcgccagggaaaggaactacgatatgttcgtttgtacagcggttgatcacgacatctggcgggattgtgtagaggtattcccatttataaccgtcgcccatgtcgatcccgttagcttctccgcgtggaggttcactagattcatgagacggactccagataccgccgatcctgatacattcaagttttccggtaatgctcgaaatggagcaagaaccgatatcaggaacatcaaccacacgataaaccatccaacctttacccggatcggtacggttataaggcgcggtgtttacaacgacaatatcgttaaagtaaaagattttcgggtttggataacgagtatcaccccagtctttacgtggtaaaattgcatctatcatatcaccaggaactttagtagccccgatcatatgcgtccacatatcactaacaccatcggtgctatcatttggatatggcggggcgaagttagggtcggattcgttatccgcccatgattcagttcgcccaatagacatataaatcgtgtttagatcggcggcatcgccgatcatatctttgaagttcatcaagttttcggttcggaattttgcagtaattaccgaccgatacaagttttgttgtgccatttaatttcctaccttaatctgtgatggaggatttggatcacgtgggtttcctgcatcatctttcagtcgtttatccaccaaattacggaactgtgaatatttaacgcctgagcaatcgaacaacggactttgatcgaaccgtcgcgcagaaggaagaacaccattaagaggtttttcttcaatgtcatattccggaggtacatcaaaaggttcccccgctcgcgggtgtgcggtgtacagaggttcaccagtaaccaggtcgaattgttggtttccgttaccgtccatactcgcaatgcgatcaggccagaacttaggataaccactatcgaaacggtagtttctcagaatatcaatgattgtctcgttatgagtcattgacaaaccagagttgatgaatactgttaacatcgtgatacccataaagccgaatcctaccggatgaacaaacctcaatacgtcatccttataacgggaagtcggtagatttgaacgaattttcatcacatagtaagatcgtccacggttgatatagtcgatcgagttgttagccatttgtttaccgcgaacaccacgaattaccattccggtgaaattggttttttctgacttgacaacctgcccttcgataaagttaccttgagcattatgcagagtcattgaccaacgcaattgaccattttcatagtcacgttcgatgtatgtaacgttagcgcgtccagttggtgtatagatcgtccggc

SEQ ID NO: 7 - DNA, 39187 bp, Unknown
  bacteriophage strain capable of infecting bacteria of the genus Klebsiella
ccttccactgcttcgctttcttagcgagggactcaagggtcttatcggaataaccatcgcggaacccgccagcttccatcagatagatgtagccattcagggtgaacaacactgcgtaacctgtctcatccttaccgcgaccactagggtcaatcacgaggatgcgctgctggtactgtccagtgttctggctgcacgaatgatagctatgaatatcgtcacccttaaggcccacgttaggaagctcttcattgcgattctgacggttcggaagccactggtaatgcattggggctttctcgaagtccagaccgcacacgatagcgtcacggaggcgtagggggtacttctcggcatcactcaggttcgggtttagcatgaactgcaaagtgaagccagccttaccgtattccaactcacgctcacgcaggtcttccatatcgaagcgcacggggtcagtcggttgaccttggagcatctcgaacccatcgttgaactcctctcggagcataggggccagacggtcgccatagtacaagtcttcctcgcggctacgcggatagagcgcaggccagatgattgtggtatacccacggttatcttcgagttccttatacaaggtcatttcggtttgaggcgtaccaaggtagataacgcgagaagtcggcagcggtttcagaagcgcagcaaattcctgcaccagagtccacagcttctcacgggcaccttgagttgcggagttagacggaatctcaacgtcatccgctatgatgatatcagcacgactaccagtcaactgaccagtgatacccaccgacttcacagacggagagtggtcaggcttggcagggccaacatcgaaactaatcacagagtcacgctgaccggggcgaggctttagctcagccaagaagggcagcaggtcaatgatgttcttgatgaagatggagttagcgtccgcacgttctttggatgcagagacaataagtatcttcaactgagggtcacgccataacgtccacacaacgaacgcacaggtgatgaatgacttaccgataccacggaaagcctgtaggataaacttcttgttgtctccgttagccagacaccgggccatatcaatctgacacttagttggtggcgggagagccaaagccttccacaatacgaacaggaaggccacgaagtcacccttaagctgcgcaatgattagcgcattacggtttgcttgggtgtcgctcattctgcatctccttaatagtacgctggagcgctcttacgtgagcatcagcagcttgggttattccgataatacgcttagcatctgactcgtgtagttcggctcgaccattaaactcgcatctaccgttatcctctggtagtccggtaagggtcttgatgcggactgacagccgcttattgttactacgcaggtcattaagcatcctatcagtgctgccttcaatggctgcaatctcttcttggtactcacgggatacccgactgacctctgcctgagtcgctgcggttgcttttgttttcgcaatgtattcattttggattacctccttccagtttgctctctcatgggttgaccctaagtgccagccacccataaagagtgtcccggcgagtacccaagggagtgcgctgcgtaaaagttttagcataacacctcccatcaattttcagatttcacatagatgcaccaaataacatccataaaggctccccgcgtggagaaccttgagtatgtcacttactgtagcgtgatagtttcatcatcagtcagaccattagggcctaccactttgttgtagtcttccagaccagccgcgagacctccaaggatgttctcatccggggtcagcttactgatttggaacttatggcggtctaacagtttgccgattgcgttgtaaagctgcggagttcggcgttcctcgctctggaggtcagcaagcatacgctgtgccatctccgtgtccagcatctccagcagcttgattaaagtcttgtcgctcataggttactccttatttgcacgtttccagtcaatcatcttatcgactaccttggcaccaatctgaaccactgtgtaggcgatagctgcaacgtagaaccattcgtttaacgatagtccccaaaagagtcgggccgccccatcagcgacccctgtgccaacaatcggcgcagccttaacgacctcgttattgaagtcaaaagataacattcttgttctccttatgtgtgaacatccttgttctttatcgctatgccatagctttcagttcctcttgaagtttaattaagtcagccattatgtcctctttggtacgctcaggtgcaacataggttggacgctcacgggcttccacagagtgtgtctcacggttgaagaaccagtaggactcgcccaatttgtattcacccggtaactcagaaacctgagtcacagagcacccgtcacaaccgtgtagtccagtaaccttggtagcaacatacgaaacataaccatcaggatagaacgccacagtgtataggcctgtcttgtccagttcgaccatcaagtcataccatgagttaccctcgtcgtccatgaagaaacgagcatcgggcggagcaccaacactatcgcggtactcttgggtcacttcacggtgtttgaagttctcataaatcttagacatagtgttctcctttagataatccactgaccacgggcggttgctttccatagctcgttgaagtacaactcttcgatgaagctgtccccactagcacgaatctgtttgattccccgcattacgcacccgttgtcaatccagccttcccaagtttgctgaccaacgtgtcgagaacgacccgcgccaatccagatattggtaaggtagcgctcttccatgaagtccttcaaccacttaccgtcccagatggccccacgaatgttaccatcctgttcgacaatcgccccaccattgatgacgattcttgcgcctcggttgccgctgacctcaaagttaccatttcctttgatgcgcatccatgtatcgttatccccaccaacaaggtgccagccacgctcaatataatgacctacaatctcggtaaagtattcatcgcaagcaaaaccacccacagagcctcgaattaggtttgtaatcttgtttacaccagatggaacccacttgtccttaataatataatcaccaccatgcacgtacagagtgttatttgcaaccaaatcgcctgtagagcgaatccatgagccgttaatggcctgagcgttaatggttgagtcgaagtcaacagagttcataccattgaagcgaacaaccttgttagcgtccagccgtagtgaaccagacggctcatcttgcccacgatagaaattcatgaatggactaccagtaccgtcccactccaaaccaatcgacataccgttgtaggcgcggaggactttactatcaatatcgtatttccacacaaccttgcccgaagtagcaccttctggcttgagaacctcttcgattgcaccagccaaatcattcatgttctccagcttatttgcttcctcaatggctcgtacctcggaagccttagcgttggtctcagaggtcttcgcgttggtctcagaggtcttcgtagcgatttctgagttctttgcgttaatctcagaggtcttcgcggcaccagcacttgcagcactagcatcagcagaactcttggacgcatcccgatacgccatagagtcaagggcatacgaccgggaagacttaaaggttccttccaccggcgattccttgatagcccaatcacgggacaggcttgcagaactcgcagagttacccgcagaggtagcagcctcggaagcacgcgcagttgcgcggtcggcctcagcccgtgcgcggttcgcagagttcaacgcagagtcgttccaccgttggatttgacctaagttgattgcgtcaccggggtctttagcgtccgcaacgttcacgatacgacgaccacgagcatccaaatcaccatcgttgttaacgccaatcgtatcagcggtaaggtcacgcgcttcctcagcaacgtgtagggtctgcacctgcgagatgttcaggtcatacgcacggaggattgagccgtctgtaaagtcaaccagcctatcggtagctgaggtgaatcgacggatttcaatcaaagtataaccgtccgctggccccaacgctctcgttgtggagattgtggtcttagttgcaaaacgatagtcttgattcaagatgagttcctttcggtcaacgccgataagggtcactcggacaaacttacgcgccagatactcgaacggaatattaaagtccgtagtggagccatccagcgggtaagtcatcacggtcttaatagttgtagccatgtgacctcctttgtaaattagcattaggagagaagaggccagaatgtgacctctctccctttagtgagggtttattgtttcttcggcgtctcctttatacggataccgttggcctcgtagattttcataatgagttgctgcgatagcgggtcattaggaatcaactcacgagaggtgttgaagaggcctgtacggaactccagagcggtagccttgttcggagaagacagcagggaagcggcgttaatagctgttgcacccacagagccaacaaagcctaaacccggaacctgctcaccaattgcacctgcgatagttgaagccacctgtctacctgtcactgccttgttagggtcacgcttctcggactctttagggagcaccgtagagcgggtgtacttataggtatcgctaccaaccatcccagcgaacatgtcgtagatactcaatggtgagcctaagtgtgaactacgagagattgatgcatgagcaatcatcttagggtcaagggcgttcttaaggtactccttacgcttgtgatcctgtaggcttgcggccttgaggtgcgcctgcccaacgtagtaaccaccagctagacctaaagagatgatatgcgtcaacgcttggtctaacgcacggttgttcttcgttgcctcgtagaagctacggacgaaccgggagttaagggacttgatgacgaagttcttaaactgcatcaccatcttcacccctgcaccgaacgctttggagtcctgtgaggaaaccttgtgagggcgcagtatagcctcatccgccaccttgtcagccagtcgccacaagtccattgaacgggggtcgttagcgaaagcctgtttgtcacgaatggtgaacttaccgtcttctccacgagtcgcatggtctctgaacaactgcttgattccattccactgctcagggctgatagaggcagacttaaggtagtttgccttaccgaacttagaggctttcccagcaagggccgctccagccacatccccaagcacaccctgacgggcagcatcaagaatgtagtttgatgttccgtttaggagcattgtccacggagagcgtgcagccaactcttgagtgccgaaacgaatcgtaccgaccacattggcaaccgcagcgctggtgtccgtagactcccggagtcggcgcacgtggtcttcacgtcccggacggattagttggtctagttccttaccgaacaccatcccgtgtatctccttaatctcagaggcacgaagcggtttaccacggttgacccaatcgttaatcatagggataccatgagttatcgcagagacgttacctttcgccagcataccagcgatttcagtaacgttctgtgcgcccatataggcgttcttagcaaagaacgtgaggtcatttacggagcgcagggctgtaccccaagcgccttccgggttcctacgagcacgaccagtcagaatcttcacggtgtccttgagggcttccacttcacctttcagtgtgccgttaccctctgcctgcttatccagcgccatgatttcatctttcaggtctttggtagtcttaccggaaccgcccatgattgcaacgtcaccatctactcgtcggtcgtatgcaggcagaatttcagccatgtcataggtacgcaggtcattcacagagaacgtgttaccatcagggagagtcaccgccatgtcactgtcgaacatgttacgggcttccaagaagttgttgttctcgattcccaccagaccctcaatgttatcctcaatgacagaggaggcagagaactggtcagtgtgtgaaataccatacgccttatccatcgcgtgcttctgcaccatctcaggcgtaacttcctgcacggatttgagaccgttaagttccatcaggtactcatcgaccctcgccttgacttctggacgagcacgataagacgtcaaccatgactccgcgattgctcgctgcaagccatcattaccgtaacgtttaaccatctcaatcttgatagcgcggtcgtacacgtttggcacgtaggttcccttgtggcgtgagccggggaagatactgacagccttggtgttgccgaagattgacgggttctccatgatttcacgtttgaggtcaaagtgctgcttgaggatgttcatcacgttccgctcaccctttgtcaggtttgcttgaagctcaggccgctcaatcgccaaggctgcacgcttgtagatttcctgtcggatttccttacgactcattgtggccccacccgtggagaactcagggtctttcattgcagtacgcacagcatcgtaaagctgattgtaggtgcgctgattgttcgcgtggagccgctccttaatgtcagaagctgtcgcaccgaacttaccattagagcctgattccatccctgtcggagaacgcacaaggtcactcgcaatggagcgaacagtcgggttctcagagcggagagtcttcaatccaatctcagtgaagccacccaaagagataccacgagaggcacgctcagggttgaccgcctcgaactcgctaagagtctgagggttcagcgggttggtgtcgctaaggatttgaccttgaggcaacacaacggcacccagctcggtctccagaggtgaatactcaacgccagcgtgctcacggtcgaacacacggttctcgctcggcatacgggtcaggtcttcaccaccagagttcagagcggtctcacgggcttccaatcggtgtgccataggagcgaagtcattaacaacctcagtaccacgggaacggcgaataccagccgcgatagcatcgcttattgcactcatcccagcaccgaacatcagaccgcccaaagcagcatcagcatagtgggcttctccaccagcgattgatgtacggataccctcagaggcaaccgcgaggccagcactttgagtacccacaatgaaagccttgttaaccaccttgagacccttcccggctacgcctactagcggcacgtaactcagcgggtctacaccagcaccgacgataccagcagtaagtttggcaccaacaccagcatcggcagaccgtgcgtccatctcatagttgtcattcgccatcttaatgagggcgtccagattctcaggagagcctccagtgactacattgatgtacgatgggttcttcacctccttacggatacgctctagctcttctggagtccacgtatggctattccaacgggtaggcgtaatggtgtccttgaacaaatcaaaaccatcgtcgctacgggctgcacggaaagcaactccaagtacagagttatgaagctccgcacttgttgcatcgccaattccgaagaaggtagagcgtgagttaaactcatccagtgttgttccagtcttttcccaaaagtccttagcataaggaacgttaggcgcttgctgctctttaccctccactttgaatcccgttgactccggcaggtcagtgcctaccgtctgcttcttcccgattccagcaaatgcatcccccgatggaatgcccttagcctttggggtgataccgccgaacgcctccaagtcccccttgcgaggactgttagctacgtccatcaggttgcgcatatagttacgaccttcctcagagattgaggcccaatcacctttgtcgtaggcctgcatctgaggggcaccatttctgccctcgccttggttgtacgctagggctgccttaagctcatccccatcgtatttacgaatgaggtcacttaggtggcgagcggctgcatccacagccaactcagggttgtagcggtcatcatcgtctgcatcagtgaccttgaggccaagcgcagtggctgtacccttggtgaactgcatgagacccttcgggccagttggtgatttggcctttggattgaagctggactcattgaatgctaatttacgaagcaggtcataggagaccccatgtttgtctgccgctttttgaaataacccatcgaactcgctaggtttgttcttatcgtagctcatggagcctccttatcactgttagtcttctttacgtccatagatgtacttcggagtcttcttccgtttctcttggacacgtttacgcgcttcttcacgcgcctgtgttacacggctgattggggcacgtttgttggcctctttgagggctttctctcgtgcttcctcagcttgcatctgtgcggtacgctggtactcacgctggagcaactcttggtcataccgaatgcgaacctgtccggttgtgtccatcaagtagattgaatcaccttgctggtacacagtcagttgcttgttggtaatccaagggttcgccgctgtgattcccttaatggcttcgtccagaatgttcttcccctgctcccacgacttagggtcatccgaaacagtaaggatgttcttcggcaggacaccataggtatcaccctcaacatcactactggagaacgtggtcgtcgaatcagagaggaactttgcgacctgttcggttgccatgtcagggttccctgtccggtacttcacggaatcataaatcttccgcgcgtaaccttggacactcgaaggcatgtacttgatttgaggattcgttgaatcgttcatcatagcagcccacgctcggtcatcctcaaactgcatctccttggtcttctgtgcgcgggccttatcagcgtcgataagaacctgcgtgtcgatgccttggttatccaacatgtccatcgtcaggaacaactcggccttgtcaggatacagagaggcaatcaggtcagggtcagtgttgcggatgcgacgaaggttgtccatcgctggtgtgctctcaggcatcttaccgttaatcaccgcagcctgccattcgtttccagcatcagtaatcatctcaccaaacgctgcacggaaagcaccctccttggagtctgcccgtaggtagtccaatttcagtttgtctttctgttcaggtgttaagtccatcgcttcgatttccgctaacttctggttcgcgtagttgaccatatcgctatgtgtaaactcaccagtgttctcgttggtcggcatgtccttatagttggtcgagacgtactcaccattgaggcgcttctggaactgcttgtcgatgaccagagatttattcagggtcttctgttgcttgtccatcagcttggctatctcagcctgttcctgcttgaagcgggtgcgcatctgttcctgtgcggaaatcaaccactcacgctcaggagtcatctcttcacccggctgaatcttatcgagttcggccttgataccttgaagagtctcccagcctttaccagtgtccgcttggttaagcgctgagttaatatccagtcggaacttctcggttaacttcgcgttgttctggaattgagtgtgctgtgccttaatcatcattgcctgccactgctcatcacccatcagttcacgataggtagtcgtagcgccatttagagttaccttgcggttctcaatgttctgcaagaaggcggcaccgcccggacgctgtagcacgtcattcagggacgaagagataacctgttgagcctgattgtcagtcatccctgtcaccaaggagttgtcaatgtagttctggaagaactcaccggactcaggacgagacagtaggtcagggtcagacaggacaccattgagttcaaccttcgagttcaggattgcacccttctgcgcttggtcactcaggaaggtatcatgtgccccatacagagcaatgttacgctcggtgatgttcgcattgaaacccttctggtattcctcgtccatctcattgatgccgaactgctcagcgaacgacttagagtgctcctgtaggcgtgagtgacgatactgctccatctcttcacgagtacggaagcggccctctttgatggcctgttgaacctcatcgtcaacgaggaacgcagcgttacgcccggtcttgaacttcaaggcttgcattgcgtatgggtcgtcctgatacagcagtgtaccattctggatagcctgtcggcgctgctcaggggtcagcttacggataatctcgttggagcgctcatcggctcgttgcttatcacgttcatctttcgccatgtacatatcggcaccagccttagcgaatcgaccaatggagtccagaagactcgctcttggttgctcagcctgaatggttgctgcccggtagtccatacctttgacgccccggagtcgttccataccgggagtcgccatgttgcctaaaacactatttagtttactagccattattacctcccggtcttggttcctttggcggcactgataggtgctgcttggtttccacctttcttgtcaaatccaccagccgcatattgacttgcagcttcctgacccataatggacagagggtctagtacacgcatcagaccagacttacccttggcctcgctcttgtacattgcatcgacttgacttgctgttgactgagtgcgtcccaactgttgcgcaaagatactcgcgtagtctcggcggtaattctcggtgacactatttgcctcccggatgtagttaccttcttcgatacgcttgatgcgcttcatggactcaccttcgagcatactctcgccgatagctgcacggatggttcccatagcttgtaccttctgcatgttacgtgaagtcaactcagaggatgcagcttcaagggcgtcccgttgttcgagcgaggcgttggcattctggatattcatctctttgaccatctccattgcctgtctgcgtccagcttcggtctgtgccactcgcgccttgtcagcactgttctggctacttagagcttgggcacccatcattgcgataggaattgctgccatccaacacataatcatttccctcctaggtatgttattgccttccgaagacgctcggtgtcgtcctcgaacttcccaagagcgatgttacaggcagagcaaaggagaccacgtacagcgccagtggcgtggcaatggtcaaccgctaacgcccgtccctcaactctctcggtaagaccgcagatagcacacactccgtcttgcttaaggagcatcgcttcgtattcttccagagtgattccgtacagacgcttaaggttcatctctcgcgcctttgagtagtccttcttgtaatacgtgtagtgacatggcttacagtgacttcgtaggccgtccttactcttcttgtccttatagaactcggagacagctttcatatctccgcatttcttacagttcttcacgttgcctccttgagattgtgaatagttggaactgaccatcgagagtgtactcgttgtggaataccgctccgattgtctttaggaaacgaatgtgcgacttattgcctacccatacgaagttccaaatggactcgtactggttcagcatcatatcacgatattcgattattaacttacgaaactctaagcgctccttcaaggtaaacagcgggacgtacttagaggtaaggaaccacactcggtctccctgattgccaccaattgccaacacagcgttatcgctaagcattgccacagtgttctcatcaggaattactttaggttcgacacccaatgcctcagcttccagaatgtcctctatggacggttgaaagttgtcagcgtggctttgtaaacactttgtaatatacataatgctttaacccctcgtatctattagtgtctccctttagtgagggttaattcaccgcagggagactttaagttaaatgcccgaagaacgacgaaggtagttcccctcccagccgcacccaatgatgttcaatggggtagacgcatctgactcgatagttactatgttcgtctgcgcattacccaccaccgggaatcggtactgccctgtaccaatgtttgagcctccaacacggaggttgtcagaccccaatcgtgcaccagccattgtgtagatgaactcacgggacaggttgttcacacggatggtgaacgctccagagtcctcatagtttacccatgcacgccgaagctgtaaacgtccgatatcctcggtagccgtcgagccgtcctcagcggtcttcttaataaggaacttcgagaacgtgtacgtgaatgggatgttgaacccaatgtagactacttgcccctcttggttcccatcaagtctcaatattgggtcgctactccacccgttgattggtgggtctatctctacgatcttcccatcaggaaagaccaccgaaaccttacccttcgtgaagttcatcccgtaaatcgccgagaggcttattgacgtctggtaggtatcatcgttgtacgtcccagcagggatggtgtattccctcttagcgtcgatgtataacctgtaaggctctcccggaatgtctatggagttcttcgtgaagtgtaagcgtcccatccacacagcatgttcattacccatcaatacagtcattgttgagtttatcacctgtgctgcaaacaccgtaacgttgttcccaaagtcccaatgagaccacgactgctgcctgatttcctcctcaatatagaggaacttatagatatacactcggttcggcgcaccgctcgtaaggatagccacgaagttctcagcagttgtgcctgagatactaaataccccattaggtatgtagttcggaacgtgagccgtcatgtcctctgcgttcttcacagagcttacatcctgtaccgcatagtatcggttaatggatgtgaaggaagcgcgaggtgacgcaaagtatacattacgtcctacaccatgtgggcgtgccctgtcttgtacgtcgaactgagtcgtaaggttcaactctacggagcgactcgaaaggataccagaagctgtcagaacgaactgcgcttggtcagaccataggagtaactcttcggagaacggaacggcatacttcaaggttgacacccggttatgactaaccgcaacgtcgattgggtcatcgtcggagtagttcgacacggatgccgggaagaagttgaagtatttcgaggtgcgagacaagatgatgttctccccactaaggaatcccaaacggttacggaagaagaaaatatcattgattgtctgtccggtaaacgatgggtatgggttggttgtatcatcgcccacagtacgagcaccccactcaaggtacttgaagtcgaagttcccgtcagaagcgcgtaccagcgcccaaggcatcgtgtggtaatgtaggtgagtccttgtgttccagccgattgtttctacccataccttacggttgaggtcgaacctaacgtaatactggtcggcagtctttgaggtgtcacctacaatcttcacaatgtacccatctggagcgttaataggcaacttctggaacgactgagtgtaatgggttacagggttgattagctggtctgcgtaaccatccttagtctgtagtccccaaacgttatcgttatttggcgcaaggatatggatgaatccggggccaacgttgaagcgccacttattcgggtcttgctcgttgtttggattccctaggttattccgcaactgagccgccagcttctcagcgattgcctgaccgtcaacctcattgacgtgtgctggttgtgagccgtctggtagttgaacagcagcacgctcagccccgttgaactcgattgagagtctacgcccatattgcccaccacgaacattaatcagcgcatcaccttggtctttaaagcccggaaggttgaccgattggtcgttactctgcacaaccaccttgcggttagtcacaaaggtgtagtcagccaccgttaccatccgaaggtcttcccgtgggttagctgtgcgcacataagagcggtctccacgtacttggtactccttaccgtcgaggtcgaacaccttaatgtcttcaccagtgaacacaacgaaatactgctcgaactcatcacggttgataagatgcacgtaaggttgtgcacccacatacccagcagcgccaagggtcttaaggtgaatcatcggtgggcgcttctggagaccctcggactcagaagaccaaccgttaatctgtacgctaccttgttcagcgaaccggagaatatctggctgttggctgataccacccttgaggtttttgattgattggctaatgagagccatagagcctccttgttattagcggttaagtagaccagaggtgaatgcatcaccacccagcatgttgtagttgccgtagtctagttcgtactcgaagcacgcacgccacgcttcctgttcttcttcctgcaacactccgtctacctccggcgcaccgaagaagcggttgttaaactgacgggaagccttggtaacgatgtagtttcggaagcactctggcatctcatcgaactctctcagacgaatcaggttgacctgaacaccagatgggaatcggtcagtcttcgcagagcggtcatagagatagccaccacggttgatatattgggtctgaccgctggttgccattacggacaggtagtcagagctaaatggaatcataccagagaacgcatccggtagaagagtcacaccttcctcaatattgaatgtccatcctcgtgattgaatctgtcggttaatcttattgagtacacgtcgagcattcgcaacgtcagcattcgcatcaccctcaagtgtcgatactggtggctcaccgatggaagccagaatgtcgttgacggctgatagctcttctgcggtctcaatgttcatctcataagagcgcatgatgttacctcctgttagtgagggtttaaagcaaaaaacccctcagataccctcagagggcacccaaggggttcataaagtaatgaaggaaagtaaatccccggtaaagaccttagccttctacgggaggctctactgctttcacagtgaccttgcagacagccgtcaggccattcacagtagtcgcagagatgtcagcggagccagcgcccacagcagttacagtaccagaggcatcgaccgtggcaatcttcgcattggaagacgtaaaggtcactgtctgtactgcatcagccggagttaccgtagaagtcagggctttagaagccccaacgtctaagctcatagtcttctgactaagagtaactccagtggggtcgggaattactccgacacctttgggagcacgatagcgccagcagcttctggacgcagaccaccgtgacccatcgcatatttagcgataatctggtcagcctgatagttcgcacgacgagcgcgctccagagccaagtctttcagcttgaccgtaccaaccgcagagcggtgctggaacaggccaacaacgttatccagagcaaccttaacggtagtgctggaagtcgccgggaaagcgtgcttctggtcagccggggcatcctcacgggtatcaccagcgccaccagcggtcaggtgcggaacctcaaccacttcgaagcccatcacgttacggatagtaccgcgctcagggtcaatcagtgcctgatagtttgcagcgttcggcatcagggcagccagaatcgcagagtagttatcaggagtggtgtagaaggtacggtcagcagccggaacgtagtttttggtaagagacgcacgcgcgatagtcaactgagcgataatcgctttacccagctcaaccgggtcagtcaggtcgccagtggtcggcttaaccagagtcagtacggtcggcttaccgagaccctcgatgttctcattggatgcgtcaggcaggttaaccagaccagccagttcagccagtacggcaccgtcagccgccatcgccagagattcacccaactgtgcggtgtactcagcgcgaacgtcgtagtggttcatcgcgtcctcaatgtcgtaaatcagaacgtccgcagtcagcaggccatcaatgtggattaccttctcggtgtgtttgatatccttacgtttgtcatcgaggttctcacccggtttcaggtaagcagctttggtgcgaccaatcacagggaactgtgcggacttaccagaagcaatagagcgcagcatgtgacgaggcatggtcacggaggtgcgagcgaaagccgtcaggacttcaccgccgaacactttcaggaacagcgccaatttgtccgctgcggactgacccttaccctgattagtaccaatttgctgtccgccttgaatgttagccatgttgaatctccttatgttaatttaaagaaaagtttggttactacttgaatcgagttggttctcaatgtttcacctacgggagtgaccacaaagttctgtgctcaggtgattcaaccattgtagtcatctatggtctctccctttagtgagggttaattagaaactggagtcgataaccttctgttctaccatttggcggtaggcagcatcgctacggtaacgcgggtcactcatagctttaatcatctcagcctgattcgtaaagccatctttctgacgagctacaggtttaaccggagtagcacgcttggtaacactacggttggcaggcttaccgaatttcttcgtgtaactctcaccagccagattgataattgctttgacagtcgccaagtctcggttcatcatggcagcctcaagggactcagccgcagccgggttggttgcttcaaggtgcgtatggattgcgctaaagcgctccttaccaccagcaaaggcaactacctgattgacgtactggtctacaagggcttcctgaccggagatgtaggagtccacaaaggcacgactatagccagcagcttcgagttccgcgtaggatttctcagagataccatcggcttcgtactcttcgtagatgcgagtcacagactctgcgcgcagtccacgctcaacggcctgctcgaccatcgcctgaaagccttcttcatgctgacctaattgttcagtcacttggctcagttcttctggagtgtcacccagcggttcaaactcagcggcctcaccttcggtctccacctcagcgttatcgctaccagtgtcgaactcggcttcattaccatcttcactgatacgaacctgaatgcggccctcatcgtcttcaccatcagcgaacgggtctacaccggatgcatatgggtcatcgttatgagaagtcggttcctcgctaagtacgattgcatcatcgccatcacgggcagcaacatcgagactcagcatattctgttcgtgttcagtaggtgtgcttccggtcattaccgcgttgttcacaccgaaggacgcataaacgtctgcattagattcagccattgttaaatctcctaagttgttaaagataaagggaaaccaaaggactccaacctttagtcatcgctcatttcaaagatgaggtctccctttagtgagggttattaggtggcgtctaggccagcctgtgctgcggcaccctgcatagcttctggacttgaggtcgccagagcacccacaccagccccaccagtggcggcagcgttctcgatacctgtttgggcagcatcctgcatcatcagtgcttgcttctgctcgtccgtcagtaggataccagaagtatcaataccaatggcgttagcaatgcgcagcttaatgacagcaaggttaatgtccgggtctccctgcataggagccagagcagcccaagcggagatacagcgctccagcttatcgaggtcttgaccacgcccgattgcttccagacctgtactgatagtaggctcaacggcttctttcggtagctcaggaatctgcgaggttgcttggagttgcttcaagagcacacgaaccagaggcaattgcagttcttgagacagaatcgaatagacgccaccaagcgtatcttccagttctgacgcaacgtatcgaatctcttcggcggtcacacgttcacctgtgcgctgtaccgcagagttcaacataaaggcatacgataagcgtgcttctatctggtcactcacagctttcgctacggtaaagtcagcttgcttctccagttgtaggaagtcaatgtcttctcgacgaccgggaacgaagtcaccagtctgagctttggttaatctacggggctgcgtgatgccagccgggttcaccagaccgatgaccttcgcactaatcatgctcatcttaacgatagcctcttggagattctcaagagaccttaagtcacctaagtattcttcacagtaggagcgaccgtaagactcgccatcaatgcgaaccatgcgaaccggaatgtagggcatagcgtcagtaggataggtggcatcggagccatcaatctcaacgtcctctacttcctcatacttgaggtaatcgccggactcttcatcgagatacacatgggtatacacatcgaccatttcgtccatcttcttctcaccaccagctttctctaccgcagaccgaacgtcttccgggagagcaccaaaggctatctggtcacgagtgacaatctgtaacacattgccgtatgcgtctctttggacaacataagaagacaatcggtacagcttcatcggattgtagctaccttcgggttccggtaagtaaagcagtgcattacctgccacgatcaactgcttgaggcactcaaagagcgtcacacggtagctgttggattcgatataattcatgataatacgctcaaccatagacagaccttcgtccaccttagcgagtccatcagggtctccaacaagctgcttcgcctcatattcactaatggtcagcttcatccacgactgcatcgggaatagtgccagcattaacttagaggccagattgttaagaccccgcgcacctacagcctgccacggagtcgtgtagtcggtagattcgttatcggactccttcgggaacaaggacggaatggtgtattgcgcacagttttccgcacgagtctcataggctctacggtcgttcgttaggcggtcataggtagctttagcaccgtcttcgcccaatcctgtacgttttgaatcagccattcagtcctccttagatgttgatgccaccgccggaactacgggctacactcagagacttcttaccaccagcgcgggccttcttacgtgcgctctcggtttgcgcctcatcctcaccctcagccttatcctgttcaggtacatctacaatctgtgctggaggcggcgcagtcactactggtactggagcctcttgttggataatctcctgcttacctgcacccagcgcaccaccaacggctttaccgacttccttaccagccttctcgataggtttgccaacttccttaactactttcttaacggctttcttgattttcttgaagaatcccataatatgtcccctatgttatgtcacagttacccaaacgccttggagcgaatggaggatttactcttgttcttggctgcgttgtcgtccagctttacctttagactgctcttaccgctgctctgtgtggttggaacctcagaggaagacacgctggtgtcctcgtcgtcatcgcctccccataccacagatttcggtggttcagtcaaaggtgctggttcggcagcgcgaatctggttagtgtccatcttagggactttcaccttcggtttccagcacatataattactcctgtctcagttgctctttacgcacctcaatctcatcaagtgtacgagaggcaaggtacagaccatgcatcacacccgcaatgaaagactcagagtaacccgcagcgcggagcgcacggtactcaccagactccatcacataggtctgattgaagcgcacctgtagatactctttagctgcacgcggcatactaggaatatcatcgggatgagttaaaacatgattaattggttgtaacataatttcacctcttaaggttaagtcttaaagtaataatcataaaggctccctcttccctttagtgagggttaattgcagagagccttgagtttatcacttaatctcggagtctcgcttcacgtctcggagtatgagagcgaacatccagagacctcgcgccagcatacctaccagcacagcgatggttatgtactttgcggcgtccataggtaaatctccttgtcaatgtaattgtattcctcgaagcgaagaatgcgagccatctgaccttgcttgatgatttcctgctcggtcatcccagctttggcaccaatggatttaatgcagtcccacagcgtctcagtcgcatcaggagcacgcttcacccacttggttactgtctgccccttgttcttgccggacttcaacacggactccacaggctccacaatgaacgggtcattcaggaaaccttctgccgtatcgccccagccgggaatcccggagtagccatcggtcatatcacccttgatagtctggaagagatgccaccaatcagcggtctctttggtctgcgtcaagatgttcccagtggtacaccacaggaagtcaacgttcgggatagtcttgaagtccttgtcacaggagaccaacacagccttcttgaagccgaagacctcgtgaccagacccaatgatgcccataacgtcatcaccctccagcatgtcctctttgatgtggatgaactcatcacgctcccacagcttcgctaggaagtcacggtagcccacaggcttacgggttgccttacggttctccttataggtctcatcgaccagcaccttacgccagttcacatcgtcggtaaacgccagaacaaccatagcgtcactccaagccttcttacgggttcggtacgattcgattgcagaatcgagaatgctccgtgccttagcgtggtcacactcaagagtccaaatgtcgtctccccaatccgtctcaacctcggcagcagccattgactgatacaccaaccagtcaccatccatgaccagcactcccttctccataggcttaccttcacgcatctccgcgaagtctttcaatgtgattaggctcattcgtcatcctccccgtaaaccatttcgactgcatcagagtatccgtcccaattatccacaccacacgccttaagcgcattcaggaactctaggtctttctccagcttatcaatgtacgcgctaacatcgttccacgcatcacgggtcatcgttacggtgtcactcttaggcataatcatacgcaacctcccattcgtttcaggaagcgcacaccagaggctgtgacctcccatgctccaccattgcgaccgcccacagtcaaacagctaatgtgtccacgagaagcggcctcagctacgagagccgcattgtttcgcacatagttcgactgaaaggacttagggcagcctttgatagctgccagaactttcaggtattcactcatttgaacacctcgcgtacagttgcaggtgagaatttcatcagcttctgctcggtagagcttaactcactgtgaccatcacggataaactcacggagaccttgcttgatacagaacgcagcagcgccttccggcccgtgtgtcaggccttgaataagcagttcttgtttgaacggattcagcttctcgccagccccggccttcttagctaggtctaccagcaactcgttcagattcttctctgattcgctgtcaatcacagcggtaacgtcgaaggttactttaaagtgtttggtcattgccataatgtttctcctatagaattagtggcagacggcccaatttggccccatcttaccttcggtatctaaacgacaacggaaagcccaatgctctccgacccaacgcatagcttcctgcgcggtgtcaataacaatctgagcgatgtgctcggtacggcaggccacctgaatctcatcgtgaacccaagccatgtacgcaaagtcaccatcccagccatgcttcaagcctttctcaatgagcatctcttcggtcttgataatccacagcttacaaatcagagcaccagcagattgcaacaatgtgttgagcgctgcgtgtggagacctgacgtgaaccttgcgaccatccagacctttaatccaacggcgtttccactggactttctgctcaccaccaatccaagcggaagacttaacgagagactgttggatggcttccctcagcgctgcaatcgctggggtgttctctaagaatttcttcttgagttccttcccgcgctccttcccggccccaacaatctgaccaatcttctcatctcctgctccgtaaaggaacccgtaaatgaaggtcttggcgttgtctcgcgttgggagttccgcagcgttctgattcttggtgtgaatgtcaccgttgagaatctcattcgcatactctccgttatcgaaacgagccatgaagtgcgccagacagcgcaactctaagccactggcgtctatccccgcttgcacccacggcttgccagtaatcccatccaaatgatgttcagcaccaaaagcgctacgacactgctccccgtaaggagaacgaacgccgggtacttgtgcaaggtttgggaaactatgagtagcacgaccagtaactgcaccgttagggttaacggctccatgaatcttaccatcatcttgaacataacgtaaccatgctttgtcaccttctgccgcctgaccgatacgcttctgtatcatcaggtactctttaatcaaatcaatgcacgcctgcttctcagggtcatccactcgtacatgctccaagacctcatcgtccaccacaggcgcacccttctcggtgaacttctcaggaacccatccggcctcctgtagtttcttctgaatgtggtcacggctacttggcttgaacgtaacgaactcgaccggagtatatggagcaccctccatgtaatccctcgtgtccaagtcgcaaggttcaagaccttcgcgctgtgccttattacgaggcttcttgtacacgccaccctgtttcggatagaccacgcgagggtaactcggaagtggttttcctgtccgcgggtgcttgaagagttccttaccacctttcggttgataccacgagccaaacgtttcggttaactttcgcagaagttctgcgcgtttcgctgccagttctacataaagttcctcaatggcctttgtgtcgaacgggaagccgttacgctcctgcttcgctaacagccacgctgcacgatgttcaatatcaacagactctccggcttcacgccagaataaatccgcatcatacttcgtgaagtccatacccgcagggaagtagtggaggtcactaagtaatttctcgaagagcttgacagtgaccacaacgtcttgaacgttatacgccatcatcggctcgttgaatgaaacccactcggcaccatcaacatattcttcgccctgctcttccagcatagccttgaagtcgtccttgtattcacctttcatctcgcccaagcgataaccccatgcctccagagcgtgagacccgaagcgacgaccgggtagtttcccggaacgaagaagccccatgtctgtgtctttaaggttcgcatgaagtaaacgcgagagtaccaatgtgtcaatacaattctcacggggtaacttgaagtcacgattgagttgcagctttgcgagtttctctaaagccggaacgtcatacttgtgaccgttatggaaaacaataagcccacctcgcttcacctcggcttccagcgcatccagatacgccccgaagtcgcccggacgataactatgatactcaccatcacggtagtcatagataacgccacagtgaaacttggtgactttctctaagaggttgttggcctcaatgtcacttacgagcataatgccctcctttggtttcgtgctaaatgataatcataaaggccacccttgggcgaccttgagtttatcacttctcgataatctcttgcataccagcgccgaactctaccagacgctcatggttatcaccgaccaccttgtcagcagccatagtcagggcacccatcaggcgaccgacctgcttgtcatccaaggtcatgcgttgagtgtgtgctttcggagacttgtggtctttccagcggtagaccatcgtgaccttctcaccacgcacattaatgtgtactcggcgggagaactggtcagcggtgtctggcagacggatggtgtttgcgtgggtgattgacttgctcatagtgtgcgctccttactcaaagaatttgctcatggattgtgctttggctgcaatcgctgccgacttgtggatgccactaacagccgcatcggatttctcacgggactgtttcgccaactcaatggctcgctgtgaatcagctttggctttcttgtccagcttcttggcttcgatgaagtacagttttactaccagcttacctaaagcgttaatgaatttaaacatgatgtgtctcctatggtttaatggttgttcccgttagtgagggttaattagtggtacatgattccatcgcaatcggaatgcccacacgggcatcctttagaagtctgactgtccgtcatgttcagtccagccagtatctccttctccttcttcgccagtgtagctagacggttcaagccacccggtttctctgttgtattccatgtatccagcaattccagtgtcgccagtgaaacgacacttaagcaggcgaaccaacaccaagttaggcatatcaccttgctggttacgctccaaggcgatgatagtatcagaaagctggcgcagggcaccagaaccgcgtaggtcagtaatagaaacagcgcgtccttcttcatgtgcttttcccttatccgggttcttcaagtgacaaatcactacgagcacaacaccagttgacttagcgaacccttttagcttagtcatgaggcggtcaatcatcttacgctcatccgattcctcagaggcagacacgacgattgatatgtggtcgagcactataacatcacaccctaagcctgttcgcatgtaggccagcttcgctaacagcctgtcagcttcggcctccgcaaaggagtcataaaggtggaacgtatcgtctccaaatagttcatcataccattcatcgaaacgtccgtcctctgcgatagccttcttgacttcatcagactgacgcagacgaaccttattgttcaagcccatcatgtcctgaatggtatcctcaacggattcctccagcatcgctaggcccacacgtttacccattcgcttgccccaagccagagcctgttgacgaacgaaggttgacttacccataccggaaccggaagtgaccataacgacttcaccgccacgagcacccaaggttctgtcgttcaggccttgacagccatcgaataataaacctacagcgtcctcggaggtcatagcttccttaacgcggtctttgagtgacaacgcagagacaacgccatctggcacccaagggttcgcgttccagacctgctccaagattgctttgtcttcacccatgatgtgacactcgttggcgtccttacacggcaacacggcaacacgaaccttgccagccgggagaacctgtgcggcctcttcgactgccttacggcctgcgtcatccatgtcgaacatcaggataatctgctcgaactggtcaaagtattcatagttagcggcgcatgtcttcttagcagcagaggcaccgtgacccaatgatacgaccgggtacttacagtcttggagttccatcacagtgagcgcatcaatttcgccctcagtgaccacaattttcttaccgccagaccagaggtgcttcaagaacaacgcatcgctcttgtggcttccggtggtcttaaagttcttgtccttatcgcgcaccttctgtgacacgatggagccgttctggtctcggtagtcggcaacctgatacattcggttgtccactttcgccagccagtagccagccttttggcatgtctccttcgagatgccacgggcagtcaggtcagagtatcgaccgttgctgtcgccgaaattccatacgtcatagctcataggcttactgcctcctgtacgtcttctcgttgataactttgcttcacgctctttgtttgcgggtactcgatgttcacacacgaagcaccattcatgcccgtcagagtacacagagttaccatcagaagacccacagttttcacatggagcatgaaacagaaagatactatcgtcttctcgttccattgtacattccttaatcagttgcgagaacaaagggaaaccgttaagtctccctttagtgagtgttaattattcctcggtgtgttcctccgccttgattgggtctttgcactgacactgacgtgacggtacactactcttcaacggcttatcacagcgaatacaaatcatcctcatggtatcaccctcggtcagatgtaaccagttcgttcttctcccaccagcgcttcaagtcgaaggacgggcaggctttgggtgcaacgtcatggtgagcacgaaggattgaaccctcatacttcgccagcagtgtgaccagcagactacgcagcgcttgcatttgcgcaggtgtaaagttggcgtcgaacttgcctttatcatcaatcccacccacgaggcatacgcctacggagttgtggttgtaacctttcacgtgggaacctacagccagttcatcgcggcctgcttccacagtgccatcacgcttgatgatgaagtgatatcctacgtctaaccagccctgctctttgtgccactgacgaatctcacgaacgccaatgttctggcttggcttggttgctgagcaatgcacaaagattgcctccgtggtttctcgtggtttgaattgaactttagccatttttctttactcctttcttagtcttaaatttatcgaacggaacctccttcttgggttctttgagccactccaccggaattagcttgtcagcaaacagaatgccatgcttctcacaccactcggcgtagcttgttgggctacctttgtagagctttgagcggctgcttgagaataccaagcgaatatccagttcagggtgttgctcacgaatcaaaaggtgtttcttgcggtcatcggaatcccacagccctttggtctcaatgaagatgccattaggtagcaggaagtctggagtgtataagtggtcactcgcagggatgacgtaagggatacgccaaagttcatagtcgaacttaattcccttactctcaagctgctttgagactttatcttctaggccggagcggaaagccccgaccttgcgtacacctcgcgcagcgtatgcgccagccattagaagtcctcgtcatcatccggggtttcttcgtgctcgtcttcctgccactcctgctcatcgcgggactgacgggattcactagcagtgtaaccaccatcttcgacttcatcggcccactcatcttcaccgccaccaccgaaggtagccagttcgaccagcatcacggactccagttgcagcttgacgcttgcgcccacagcggtgttccacttgtaaggcaccagagagtatttcactttcagcttggagccgccaccgataatcggaacgtcctgaatcttcttgcccttgctatcgaccacgaccagattgatgtgtttggtctctttggtcttcttatcttggaaagacgcatagcatttgaacttgaaggtagtagtgccatcaccgttatcgaagaacggcatgtcgccctcgtaaggtttcagtggcttcttaccacgctgtacctgcggcgggttagcttcgaactcttccacggcagcagcataagcctcttcgtgacacttcacgatttcatcgaccattgcctgacagcgcgggtctttattggaaagagtcaggtctaccttatagacaccacgagggttgccgaagccacgctcttcgttgccataatccggcttactcagataagcataaggctcagcagtgccaagaccagaggtgtaaattttcttcttgaaaccagccataatgtttctcctttgtggttaataattgggttgttccctttagtgagggtaattaggctttcacttctggacggatgcgagtcactacgaacccagcgtcctcataatgttcagcctgtagcgttgcctcttcgagagaccgggcgaataccggaacctcaaaggactcggtgttgccttctatcgtcagaaggtatttctgttctgagtacatgcagcgatttgcacaggagtggttctccatccctacgtccttcgcatactggcacccgttgttacactggctcatttattggcctccttaaagcgccgctcccacagcgcgtacagttgttggtaggcgttggcagcagcctcgtcaccagcctcgatagcttggttccacttagcggcacaccaatcgcagcattcacgaagcgtcataacacagccccttatgtttgtcaaacagttcctgatagaaagccgctttcttaaggtctttctccatagttgccagttcggatttcttaccagcacgcaggcggtacttcaaaatattcccaaggcagtacccacggaacgcctcgacggtcattgaccgggcgataacctcaatggcttccacgttgtcgaacagtatgtagtggttcggatgggtcacgtcagacttgacttctgtcttcggtgctttcggtgcttccacgttcgggccgactttaggtagcgggattagtacggatggatgcacctcagcctcacgaataccgaagcgaaccttgactcgaccagtgtgggagtagccctgcactgttccggtcagacccttgaacaaagggtttgctcctgaataacgaacggcagagttaaccgggaagcggctacgcatatcataatattcctgtaacattacagcacctccttaatccacttaacgaacagacggacgcgaggccagtaagtgaccacggcttccagatgcgggcgctctttgttcatcgccttaatgaactctccacgagttatcagcaggtgaacacgaggcgacaatgggacgaccgaaccaatcatcggcagcttagcgttgcgctcagaggccactgccgtagagcggtcttcacggcgaaccgaaaagataccgtttgatgtgttgaagtgtaaacgcatgatgttgtctccttaacaatcaggccaaatgttgtcgtcggcagccattaaactaatcgttgcgacgatagcgaataggataagccacatggtgtgtgtctcctgttagtgagggttaactcccggaacgaagaaaggcccacccgtgaaggtgagccagtgagttggttacattttctcttgagggttgtcctcagtgcctcggaacttctcgaagctagggtgacgcagggagccgtccggggtctcttccatgtagttgacctgacaggcccacccgttgtagaagtcttcaccgtgggctttaacgttggctgtgaactcgtccatcagtgcgcgagagatgttgttggcgtctactaaacgaccagtctcaagaagcacactaaagcctatcactttaccctcgttggctaacccttcggttccccaattgacaccctgaatgataccgtcagcttcacactcaggtttgagcttccaccagccagacttcttgcctcgcttgtagatgccttgcgggtctttcacaatgagaccctcgtgaccttcggcacgcttggcctcgtacagttcactcagtgaatccatatcgtagacctcgtaggtctcagcgataagccactcgatttccgggaagtattcaaccagaagagagcgcatggcttccacatgatatggcatcagcaggttctgtacatcgtagtcctcgccagactccgcaatgtgaattggcatgaccgcatacaggcgcacactcaggcgcttagggtctaactcaaaggctactttggaacctttcagcggctcaacaccaccacggtcaaacatgaagttgttcttcttgagccacttggttctcagtaggccagaccctgtgttgaagtctacgcccttgaccatcagttcaccatccagcatgaagccatccgggaagatgcagcggtcatcgttcagtagttgctgccagcgcttatcgaaaccgttcagatgttccagcgccgggatgaacttggatacgcgagacaaccatgcggcctcagccacgttgtcaaccacaatgttaccgcgcacaccatcatatttgatatcagccattaggtagccggaggtctccagcgctttcttaacggcagactctacgaatgacacagctttgaatgggttggtcttgaagatgttcatacggttgttcctcattggttgaaagttaatcagttcgaatcacaaaggccactcgttaaagtgaccttgaggattctcctgttagtgagggttattacttccagtgtttcaaatcgctgtgaaccttacggagccatgcagtctgcgcgttgatttgcacatcactgtcgctgtgctcgaaggttctggatgccaccggatgcccggagcgtgtgaacactcggagaacctcaccggatgacctgcacatcttcgctgggttttcatagctgaatgactccaccttcacggtcacgtcatggtcttcctgtagacgcgctaccgcatctttgtaatcgttcaggttgccgctatagatacgtcccatcattagttccactcccgtttctgtgagttaccgcgctgttgcttgtggcgtttcttcatgcggtcacggcgctcttgccactgctcgccatgctcgttgaccactgaatcgcgcttggtaaatttctcaaagttggtacgcatagtatcttacctcatgttgatgtgtattgaaagttaatcacaaaggccacccgaagatgaccttgagtctaactctcccgttagtgagggttaattgaagtgcttctcaatgcgacccttaacgtcttccttcctgtactcgaaggtcttgcgggtcttatcgctgtgccactgtgtcagcacgtagcggtcacttagttcctgccactgcaaggacaccacttcgagaccacaagtcccaagtcccagcttgaactcggtagacgtccagcctttgtgcggaacgttagccacgaacttgatggccttaatacttgaccgctcgcgtaacttctggtgcaactctcggttgtctgcttgcaggttcttcacaagttcatcgcgtccctcaaggtctcctttgagacgctcgattatcctttggttgtcacggtcgcggctccagcagtttgccagtttctcttctgcctccttccgcccactctcacactcttggtacatcttacgcatcagcttcttgtcgtcgtagtgtttccatgcgatgaagcccatagcgatgttgattagaatcagtgcgatagccataaagtaatcctcttagtaatcttaaatttaaatctcttaggaagtctttagggagaccttaagtagtctcccgttagtgagggttaatgctaagtgcttgttacgcaaaggcaaagtcagacttgagaatgtcttgcaggttcaggttccctttcttcggaagcggaggcatcttgtccagttgggtctcgtgtagctggtctgcaaactggtcatagaagtctgccagcacatcgttgttctcgtaggtgataaccatcgtctcacgtacagctttgaacagcttaccagcgtctgccgggatagtcccgaagctgtcatggatgagcgcaaaggactcaatgccatacttctcgtgagcataaacgactgtcatgcggaggtggctaccgtcctgtgagtgaacaaagttaggcgcgatgccagactcctgcttgtgtgcgtcaatgcctgaatccttgagggtattaatcgtcggttgcagacggaattgccctaagaaaatcatatcgagacgcttctggagtggcttgcggtattcctgccagaccgggaagccgtccggcgtagtccagtgaaccgcgcaacggtggcgcagaatctccttggtcttcttgtccttgacctcagcagccagcagcttagcggcagacttgagccagttcatcgcctcaaccgctgcgactacggtcacgctcaccgcgtcccaaatcagcttagccatgtagccagccgcttggttcggttgagtgaacatcaagcccttgccgctgtcaatcgcaggctgaatggtgtcgtccagtacctgttgacgaaagccgaactccttggaaccgtaagccagcgtcatgaccgaacgtttagttacgctacgggttacaccatatgccagccactgttgcgccagcgttgaggttcccagcttgagcttctctgagatttccccggtgtccttgtcggtcacggtaatcatctcgttaggtgtgccgttgattgcatcctgtttgagaatctcgtttactttctgtgcaacgatgccgtaaatgtcctgcacggtttcgcttggcagcaggttaaccgcccgaccgcctacctcatcgcggagcatcgcggagaagtgctggataccagagcaagacccgtcgaacgccagcggcagagagcaattgtagctcagaccgtggtgcgcaacgcccgcatactcgaagcagaacgcgaggaaacagaaaggtgaatcctgctcggcccaccaagtgttattgattgggtctttagcgcaagccagaatgtcgtctacgtgcttctcaatgaacgcgatgcgctcagggaaaggaaccttatcgacacccgcacagttcgcaccgtggattttcagccagtagaaaccttcctcaccgattggcttgcctttagcgagggtcagcagtcctttcgtcatgtcgttgccttgcgggttgaacatcggcacagcgtacacacgaccgcgccagtccatgttgtaagggaaccagattgctttcttgtttgcaaacttgttggcctgctccagcatgaactctaagctgatacggcgagacactcgcgccttgtccaagcggtagacaccagcagcggctttcttccactccttgagtgctgcctcgttggtgtcaatgtcgtccggcttaggcggtaactcttggcgctccagagatggaatgtctgcgaccgggcagttcttccagttcacaatctcgttgacaaccgcaagaactttcttgttgattttccatgcggtgttctgtgcgatgttgaccgccttgtatacttctggcatgtaaacatcctcatagcgcatcagtcccttcttagagtgagtgcgaatgagcgccaaaggtctgcgaccgttcgcccaatagccgccacctgtgattgatacccaaggtttcggcggtacgacacacggttggaacatcggggagatacccgccagagcgcctgcacgcttcgctaacacatcgacgtactcttgggccaattgcagtgcctcatggtcagagcctgcgttacctgcgttgtggcgctgtaattccaccagacccgtggattcaatcagcatttcaatcaggcgaatccctacgtgcatcgtggtttctttatcccagctagaccacgcctcgccaccaagcagacctcgaccaatcatatcggcctcgaccacctgcataaaggctttcttatagacttgcccgtggcgcttgttaagctgttcctcaacgtgcttcttgaagtgcttcgcttcgaggtcacggatgcgaccgaaacgtgcctcatcctcaatggccttccccagcataccagcagcggcctgaatggttgtcatgttcgtgctggtcagtgatgcaaggataactttcagggtgataaacgcggaggcctccggcttgagtaactggagcggtgcataggctacgggcttgcggcctttcttcgatgcgtactcttcgagccactcgacgatacgtgtggttaacttagggagaagcgtagcgagtaatggcttagcggctgcgttgtctgcaatctcgccagctttcgcttgacgctcaagcatcttgaggaagcggcgctcacctaactcataagactcatgttctaaagccagttgttcacgagccaatgcgctaccgtagtggtctgccagtgtgttgaacgggatagcagccagttcgatttcggagaagtcattcttttcgatgttttcgatgatgttcattgcttacctcattgtgaataaatcgtacctattcaggccaccgattgatgacctgtaagataagactctatcagccttgcagtctcctgtcaaggtatgcgtctatgtgtaacggtttgccccactgaatgcgcacctcgtcgtgcatcatcattaccgcagcagcgcggcgctccagttctgcaaagtttaggttattgtggtgcatccaagcgttgcgccagtgtttatcgccccacaccatacgcgccctaggctcatccctgcgattctgattggcgtccatgcgcatcttagcgagtaccttagcgtcacgtttagcacgcttagaggcctttctgcgccatttgatacgtgctttacgtgctacctgaaaggttcctttagggtcacggcgtgccttgcgtgccttacagcggtcaatcgcttcctgcgctctcagcgcctcaatctcggcgattagttcatccgggtcacagtggaactcacccggctttaacttgtcgtctgcgctgaatgataccgggtctgtgataatcaggcgtcccatctggtctttcatcatgttcccgctgtgacaatcgaacgatgcgatgcctaagaagaacttgcggatatccttgcaggtctcaatgaagccctcgcttatcgggtactcttcggcggtgtcgaagcaatcctcctcaatgatttcccgtgcggcctgaaagtggtgacgaatcttatcactttcaccgtggcaccagtcgttaagtggcgtcaggtagtccagtaccaccgtgtagcagcctgtatgacgctgaatgtcgtacaccgtagggatgccctcacgaccctgattcatacggcagaaggcagcataggcagcgcctgagtcctctttcttaaagcctaccttgatgaccttacccggtagcagtgcgtgctcataggctgcgctaaagtgaccgttgcccagcttgatgaaaccaacatcacgcatacgctccgccagtgtctgccagtagtccatcgactccagaccccaattgcccttggcctgcgtcagttctccgtcttgagtctcatcgttcacgatagcagccgcaagagccaccagcatgggctggcggtcatccaatcggtcaatcggcaggttgcggatagcttcgagtgtggcttgtgcttcggtgaaagtcatcgttcagtgtcctgttatctgtaagaagagtaaagagtaaattcagcccatttgacagcgcttgtcgcctgtcgtgcggtcatcttgcggtgtctcgttaagatgcgtttgaccttgcgtttcgatgcaccatacgccatagcatacaatgcaatctttacgtgctttgagttagtgcgtagcaatgtagaatactcctaccttgttggccttaaagcgtccgttacgttcacgaaccgtaaaccgtgggatgaatccccacttaaagtagctcagtgttgctttatggactaccagaccgtgcttaaagtctcgcataaagtacatagcgatgcacagataaaccagtgcgataaagagaatcatcatgcgtgtttcaccagttcgatagcctcgtggcctcgcccttctgcgtccaagtgttccatgagtttaaccatcttgcgatgatagcgagcggccttgcgtgactcagagtaccagccagcgaccgcaaagagtgcgacagcgataaagataaccattgctaatcctcctgtaatgtcaatcattccagcccgcacatgttgcttggtgtatcacacaggcttgataatcctcttgtgctaaaatcgggtttacccaatgtgtgacctgtttaccgtatcgcacaacataggtgcttcccattgacccgtggtaatactcacgcagtgttacggtgcattggccttctattttagatgttgccagaagtttactcatggtgttagtcctataagtgataatcataaaggccacacatacagtgcgaccttgagtctatcacttactgcacttgccagcggcgtccgaactcgtcaatcgtaaagcagccttgaagcggtgcgcctttaggaacctcttggaagctacccggcagacgttcagccttgtaaccgtcgattcctttagcgtacaccagaccagcagtgtgagtctgtgatttgtataccagtacgcaatcttgctcccactcattgcaagctaagcgtgcaacattgagtgcctgcgccttgtccttgcagcgtacacgaaccgttttttcctcagtcggtgcgcttgcgattgcctcacgatagcacccggtcaaatcggttgactcaacggagccataaagacccggtgcggcacgtaaagtgctaaccatgtggcggtggcgactcatattcacctcatcatcgaggttggaacggaaagctgacaccagtacatagaagacgttagcaggctctttagtgaaaatcatttggtgttacctcatgttagttcgtgttaagtgaatatcataaaggccacgcttttagtgcgaccttgagttattcgcttatacatcggtacactcaagagctattatccagattgttaaagagcgtgtcggtctggtttcgttagaccctagcggctttcagtgtcccgcctcactgtcgtttcaatgtggtacatcgtaccgtgcttacttcatgttgtcaaccattttgtttcgctttatgtgccgtggtgcgcttaagtcacctagaagacaccgaataggttggttgacgctatgcgatacatcttactgcatgttacttcatgttgtcaatgcctgttttcgtatgacttatcaggctgtctacttatccggttgactccggtatctcagggagtggctttaaggccgttgtcccgttgacgtgatgaataatagccttaagggttacttaaagtcaaccattaatttaaatcttttattaaatctttaattccctctttaagtatcccttattccctttagtgagggttaatgaaatgactacagagaactacagggcatcgctacaggttaacaatgggtctatcagtctggttgtctttaagatagcatcgctctttaggtctggtctttaggtggtggctttaggtggtggctttaggaggctaacagatagggacacatagagatgtactatcgaactggtacactaggacactctttaagtctccaataggcagccaccactttaggtattgactttaggcaacactttaggctatcctatagaccacttggagagatacccaaggttaaccgaaggttaaaccagaggggtagggctggctttaggtggctttaggagggctatggggggtactttgggttcttgaactgtgagatacccattcagatttttgtggtaaattcttaaagggtctctttaggcaaccactttaggtaatgccacaccataggtgagaccacaggcgcatcccgaagggatagctaggagacaccagaagaccctgtaagaccattacgaactacagggcatctttaggtataacctttagggttgactctacagggatgagttggtgtagtgaaactatacctacgaatccctcagagccgcttgtcgttcatcaacaataatttaatccccacaagagagtatagagcaaaaggccacttccagttgaccgaggtggtcattaagacctgcgtacccaagggcagcagtaagtaccagaagaaatcgccaagtgactctatgacgcagcagggcaatcagcaagcgtaacatgagccacctcctttcagttgctctaaggtagggtgattatacaatgataatatcaccaatcacagaggtagacttaaagtgcataaagggtcattgcataacctgaatgactaacctatatagtagctttaagtcccctctctccctttagtgagggttaatgcaaactcattgattcttaaggaatttcttaaagtgaccatccgtggtctaattgaatccttatgcgctcaatatgcataactaccagtcaatgaacctgttgctattcacatcgtcatcctcccaatagagttccataccgtcaaccatagaggtaactacatgaccagccgaatggattgggtgctccatgtgttcctctaagaacgcctcaagcacctcagcctccaccttcacggcgtccagttccatcgtagagcgtaagaactccacacccaatgctaacgcatcaagtcggtcgtcatgtgccacagcgcccttctcacgggccatacgggtcaactggtagaacagcgaatagcgaacgtcatgcttaccatcagcgtcacgggcagtctggtagtcctcacgaatcacctcgtcacgaatcacaaggcggtgcgtagagagcacaggttccaacgtatcacaaatgcgtagttccttcataccgcgagcgcgaatctcttccatagaggctgcatggtgtttcaggagcacagggctgaataccttaccaaacataccatccccgaagttactctcgaagaccactgtctgaaccttccactgcttcgctttcttagcgagggactcaagggtcttatcggaataaccatcgcggaacccgccagcttccatcagatagatgtagccattcagggtgaacaacactgcgtaacctgtctc

SEQ ID NO: 8 - DNA, 49385 bp, Unknown
  bacteriophage strain capable of infecting bacteria of the genus Klebsiella
taacgaggggagcaagcacaaagcgagcgcggttatcgatcaccaaatggggttgctgaagggagttagcgacattctgatcctgattgggttcggcggcaaatacccgttcgcggccatcgagctaaagcgccagggcaaggcgcaggcgtcaccagtgagcaaggagcaaagggaattccttgctgccgttcgccgtcgcggtggcttcgctgccgttgcttatgggttcgagcaattcaagatcgctttctgcgatgccatcaaatagcactttttgttaaaaacgcccggcgaaggccgggtattattaccccatcgaaacgaagaacggagaaacatcatgaaaaacttcttgtgggtaatcgcatcaatcggttttggtattgtggccactggcttcggcctttgggtaattactcttgctggtcattttaagggtttctaaatgaaagatatcgcagacaaagacactcgtgacgcattcatcacgtttgagcaactggagcgcgaaacgtttattggcaacgcccttgctactggcggacactatcaggctgtcaggcccgacaagttttaccaggtaacaggaaaccgatacgctgggagcaaaacgcctgatatcgtgcgcgataagtgggcgaccgatcgcagcctgatcgcatacatggaagagcgttacggcccttacgatcttgatgccgccgcagaccaaagcaacgcagtttgcccgaagttctatgacgaaaaaacggattgtcttaaacgctggtggggtaaaaacaagcacgtctggttgaatccgccttactcgtttccagatccgttcgtgctcaaagccattgagcaaatggagcacgacaaccagatcgacattctgctacccggcgacaattctactgcctggttccgtgacgcgcagaagatggccgccgaaattatctggattgttgccgatgttgaagaggatgatgacgggaaccagttaagccgatccggtcgcctcgccttcatcaatggattaagcgggaagccagtcgacaacaacaataaaggaagtgttattttcatcatgcgcaaactcaagccgggagaggagcaaaagacgctttacattccggtaagcgagatttgcccttcattagctaaaaagcgtatgcgcaaacgtgggatctgaaaaatggaacagatagaatctttcaccgagtatcttcggatcgttgttgaattgctggacaaatacggcttcattgggacggatgaggaaaagttagcctttgctgacaccatcgacggaacctacatggagttcatggacaacggaaccccggtcgctgactggccagaaattcttgaacgagaattgattgagtttaaatcgcatgaaggcgcggagtatttcgcaaaacagcactaattgctaaacaatacccgccgcgtgcgggtattattactccatcaaccaatcaggagcaaacgccatgaaaacaaaaaccattgcagacaccatcaagatcgtaccagcaaaagcgcaagtggtatctcgccacctggttaacctttctcgcctgtgcatggccgactacatggcgaacccttcagagaatggccttgatggtgtggtcggtgagatttattttcgcgccgggtacggccttgaaagcgtggccatgtatgagcaaatggccgaaggtttttgcatttacggtgacgaatgatgattgtagagactggtcgcgctgccgtatggcagcacgctaaagaagcaggaataagcgatgatatcgtgaagatcgcaaagtatttcgatatcaaagacatatcaattatctttggtgggaagctcacctacctacacgagcgcccggtgaagcgcacgcgaatagcagtagcaacgcgagcggaggcagacgcgctgaagatgttcatacacgagtcaaagcagaccaaaaaatattacaagtagcggggaggtgaagaatgcgatatattgcgatcctgattacggcggtggttctcactatcgcaatctttaactacgcaattcaattgggataaattatgtcacctaaaatcacagacgaagaatttttagccgcccgcgaggaggggaaaacctaccgcgagatcgcggaagagttcggcatgaacattcgaagcgttgagcgtcgcggcgttcgcctggcgcgacaaggacacctacacggaaacgcccacgttgcgaagcatatcccggacggcttcggcgtcaaaggcacgtcgacgatgattcgcgcggacggctccgaggtcgttcggtgggttaagtcggaagtagaccgcgaccgcatggtcgcacttatggaggcggcgcaggcagctttctgcgaagatcttccgcgagccgaaccgcaaccgctggatgaatcgaagttctacattgaagatcagcttgccctgtacccgatcttcgacctgcatattggggcgatggcgcacaagcacgaatgcggcgagaactatgacaccagcacggctgagaaggttctaaaccgcttctttgattattccgtgtcggtggctccgcaatcacaaaaagctgttttgctggtaggtggtgacttccttcacagtgacggcctggacgcagtaaccccggcaagcggtcacgttctcgatcaggatagccgatacgcaaaacttgtttatgttgccattcgttcgctgcgtcgcgcagtgtcgctactgcttaacaatcacgcagaagttgaagtgcaggtgattgaaggcaaccacgaccaggccgggatgatctggctacgcgcagcgctggcggcgttctatgagaatgagcctcgcgtttttgttgatgttagtccggcgatcctgcatcgcaccttgtggggcaaaaccatgctgggctatacgcatggccacacgatgaaaaagccggaaacgcgccttgctgcgatggctaccgacttccgcaaggagttcggccagtgcgactacatttacacgcattccggccactggcatcaccagactgtaacggaacactcgttaggaattgacgaagtgcatggccagttaggcgcaaaagatgcctacgccgcacgcggcggatggcgttcataccgccaggctgcggtgattctgtacagcaaagaatatggcgaagtaggccgttttatctaccgtccgaacatgtaaccacaacggccccgcgaggggccaacaaggaaaaaccgatgaatagaaatatctgcattttcgatctcgatggcacgctttccgacggaacccaccgcttgcacctgctgccgaaaaaagatctccaccttacagaaagttggagcgaatttaatggcgcgtcaattggagacagcccaatccaaagcactattgacgtggcgaatgcgctttatcgatccggaatgaccgttatcatcctgactggccgatccgatgaggtgaagaccgaaacaatgatttggcttgaccgctacggggtgaaatatgacagcctaatcatgcgccgcgccagcgataaccgtaaagacacggtaatcaaggaggaggagttacgcaaaatcggacttgatcgcattgttgcggcatgggatgattccccaaatgttattgcgcacttgcgcggcctgggtatcacgacttaccaggtctgcgactacggcgaaaatcttcacgagcacttgaaatctcacggagtagacaaatgaaaaatgtaattatcctcaacggagcgccgggcatcggaaaggacactatcgcggaaatcatctcgcggaagtgggaatacaagaaccttagcttcaaacagccgatgtttgccattgctcgtgctgtgctgggatctactgattttgcacgctttactgccagataccacgaccgcaagcacaaagaagtgaaatgcgattttttgggcgaccgttctccgcgtgaattcatgattcacattagcgaaaatttcgtcaagccgaccctgggaaaaaatcagttcggcaagttgctttgcgattcggcgctaacttcgccgtttaactgcatcgtcagcgacggaggttttgatgaggaggtggagcacgtcgcagcgcatgaggcgcttaacgtatttgtcgtccgcctccatcgtgacggcatgacctttgagggtgatagccgcaagcatattcgacgcccggatcttatttgcgacacgtatcacgagcttgattttgatatgaccactggcgagccggaagacgacgcgcaaaaaatccttgatatggtgtcagatgttgcattaaaattataaagttaatgcctttattatcaccaccttaacgattgggaaccttgatgggttcccttttttttgttcttaatttggcctaatgcatatatcatcaccttaccatttaactaacagaggttgcatatcatgcgagaattcatcaacgcggcaaccaatagcagcggtggcgttgccctcgcgggatctgcaaccgggcaattaatcattgctgccattggcttatttttcatgattctattcggctcattcggcgcgtggttgcgctggcgagattcaaaggcgcttcgtgaagcgctggaagccggggatatcaaaacggcgatgaagatcaggagtaaataacatggggattaaaacgcgggttacattcgcggcggcggtggcgatcgcggtcgcgttcctccccaaagtggaggacacgaaatacaatgtttatatggatatcgctggcgtcccaactgtatgcgaaggcatcacaggcccggacgttatcaaggggaaaacatatacccggtcagagtgcgacgcgcttttaactaagcatatccaggtggcgaagcgaaccgttgacagcaaaatcaaagtcgatgttccggacaccttcagggcgtcgatgtacagctttacgttcaacgctggcggcggcgcatattctggcagcaccatgctgaagttaacgaaccagggccgattgcgcgaggcgtgcgagcagctatatcgctggacgtactaccgcaacccgaaaacgggaaagatggagaagtcgaaaggcttgcataatcgccgggttcaggaatatcaactatgcattaaggaactgaaatgagcacattaaactttcaacgagcgctggccatcggctttatcgtgtgggcggctgccgtcgtttccggttgcgcgtcaagcgtcccaatcctttccgatctggttggtagcaagccggatatgacggcgcaagtcggcgcggagaacgtgaaacaggcggttggcgtgaccaacaaaacggacacctcaagcaagcaggagaccacgttcaaagagtcggctgtaggcaaggttgacacgtcgaacaagaaatccgtaacgacctccagcattcacgccaaccagatcacggcggacaagatcgagatccggaatgatgaaagcggaagcctgattccgtggctgattggtggtgttggggtggtaatgctggcgatcggggtgttcggtctttggcgggaacgaaaaaacaaaggggcgtaatgcccctttttctatatgtaccgtttgacgtgcaatagcgctactccgtcttcatcgttaagaccatgttcaaccgtgttggttgcggccattccttgatagagcaagatgagcgcggcacgcaagtaattttctggtgtgatctgtttcacgcaaacaagcctgtgaacttccgttatcagatcttccacctggtttcccgaaaagctgttcatcactgagttggtcaaggtgcatcatctcccacatatatcggttatccatcccttcgaacgaccggaaatcaaagcctatctccctgttatccggccccgtacaccacacagcgccgttttttccgtcaaggtatccattcgtatagcttcgcgctaaaaactccttagagaccattgaggcgaacatacgttgcgacacgttggcggcttttgccaggcgaggcgcttcgcggtgcgtgtaaacgaacttcgcaaaatcctgccgggtgaactcccggcgagattcgcagaacttgtaaatgtcaagaatgaacatcaattacctcatgaacgacgggttgataaagacttcggaatccatcacgcagataaagcctaattcctccatcttcggcaataagcgttccttaatctttttgctcaccccggcctggcctttgaagatcttcaggttgcggcaggcgttataaatgccctggacggtcataacaccttttgcctgtttgcaacgactggcgataacgtcatacagcgctttaatttccgctccctcaccagcaaagccggaagagtcagccgacgacaaatacgttttgctcaattcatggaacatgatgatcgcttcgtcaatggtcgccgtgtcgatcttcttcgagcgcttcccgccgggttgccagttccggatcgtgtgaatcacggaagccaggcgcataacctgcttatcaaacttacccatcgcaccgcgaagcatagtatgcgaatactttccgccgtcgcctaactccggttctaattcctggcgggccttgttcagtctccgcatggctgcatccgtaacctgcaacttaacgtttgattcgctcataatgtcatgaatcagccggaagtaatctgccttcagtgactggtcgatcggctcataggtcgaattcccgttttcgtcgatgaacacgcgctcgcctaaacgggtttgctcacgaaccaaaaggaaacgctccgagacaccgatcccgcgagaacccgcttgcatgatggcgtcgatggtttcatcctgtgcaattacgcaaatgcagcccaaagccacgaatgacatgttattgctaacgtcggcacgagcgatcgatacgtggcctttatcccatgctttgagcaccagttcgctgttcgtcttcttgccgccatcgttgccatacgtgatccccaaaaggctgttaaccgccgtcgcctcatccgagataacggcaaagttgccctggcggttgttaatcttcgccaggccttccggggtggtatcggataccgggaaagttagatcacataatttttcaagtttctcttccagttcgtcacgatcttcgaaaagtttcaccatatcagattgcgataactcccctttgagcgcctgcttgttggcggacagcttcgccatgattttcttacgctccttcttgcgagactcgttaatgcgctcgacttcggcgacgatcggatcgatggccagcgagttaatggcagacttaccagcggaaggcggctgcgacgtgataacgtaaagcgttgtcggttgctcgctgccgtggtactcgacccaaaagcgacccatcatcgcggcggacacggttccgagaaagtgcatgtaagcggatgattccgggaactgaacagaacgcgctgcatttagcgccagcttgccgaccacatcgtaatcattggcgatcgagattgttgggtatttatccgcgtttacgtcgatatctttgggctttggccagaatgaaacggagtcacgatacccgttcgcacgaatcgcaacgcgcaggggactgatcccctccctttctgcgatggcgataatatcttgcggtgatacgcggtcatttaaaaacatgcccttgctcctgattggttaatcgttcggctaatcatatgccgtattaaatccgagatccagtgataatctaaacacgcttgaaaaacgcgcttggattatcggggcgcatggccccgaacccgtcacaggtatttagcttcgaaagtagttccgtcagacacactgaagccaacttcctcgcggtacagcgtccagcggcatccgtcacggtcgaagatgtatccagcaaccgcaccgagcgcacgaccactttctacctggtagcgcttgccgacgctgaaggattttttcatcgggttgctatggtcaaggccgacgcattttagcgttttggttttgagttcgatgaacgtcgcaaccgccgctccgccgtctccagcaataaacaactcgccgctaacgcctaccgacaaaataatgcgcttcttcttcagttctacgttgtcatataccatcattgacacgttgccttcatcgtcgacgtgggcggaataaaggttgttttcatggatgttaacggcacggcttgacgtgcatttaatcttgattgacttcgccatttattttctttctcccatctcgatatacaggttaaccagatccagaaagtcagctttatttctgcaactcaatttaaagccaacgtgcgattcgatcttattttgcattgccgccatcgttgctccgccgttatttatcttcagaacttcgcggcatacgtcagccagtttttcagatatcatatttcaccaccgtaaatttagtgtttttgcaagcgccttcgatatcgctaattaggcgattcactctgatattaatcatcgttttgtggtgcattacgtcaacaatgccgacaaccgttaacaccatgattgaaaagataagagcaccaagaccatgcatagaaagtagtgcagccatcactgcgatcgtgaatttcattccggttttctccgttgcatttcgatgtagtaactatacccgcaattaagcgggtatttttaacaaaaaatgctattctcgataattcgcctggaacacggcgcgggcaaaacctcgcggggtaatcgagcgcagcattttagtcctttctgaccttccgcccaaaaacttccaggcccaaaagaaattcacgccttctaccccatccggaggcgggagccgtttcggttcgacaaaaccgtttccgtgccatatgcacgttttcttcgtgtaattgtcacagtggggcatttttggatgccacacaggttcgttcggagaaacatagccgccgaagtcgcgcgggtgaaaatagaagtcaggcttgcgccatagtgacgacaattttccgaccgggttttcgaccatccaggggcaaccatacttattgcctaattgctcgaccatcttcgcatcatctgcggctgatagaacgtcattatcttgccttacgtgcttgattccgctatgcgctaacagcgtgcatgacgggaaagcgaaaatgaagtcaggatcgggaatgccgagaatcgatcgcttcacgtcaaaatccttgtcgatccaaatgttaacatactggatattggggtgaaccattcgaatgctgtattctccgtggtcgccggagtcggcattgaagcaatacaccttgcatcccttgatggcccacggcaggcccatgatgcctgagccgtcgaacatgcagtaaataaccttttctttcatgctttccacgcctcaatgaacattctgttcgattccagcgtcagcgtgacgccagccagggaggactgaacgaggcgaccgcccggaaccgtcccgatgatgtagcggcctttcgacttcgtgatcgtgatctgagtgaagccggaggcgcggttcatgcggagaacgacgcggccatgcgcgttcaggacggcgagaatggaatcagtcttcggatggttcattgtgtagctccttcgcttgttggtgtggggatagtatgccactatcccgccatgttgttttagcaaaacgtgctatgccggaacgcaggtcgcgtaatcctggctgatgtagatcgtgcgctgaacgcgaggttcatgatcgccgagttcctggatggtaacatcgttgcttcctacccggcacggaaccgatccgaagataaactcgccagtctgcttgtcgttgatttgccatacattaccgccctcctttttgacaaccaggaaaggtgcgctgtctgcgctgaactcttccgggccacgaccgtagtaatgcgtgatcgcagctttggccgcagcactgaaggcatcggtaacgtcattggtcgccttgtcgcgcatggccttgatatgctcttccggcgatccgatgatgtaggaaaagctgttcgaaatggtaactgttcgcattatattttaacctcgttttggtggatgaagtcggcgacgtaatggcattcgatcggattctcgatacccgcgagcacctcgcacgacccgttattcagtagctggcaatgctggcactccgcgccgccaacactggcaatgacaatggcgatcccgttgcatgaaccgccgaacattctgtgcgggaaggggtaagcatcgcaggtgcaaaccacctccccggcccgccgtttcctcatacctggcccttctcgatgcagaaaacccaatcacgagaatcaaccgcaaagcgtgcaacgccgtcgagcaccacgaagacagtaaacccgttgacgccgcgccccttctcgatatcggttacggtacggaacagatcgcttgcgccatattgaattttatccccgacgactacatccgcaaatgctttcatggttaatctcctgactggtttcgatgggttaactataccaggcctttcggcccggcgtttagcaattcgtgcttatttcactgctttcttcgctgccttgtacgcctctttgaaggccggaacatcttctaccggaatccagaagccggagccatagccatcatcgtagcaagggcattggtcgcagtagtcgccccaggttttctcttcgccgccgacagagaatccagtagccatttcgcataacgcctcctcaaccgcttcgatcttgtcggcgtcgctatccatgataacgaagttccacttgccgttatactcgctgcccaggtttattgattcgcgttgaagtttcatagctttagcccctctggctcaattcgtttcgttgaagtaatcatagcaaagtcgatcgggttggttttaacaaaaaatgctattcctgcgattgctgattattccaccgattcggaatagtggaataggtggtgattgcacctgattccctggtgattagttttgacgaatcatgattgcttttgattgtttcattctgtgcaataacttggtggagtgtttcagtatttgcaacgaattgcatagatgtatgcaccatgcacgcaatttgccgatcgaagccagccaaaacgccaggtgtgtttcacaaacatttacgtcgtgtggtaatgtgggggagaaataatcttacctaaaaattgcgcaaaaagtgaccaatataagcctataatagatatataagtatatgataaataacaatattattattattactctttatctttatatatgtttggtaagatttctccgggtaggttatggattccccttgcgccagccataaattttagatgttccgccgcgaaaaaatgtatatagggatatataggggatgacagcaaatcttaccaaacacgccgaaaccctttgacggcaaggcctgcggcctgtattatcaccttccgaaacattaccaaacgccgtaagtgtgggggaaacacaaatgcaatataaaggctatgagttcgaagaagtcgacgtgtccgagtggatgcagtacgacgcagataagcaagccgcttaccatgaatggctgcaatccatcacgtttggcgacgccaccaggccagccggacggagccaggaagccgcgaagccggaaggtacattcactggcaatcgctcttccgagatccggcgcatgttcctggatggcgggcggcgtatccagatgacggcggaggagttcgcggagaagttcggcgttcacccggtcgacaaccatttccgcaggccgttgctgaaacttctggagccgggagaagtgttgcgggtgagcctgggggcggggttaatctccgtctttaccgagttcgacgcaatgactggctcacacctggaagctgaggcatacaggcggcagggcgctatctctgaacgggaaagaatccttgccatcattgacgaagtaatgcccggcggcatcatgctaaaaggctataagctggcactaatcgccaaaatcacaggagaataaccatgaagctatatccagaccagaacgacccggcggcacctatgcgcctgggcgacacgctaatcgacgaacaggaggttatcgacgccatcgccactgcatcggacgacgaaaatccaaccgccctggagtgcgttacagccgacttgctgttaatgtcatttctgccgggatctgagtcgtatatccagcacatcaccgaggcgggccaggtagtgacgaaaccggaattcatcggcgcgtcgaacgtcctggccatgatggccgatgagtcggacaacatcattagcctcgactatccgcaatagcactttttgttaaaacccggtcagggagatcgggtattatctcttcatcgacaacgaaccgaggaaagcgaaatgattactctgatcacctgggaacacgaaaacagcaagccagaagtgcgcgaattcgagaccgtagcggcgtgctacaacctggcggcaaacggtggcttttacaaggcgcagatcgttaacgagttcggggtggtcgattatgaattttaaggcgagcgatgtaaaacctggcgtggtctacggatcgcgcctcaataaccgcctttggcgctgggatggcgaaactatgtggactaaaggcgagggcgatgttatctggcatgagtgcggctggccccaccccacaatgagccgccttgatatcgcttattatctttcggttggcgacatgcacgaggtgggagatagcactttttgttaaaacacgatcggggtggcttgctatagttaccccatcgaaacgaatcacggagaaacacaatgaaatcttgcgaatatgtcaacacacttaatggcctgatctactggctggaagatggcgcagtgatgatgcgcaaggatggcgtaaacatcgcccgtcaatccaacatgacggcggaaaccttcttcgagatggtcggcaacgatatgatgaagctgatcgaggtggagccgaaggataagggcatgaccatgcttcagtttacagaattcctgtcgagaatcgacaaaagcgccacgaccgcaaccgcacagacggccatccagggcggagccacccacattgccatcgacggtaacggtgacgtcttcgcattcaagatgcgcccgcgccactgcctgccgaaagatgatgacgcaaaggattacctgggcgaatggcttcgcggttcggagcagtacggccacattgcgcgaacagtctgcttcctgggtaacactggccgcgagcatacaaactggcgtgaactctgctaccagattcctagccaatagcactttttgctaaaacccgatcggggtaatgcggtattattaccccatcgaaacagaggagcataaacatgatcggcaaccacaacaacccactcaatgcagcatttcaccgtcgcgcggttgagcaacacttccacgcgctgaaggtggtgtgcaacgagatgaatcttatgcttgacctgccgtcatgggatctgcaactcgaagactactatgacggcctccgcgtcaagcgtgacgatatcatcaaccgcctgcgcctgactggaatgtttctgtaaggagaaaacaccgtgcaacaattcaaatctcgcggcagggtctacagcctgccggataccgccactcatgccgcgcccggcgtatgccacggcctatacttcatggatggcggcaagtggttcttcattggcgatcttatgacggatggtgtgcagccgattctttgcggcaaacatcgcggattcgacgattatgctatcgtggaactgaagccgaagcgcaatccgttcggtttctggaacaaaatcaaaggggcgatcttcaaatgaaccaattcgaattcctggcgcgggcgcaccgcgcgcttgcaatgtacgccttcagcatggatatgaagattatcagcattgaaatcgagtcagacagtattagcattttcggctatgtgggcgagtcgcgccacgttacaaaattcatcttcccgtcgctggacagcctggagcatgaggcgttcggtttctgaatagcactttttgccaaacgcccggtcagaggatcgggcataatggccacacaccaaacaacggagattcaccatgaagcagatcgtcaaaaacgcggttgtcgccatcgtcggaaccaacttcgaaggcaagaaaagccgcattcaccttttgcacgttggcaatgatggcaaaattcgcggagctttccattacggcgaacgcggggagcgccttcacagcgacctgcattccgtccgccagctaaccactttcaacgaatggcgaacccatcgggaatggctgccggaatatcattacgaggggttgattgtcgaatcattcgttgccgacccaacgaaacttaccgcccgcgactataagcgcatggcacgcaaggcgcacaaactaatgaagctcacgccagaagatcacgtatggcatattttcgcaaatcagctttgaggtagttggatgatacgtttatcagacttcgatcgccaccgcttaaccgggcaatttggcgaaaagccagtaatgtgcaagatctcgaaggtaaaaggcgaccccatcgagcaggccagcacgcttagaggcctggccatgcgcaaccgactttacatccaggtgcgaggcggactgttcgcaaagcaggttcattttgcgtatggaacagggttctacactggcggagacggagtaaatccagcgccgaagaaggttaggccgcgcgagataatcgaacacggctacgtttggactaacgggatctactaatggaaacgcttaaagttatctgtacgcacgttggctattcgccgctatccacctatttcacacctggccgcgagtatgacgccaggttcggccctggccttgatgaagtatggattttgcaggacgaccagggaaccactgaggatgaggaattctggccagcctgccgtatgccggacgaaaagatcgccatgtacgccaataggccatacgaaaacaacgttctatttgaggtgaaagtatgaaagtaagcaaaaagaaactcgcgctgtattgggccttcttcctggctggcctggccctgcatgacagcgtgggctggcagacgatcggaatgctgtgcatgattattggcgtatgccgcctgtcggagattaacggcttccgccggggatatcgggcagcgttcagcggtgaaaaagaatagcactttttgttaaaactgccgtaacgtcatttgataaagtggcgttactgaagtgaaacaatccaatcaggagcaacgcaatgaacgacaatttaatcgcactgctggaagaactgaattcctacggctgcgcatacatcgagctttcgagcgagcaggttatcgaagtcgcaatcgacgatgacgccgggttcaccaggttaagggtggcggcaggggccgaagaggaattcgaagactgcggcatccgtgaagtaactaaccttctcgaagttcaccaggtgaaggagatccgctaatgaacaccgtcaagctaatggttgtcaacgcaacccgcgagcgtgaacgccacctcatcggctgcgtattcgatgccgtcgaggttcgcgaaccactcggaacggttcacgtaatccagggcggataccttaacgaattcatcgtcaacccgctggatactgacgaagatttgaccatccgtgttggtggcgagccggaaaacgcgcttttccacctgcggaaagtatcgaaggcgtcgcagcgcaagttgatggttcgcgcactgaagcgcatagcgaagcagcgcggatacaccgacgcatacatccgcaagttcggcacgttcgctggcgtaggcgattgggcgcggtcatgggccgacttttacttcaacaaatccggcgaattctgtgccgcgcatactgactggctgcatggaaccgaacacgatcccgttaacggccacgagtggtacgaattcattgaggcggaattagacgccctttgatagcacgaattgctaaaacgaacgtccggggatggtgcatactatccccacactaacaagagatggagcctaaccatgaacaccacacaaattatacacctgatcccgtccgacaacttcgccaaagacgacgacccgctgttagccgccgtcattcgcgccgggatcgattgggcgcttagtgatgcctcgtgcgaatcattcatgcgtgaaccgttctcacgaatcgcggagcttgaacagcaggttgctttcctgactggtgaacttcaggcggctatcgccacgatcgagaaggttcgggaaatcatgcgcaccgaacctggctatgacgttgaagatcacgcgcgagttttgcgcgtgatggccgacgctttcgcaaagctccagcaatagcccgaaccacaaacacgaaccggggttgctgcatggcaaccccatcaaagataaggaaaaacatcatgatttacgcaattattgccctggtggttcttgttctggccctgtatgcgtgcggctgtttcctcatgcgggccttcctgaaatctgcggattctaccgacaaagaagatctttatcctgtgctttgctggccctggattacactttccgccgttggcagcgtgatcatttcccgcaattttaagtggtgagatggcgcttgggttccaaaaattgatgcccgccaaatagcacgaattgctaaaaccgatcaggggtaagctggtatagttaccccatcgaaacgaaacggagttacagcaatgaaaatcaaaatcaccaaaatcgacacgctcaacggcgacggctcaattacactggaagaatgcggcctcaaaatcggagacgttcttgatgttgatggccacttcaatgacggctcctactgtgtgatcgctccgcgcaatagcgaattcatccaggctggtgacaatatcagcgtgagcaaagacgaatgcgaggttgtagaagaatgagcaacaagatttgggtgctgacatacactatcggaaccaacgaggggcgcaaatcgcgccgcctcatctgcgacaccaaagagcgggcgattaggcagcaaaccgttcttggtggcgaacttgtcgagtatctccgcaagcctgaagcgttcaaggtgaactggccggaaggaatggatatcaacggcgctttagcgagcctgcgtgaattgcagaacaacccgaagacgtggagcgactttcaatgcctgcgggcggagccggaagtgaaggccgacccgttcaccaatattcgggcgcagcacgcggaatggtcggatcgccagttcggtaacgttgggccagtcgggccgctcaagcacctggcgaaagaggcgatcgaggccgccgaagcgccggatgacattagcgagttcgccgatatcctcatgttggtatgggatgcaacgcgccgcgccggattcagcgatgagcagttggccgaagcggtggcggaaaagctggaacggaataagcgccgggcgtggggcgaggtcaaagatggcgaaccttgccaccacgtaaaaaattaacgaaatcgaataccgtttaaagcgcctgtaagccattctggcgggcgcaaatttaaggagtgcgattgtatgcctgaatactcaaaagtcgaagatatgccgattggcgcaaccattacgggaatttgcatgagcgagtcggtcgacgccatcaagccactggcgttcccggttacgcaggtggagacggacagcagaaaagggttcatcttcatctacaaaaatttcaatagtccgctgcgtgttgaagtgttcattgctcgcggaacatgggtagaatgggagaaggccaaatgttcggactgaatgaagcgcagtacaacgccgtgaagcgcatagcaaagcagatggccgcagaaacaaaagacgccatcaagaaggacaagaagacctacgatcaggtcgccgcgaagatgatcgataaacattgggcgcaaatcaacacgctggttactcgcggccagtttatctggatagctggctacctggaaggccgattcggtcgcagggatggcgagtatgaataaaaaacagccaaacgattcagcgacctattgacgcgctcgcgctgaccgggtaacttgaaccacgtagacacaagaggcggtaaacatccgcaagtctagccccgctttggggcatttacaaggtggttatgatgcaatataagatcatgctcacggcaagaaaaatgggcggcttttgcaagtcctgcattcaagagtttagcatgacgattgaagcgaacgacaccgccgacgcggtggagaaagcaaaaaagcaatccggcgtcaatctggatacgcacaaaatcaacataaactacataagggaagtcaatcaatgttaactctgattattgcttttttaatgctgttcataggctatcacgttggcgcggctcatcttgtcgagcgcctttcaaggcgggtacatgaaggcacttttgctgccatgttctacaacaagaaaacagcacgttgggaaaaaattggcgacccggaaggtgtcgcaaaacgaatagccttttcgccgcttccgtatgttgactgcgagcctttcgtgaaactccagaagacgctgaatcggcgaaacaaactgatatgacaaaagaacccgcttcggcgggtttttttatgcccgcgatctgatatactcgcaaatcaacacagaaggagggttacaaatgtctgaagaacgtagaaagcgcgtaacgaaatcgcactttgcaggtaacttcaaagcgctgtatgaaaaagaattcggcgttgtgctggggcgcacggcagagatgacgccggaacaattttttgatatcgcaaagcgttacttccagtgggcagaagagaacgcaatcaaggcggcggagacggcgacgtttcagggcgacgttaacgagtggggcgtgaataagccgcgcattttcacgctcacagggttaagcctgttttgcggcgtgaaccagtcaacgcttgggcgctatcgccacgacccgaactatgcgccagttatggagtttatcgactccgtaatctatgagcaaaaattccagcttgctgccgtcggcatgattaacgcttctttcgtcggtaaagagatggggatcgataagccgccagtgctgaacatcgacgctatcgccggggataagaacgagatcaccgaagagaaattagagaaagccgtgaccaatattcttgataagctgtaagggtaggctatgaacgaaatgatcatttgggaagacctgtcgccagccgataagctggcaattaaggcactgagtacgcgaaacttttcgctattcctgaaaatctggttccagatcattcagggcgaaaagctaatgtggaactggcatcactcctacttttgccacacggttgatgaaattatcgccgggaagcgcaagagcacgatcgttaacgttgcgccaggctccacaaagacggaggtgttttcaatccacctcgcgccgtatgcgtatctcaagtgccggaaggttcgaaaccttcagatctcgcagggtgacgccctgtcaaaaggcaactcggatcgcgtgattaagatcttctcatcaagcgagtggcaggagctatggccatcaaagttcgggcgcaagcagatcgatgaatttcaggtcatggacgataacgaccgcgtaaggcttgaaatggtctcccgttcgtccggcggccaaatcgtcggtaagcgtggcgggtacatgacgccgggattcagtggccttatcgcgctggatgatatcgacaaacccgatgacatgttctcgaaggtgaagcgtgaaaaaaaccacgtactactgaagaacaccattcgatcccgtcgagcgaagaagaagaagggcgacgaaacgccgatcctgtctgtacagcagagattgcacgcgcaggatgccacctggttcatgatgagcggagggatggccattgacttcgatcgcattgttattccggcgatggttacgcgggaatatggcgaatcactccctgactggttgcgacctgagttcgagcgcgatgtactttccggcccgtcggtggtcattgatggcgtggaatactggtcgttttgggaggagaacgaatcgatcgagaaccttgttgcgctacgcgatgccgatctttacacgttcctttcgcagtatcagcaggagccaatcgccctgggtggcaacgtgttcaagtcggaatggtggcgctattacggagacagcgacaaggcgcacgagccgcgcccggacaagttcgaatatacgttcatcacggcggacaccgcgcagaaggtcaaggagctaaacgactactctgtaatgtgctattggggcaagtaccgggatcgcgtctacttcattgacggaattcgcggaaaatgggaagcgccagatctccgcgttcaggccgaagcattcatcaagcagtgctggcgtcgaaacaaggagtgcggaaaccttcgccggatctacatcgaagacaaggcgagcggtacgggtctaatccaggatttaacgaaggcggtaaacggcatgggcgagatcgtcccggtgcagcgcgataaagataaggtcactcgcgctatggatgctcaaccaatcatcaagggtgggcgtgtcgtgttgccggacaatcacccgttcattgcagagcttgaggcggagatgagcgcgtttacatatgacgattctcatccacacgatgacatttgcgacaacgtgtttgacgccgcaaacctggaaatgaacctgagcgatgatccggtggagcgaatgaaacgccttgcgggattgaaaaagctgggtcgctaatacataatgtgggcctgacggcccacacttaaacaaggttgaaatatgaataacattaagatggacgactataatcaaatctttaatggtggcgctggctatgcgtcaaccctcgcgtctatcgcggcaagatttggaacaatgtcgcaggttgaagagttctatcatgaaaacggcatggcgaagaaaatcgttgacgtgatccctgaagagatggtcgctcccggcttccagctaaacggaatttcagataacaccaagtttcaatcggaatgggacgggttaaatctggagccgcaaatcaccgatgctctttgctgggcgcggctgtatggtggctcctacgtcctggcgatggttaacgatggtcgcgcgttgacttcggcagcgaagcggggtaagccgctcgaatctatcgttgtttacgaccatgattccgtttccgtcgcagaggaggaaaccagcccacgaagcccacgattcggaaagcctaaaatgtacgaggtgaagccgctaaacggcgggcaaccgttcaaggtgcattatacccgtatgcactacatcgacggcgagcgagtaaccaacaaggtgcgccagctaaataatggcgctggtggttcggtgctgaacaagtcgctcattgaagcaattcttgactacgactattcggaatatctggcaacgcagctactgaagcgcaagcagcagggcgtttggaaggcgaaaggcctggcgctaatctgcgacgacaaagaaggcgagtacgccgcccggttgcgcatggcgcaggttgacgctaattccggcgtcggaaacacgatcggcattgatgccaccgatgaagagtacacagttatcaactccgatattacaggcatcccggaattcctttcggcgaagatggatcggattgtcgcgctgtcaggaattcatgagatcgtgctaaaaaacaagaacactggcggcgtaagcgcaagccagaacacggcgctacagacgttctataaactggttgaccgcaagcgcaatgacgattacaagccgctgttagaattcctgttacagttcatcgtaaccgaggaggaatacagcgtcgagttcgaaccgttgtcgcttcctaccgatgcggagaaagcggatatcttccagaagaacgccgatgcagcacgcggccttgttactgaccaggttattgacgccaacgaagcgcgtgataccctatccgcactgattccggaactgaagttgaagggtaatgcgccggaacagaaaaaactaccggatcgcgcctccggttcgggcagcacgcaaagcgcagagatcctaaacaacacggaggcagatgatgaaagttaacggcagaatcccaaactggcgttatcctgaagcaagcgagcgggatttatcccgctccatgcaggacgcggtgacagaactcgtggtagagatgcgggatcgcttagaacgtcttaaatttgacgccacggcggaggaaatcagccaggcggaagacgatatcagcgaatctgccatcgtgttcttttcagccgtaattgcggcgctcgcctccatcgggttgactatctatagattcaactcgaaacagtggcttgcaattgcgatcgcggctggcgggcggaataacgaatccgtcatgcgccttaaagaatttggcgctggtgggtatgaagactggtatcaggaagcgctgaggaagtgggaagatgccgccgaagcgtcaatcaggaagctagcaagcgatatcgtttctgactggacaacgaaagttagaaccgccaacaacattggcaaatctcgcaagcagatcgatgaaataatcgaaggccgatacgccatttatggtagttggtctcgcaaccgggcaagcggaatcatcggaacttttaacagtatgttgatgatgcagcgcctgaaagatgctaaagtatcgcattacttttggttcgggatgatggacgaccgcgagcgcgagagccatatcaagctagaaggtaagcgacgccctgttaatggtgacggcattttccccggtgaagagtacggctgccgttgttgggcggttcctgattttaacaatgtagaggtatcatgatgaaaagagttcaaaggttcgacacggtaaagatgaaggcgcgattcgatgagaacggctttctggttgatactccgatcgtggcgcgtatcggtgcgcagacgtaccagacgccaaccgggccgcgcgtcgagttccgcccgcgttcggaggtgtttgatgctgaatcgctggcttcataccagggtaagccgatcactttgggtcacaagatggtgaatgcgcagaacgcaaaaggcctggtggtaggatcttgctccggcgctggcaaagaggacgggatcggggttcttgttccggtgatgatttacgatggtgagtcgatcgagcaagccaaaaagcgcgtagccgctgaattgtcagtcggttacacttcggtagatatcgaccgcaaaggctggggtaataacgcaactggcgaatattatttcgatgaagaccttccggaaaacttcgaggagatgaaaaacgattccgtctctgattgggttcgctttgatgcggtgcaaacgaagattcgcgtgaatcacgtcgcgcttgttttccgtggtcgtgccgggattgcgaaattaaatcttgatagcgaacaagaattcccctatgatgacgactcaaaccacaaaggagctaaaacaatgatcattaaaattgacggcgtagatgttgaagtggccgataacgtaggcgcttacattgccaaactagacgcgcaagttgcatcggcaaccagtcaggtaacgagcatcaccgcagagcgtgacgcacttcaggccaaagttgatggcattgaagatgaagtcgccgcccgcgttgctaaaatcaaagccgacgaagacgcaaaacagaaagttatcgcggttgtttctgccgctggcgtcaagtgtgacggcctggatgttaaggcaatgaaagttgcttacatcaaagaggttgacggtcgtgatctgtctgataaagaagattcgtacatcgacgcttcttttgactttatcgccaactctgataagatggctggcaatcgctccaaagtcttcggcaaaaaagaagatggcgagcaaaaagacaaaggcggcttaccgaaacttgacggcaccgaaatcatcgatccgcaggcaaaattccgccgctaataatttgcggccttcgggccgctaccagaccaaataaacaggagattcaaaatggcacagattccagcttcttattcccgcaagcgtgatattgctgtagcggggcagatcgctgatacgtcactttacaatatcgacggcacttgtgttgctgaaggcgatatcaaagctggcgtactggtggcttccactggcgcagtttccaatggccacaaggtcgttaagccagcaaccgcagcgagcgacgtcattgtaggcatcgcgcaattctcgcaagcctactcgccggaaggccagtatgacgacgaaagcgcagttaacgttatgactcatggccgcatttgggcgctcgctgacgccactgttacggaagaagattgcgcgttcggttctttcgtcacctttaccgcgactggcacggtggcgaagggtgatgccggggttatcaaaactggctacaaacacactggcgaatacaccaaaaacgcggatggcactatccttgtgaaagtgcaggtgcttgaaggcgcagtggccccggcggctgacgctggcgcataataaaatggtggggcttcggccccatttttgcaccagaaaaaaacctttgacggtttagcgattcgtgatattcttcatctcgttaagccaaatacacaaacaggagttttcagatgactatgaaattagatgcattcgaacagagtgctattaaggtcgcgatgcagagcatgggcgtagacgccgcaaaactggatgcttacggtatctggactgttaagcagatgactcaattactgaatcgccagtatgagcaggcatacccgcagaccagcgcacttgagcttttcccggtaactaccgagatctcgccgaccgcccgccgctttgagtggctcgaattcgatggcgtaacttctgcgaaaattatcgccgattacaccgacgacctgccgaccgttgaggcgatggcgcaagagaaatcagggaaagttttccgcctgggtaacgcgtggtttatttccatcgacgaaattaaaaccggggcagcgctgggttccagcctgagcgaccgcaaagcaactctggcccgcgaaggtcatgagacgctcgttaatgatctggtgttcaaaggatccgctcctcacggcatcgtgagcgttttcgaccatccgaacattaaccgcaagcccgccagcgccaaatggggcaatgatgcagcagcggctgaaaaggcattcgaagatctggaagacctgctaaacctgatcgaagaaaccacgctgggccgccatcatgcaacgaacatcgtgattccgccgtccaaacgccgtcttctgaccaagaagatgccggacactagcggcgactcttatctgacctggttcaccaagaaccacccgaacatcaccattacggcgatggcggagctggaagatattgacggcgcaggcaccaaaggcgtgctggcatacgaaaaagacccaatgaacatgagcatcgagatccctgagcggttcaacatgctgccgatgcagccgaaagacctgcatttcaaagttccgtgcacctccaaatgcactggtctcatcgtgtaccgcccgctgactattgcgattctcaccgggatttaatcaaaaagcgccttcgggcgcttttttattgcattgcattctacaatgtgctttaatttgaaacctaaagtaaaccaatggagcattaacaatggccagtaaaaaagaaaccgtagaaaccgcagaaatcaccaatgcagcacaggagtcgcaggttgttcaactgcaaaacgttggtgcatgtgcaattcgctataaaggcaaaaattacgtctatgagcaggtttttgaagtgccagaaagcgagatcgaccgcttccgccacgaaatcttcaaaggccgcgtcgagttctacgacaatccgaaacgcacgcgcgaatacatcgcagcggtgaaggcgacagcaaaagagatcgtgcagcctaaaagcgcggaataacaaaaaccaacaaagggcgcttcggcgtcctttttcatatcaggagatcgaccatgagttacacaattcaagatgtgatcgataaaatgcgcagccttgcacctccgcttaaagaggttccagatgaactgctgtctgcgtgggttgtgcttgccgaagagttcgtttgcaaatccaggttcggggattccatcgttacggcgatcgcattgatgaccatgcacctaatgtttttggatggcgcgatgaagcaagaaggcgaaagcctggaatcttacacgcagcgagtggcatcgttcaccctgaccggggagttttcccaaaccttcgatcgcgtatcggcgtcaagcgacaacgaaatgctttctacgccgtggggcaaaatgtactggcgtatgctcaagatgcgcggcggcggcttcggccttcttaccgctggcaacgttcggcgttgcggagttgggaggtaatcgcaatgaactacaaagcaatccaagctcgcgcaagcgcgggcattaagttcttcagcgacgctgacggcgtgttcaacaagtacacgaaaggcgctggcggtggcatcgatccggaaaccggggaagatatcattcctggcgaggtggtaacgacaatcaagggcgcgatcagggatgtaaatgaccgtgacattaacggcgaaaccatcctcgctggcgataagcgcggttttttcactcatgatgtgccaatcatggagggtgacgaaatcgaagtagacggcgagcgctaccgcgtggttaatgcccgtccggtaaaaccaacgggaaccgttgtcgcctaccgtccagttttacgcagggtggcgacttatggctaattatacgatccgggagttcacaggggctattgatgcatggtgtaaggccgctggtgatgcgctggaggacgttgtaaggtttacgtgtgaagatattcaccgcgaccttgtaatgcgttctccggtggatacagggcgcttccgtggtaactggcaaatcacctttaaccgcgccccgctttacgcgattaacgcatatgaccaaactggcgaaaagacgatccagaacggtaaagccaacattgcactatacgcaaaaggggctgggatcacttcgatctggttcagtaacatgctaatctatgcgaacgcgctggaatacggccattcaaagcaggcgccgaatggcgttatgggagttgtcgcgatccgattgggcgtatacgtgactgaagcaatcaaacgagcgagggcgaaaaatgcactatgatattgcgttaaaatgcaaggcggcagtggctaaatttgccgccgagaacgggttgagggtcgcgggggataacgttgactttatcccaccgagaggcggggaaacctaccttaaagcctcctacgtagaggcagattcaagatcggttgacctgtcaaggaaatgccgagtctatctggcgatggttcagattgacgttatctttaagcctgggatcggaaccgaccgcgcgaggttaatcgcgcaaaacgttgcaaaatatttccctgaaggtaaaatcttgggcgatgacaaaattaatctttacgtaagcgagtgggccgaggttcacggagtgcagaaggcgcaaaccgggtggttcttccccgttcgctttacggtaagatgtgaacaaatggaggcgagcggttatgcacttacctaacgggagcaagatttttattgaggccagcaacgagagggagtacgattttaagtggcttgacacaactgatgttggcatcccaaatacttatgttctcgttttgaatcaggcggctggcgtcagtgcttttggtgttggcgatatcgtagtaatcactgagtgcgacaacaagctgatcgagggtaatgtatactcgatccgctctgttaatggggatgtttcacgagttagggtatggcctgagtaccgagccaatgatttgccagttggtaattacgtttcatcgcccggaaaggttcgtcgcatttcatcctgggcggaactgccttgcgtgcagtcaatcgacaaggaaggaaacgagcaaaactggtatacttaccagtgccttgacagcggaagggaggagcgacagaagacgacaaaatcagcgctgtttatgtcttatacaatggctcatgatccgggaaatccggcgtatgatatcatgaaagcacatgagcgagataagtcattaatggctatgtatatgcacatcccaagagcagaggaaaaccgctattggtctggaggggtttcttttgacgatgttccagatacggcagtgaacgaaatggagactgtgacgctacgcatggcgattctcggatcttataatttcttgccatccagctaactagcgggcataatggcgttgttaaactttcatcaaaacaggagtattcaacatgcatttaccaaacggtgcaaaggtcttctttgagaaggctcgcggtgcgacgattccgtttaccgcaatgaccaacaacgcgaaaaacccaaaaatcacagtggagaacggcaagctgaaggtgaaagatattgtgatcttcaccgattgcacctggggcgacttcgttaacaaggtggctcgcgtaaaagcagtgacatcaggagaggcaacgctggaagagttcgacacatccgacactaacaagtatcctacggctgcaaccggaagcgtgagcgtaatctctgactggatcgagttgccttgcattcaggatttaggtaaagacggcaacgaacagcagttctataactatcagtgccttagcgatgagcgcgagcaatccgaacctacttacaagtcggcggtgacgcttaactacacgtttgcgcacgattacagtaacgcgatctaccctgtgttgcgttcagcagacaccagcaagcaggcgaaagcgatgtacatgtatatcccgcgagcttccgaggttcgttactggtctggaattgcatctttcgatgacattccttccacggctgttaacgagatggaaacggtaacgcttaacgttgcgctcaaaggttctcacgtcttccttccggtggtcgcttaattaaatggcggggcttgtgcctcgcctttttttgtgcataatagcgaataacacaaaccaatcaggagttaacaaaatggctaaattcaaaattcaaattggcggcaacctcccttctttcaaactgcccgtaaccttcacttgcccggatggcaaagaagcaaccatcaccatgaccgtaaaacaccgctccaccgatgagatgaaagacttttatgagagcgaagataaagcgccaaagggtaacgccgagtttatccgcttcatggctgaaggttgggatctggatgacgaattcagcgatgaaaacatttcctggctttgcgctcacttcccggcgttcgtcatggcgctgccgcaaacttacatggccgcgcttgcgggccaccgtgcaaaagtttaaggcgggctgtttatctcacgcttcagcctgagctaaccgatcgccagcttgcggagtacgggttaaggcgatcggattatgaagcagatcttgaaacgatctattttgatgaacagaccgcccaaagctggcagctattccaggccatgcaaacgcagtggcgaatcgggatgaatggcccgacagggcttgactataacacgttgcctatgctgttcgaattgtataaaatcgacaatcgagaagcggcattacttgacttgcagatcctggagggtgaatacctgaaggagatttacaagaaatccaaataagcgcctacgggcgcttttttcatatgggggctaaacatggctgataaagtagctgggttgacgtttggcgttgacgtttcgcaggttgacaaagcggtacgatcactcgcagaactgaaaaaccaaagccagcaaactggcgctggcctacagtcacttgcggacgctgaaaggcgggccacggcgcagaccgaggaaatgaaccgcgcgttgcagcggcagaagcaagagacagacaaatcaaaaaccagctttagcaggatcgcaagcgccatcgatcccacgatctcaaaaatggccaacttgcgcaaagcgacggaagaacttgataaagcgtgggctttggggattgttccagataaggaatttttccgcctgggtgctatcatcgaatctactaccaaccaactccggcggcagcaggcggcgctaaccgaagaaggtcgcgcagcaatcgcagaggcggaggcaaagcagaaggcggcaaacgccgggcgtgattttgtcgccagtctgaaacagcaggctgactccatcgggaaaacacgcgccgaactgctggaaatgaaggcggcgcaattgggcgtgtcggcagaagctgccccgttcattaacgcgctgaaacagcaagaacaggcgttaaagcgacagcagaatgcgatgggcctcgctggtatttctgccgggcaatataaaatggccatgcgccagttaccgatgcagatcacggatattgtaacgtcccttgcgtccgggatgccaatctggttggttgctgtgcagcagggcgggcaaatcaaggatagcttcggcggcttgagcaatacgtttaaggtattgttgagctacatcaacccgctaacggttggtgctgcgtcgttgggtatcgccctggcggcaatcgctaaagctggttatgactcctggagtgcgcaacgagaactggcgaatgcgctggtgctgactggtggctatgctgcgaccacgaccgggcagatcacagccttaaccgaagagattaacaaaaactcatcggccacgattggcagcattcaggaaatcgcaacatcgctcgccagttctggtaagtacaccattaaccagattaagcagatcactaagactacggcggaatggtcggcgcagactggtgagagcgagaagacgatcacagggtattttgattcgatcgtaaaagaccctgttaaggggcttgccgatctcaatgagcgttttaattttctgaaagagggccagctaacctacatcgaatctttgcgtaaaaccaaaggcgagacggcagcggctgaggcggcgacaaggctgtttgctgaaacgatggataagcgccttaaagatatcgcggacagcgcaacgccactcgaaacgatgtggacggatatcaaaaaatgggccgctgactcatggaaatgggtaggcgatcacacggtaggggcgctaaaccttatcgtcgatacagtctccgcgatcattaacacgatcaggaagctgattgccgacggcgacgccatgatcgcgcagttcatcgttgacgcaggccggaaactgcaaaaaattcctgggatgggcgactttggcaatgaatttctggcgcagcaggagcagctaatcaaggactcgaaagccaaatccgacacgcttgcaaaaaccattgcggaacagcaggcaaggatcgcaaaaggcgagatgggttacattgatgccgcgaaggataaaaccctttctggtgggtacagcagcaaaacgaaggatcgcgttaaccaggaagaaaaagatatcctgaaaaaccgcaacgccaggaagcagcaggtagacgcgggcgttaaaattgatgagcagtaccaggctgaactgctatcgctacaggcgcagctaaaggttttgcagcagcacaaagggcttgacgacaagatcagccagcagcgcaaagactacttcgagacggttgctaaattccaggttttggaagaggcaagccagaagcgaaaactgacccaaagcgaacagcagatgctggcgaacaaaaagaatatcctgtacatggcagagcaaaaggccatcgtgggagatcagattgttcagcagcagagattgaacgccttgcttgacaagtcgaccaagtatcaaaaccagatggcggagaaaaccaaagcgctacaggataccgccggaatgggtagcaaggagcaggagagataccgggccaatgcgcagatggcggctgactggaaaaacagcggcggatctttaagcgaccctggatttaaagccatgcaggccgcaagcgataaattctacgcacagcaagatgcgcaaatgctgaactggaaggcaggatttactcacgcgtgggctgacattggcgacgaagttaatgacgtatacaccaacatcggggatattaccaaaaacgcatttaacggcatggcgagcgtgctgactgattttgttatgactggtaaggccagctttagcgacttcgcaagaagcgttatcggtgacattaccaacatgcttatcaagatggcgctgtttaactcgctttctgccgcgtttggtggtggcggtacgttcagcttcgccaacatgttcagcaagggattttccggcggtggttacactggcgacggcgggaagtatgagccaaaaggcgttgttcacggcggggaattcgtattcaccaaagaggcgacgcaaaggttaggcccggaaaacctgtaccgactcatgcgcggctatgcaagtggcggcctggttggcggtaacgcaagttcaggatctggagtaaccaacggcggcaatgttgcggcgtcggctgcgatggtgttcactatcggtgacattaacattacgatgggttccggtcaggatagtaagggcatggagcaaggcgtgaggcagatcgtgaacgatatgttcaccgaggctttgagccaaaacgggcgcattgcgaagttcgtcaatgagaaaacgaggaggtagtagtggattcctttaaatggtgtacacaaattcaaggaggggcggcaaaggtcgccatctccaacaacattcgatcgattgttttcggaaacggctacatccaaacggcatcgagcggcattaacacgaagcgccggacggttccgatcgtttatggcggttcggattgggaagaggtttatgacttctgccaggagcacgtaaccaagccgtttgtatggaaggcaccggatggaagaatgggcgtattcgtcgtaactgccgactccgttaaccttgcgccgcagggtggcggggtgtttgaggtaacggctgaattcgccgaacgcttcacttcagccggataatcaaaaaagcgccctttacgggtgcttttttttggcctatgatctggagtcaattagaggagggcttacgatgacagccaatgtttcaaaagagtttgcgaactgcttacaaaaacttttccccggcgagatcctaacgctgatcgatatcgacgccacaaagttcggcgggcaggtctaccgattccataacgagaacgtcgcctatacaaccgaggagcttttggcagcggttaacggcgggacgcttcagccaaagatgatcacatttcgcggcgagcagtacggcccgcgcccgttcggcctgggcgggatcgcaatgtcgagcgatggcacagtggaaaagccaacgctgacggttagcaatatcgatgcgcaagcgagtgctcttattcgcgcctataacggccttatgcaagccaaagttacggtatgggttttggtcaaggaattgctacaaaacgacggcagcgttaaagagggcgattttaggcgatttgtctactacatcgagcgcccaaaacaggtcgacccgcaaaaggcaacgttcgaattaacatccgtgtttgatatggatggattaatgatcccggcacgcctaacgcaaaccgtttgttattgggcgcagcgtgggtggtacaagtctggaaaaggctgcgactacaacgggcagaacggatacttcgacaagttagggaacagggttgacgatccttcgcgggatgtttgcggcggtctggtttcttcttgcaggcttcgttttggtaatgagccgttgagtttcggcggttgtgcgacagcaacgttaaagagtggtagctaatatgttaaccccaaaaatcaaaatgcagatcatgcagcacgcgaaggaagtctacccgcacgaatgcgccgggctggtaacgcaaaaatcacgcgtgcagaaatatcaccgactagacaacgtttctccggatcctgagaacgaatcaatgccggatgaaacgcagtatgcgatggcggcaatggatggcgagccgatcgccttcgttcactcccacactggcgacggggcaaccaccgttccgagcgccacagatttatgcttctgtgatgaatctggcttgtcgtgggttatcgtctccatcccggaaggcgatatgcgaatcattgagccgaagcgccgcccgctgattggtcgcccctgggctttgggcgcttatgattgctatggccttattatggattttcacaagcgacacggcgtcacgctaaaagatcggcgggttccgttcgaatggtggaagccggaatacaaagagaatctttaccaggactactggcaagaggacgggttcattgaaaacactggcgagcctgaagttggcgatatgattatttttcagcttcaggcggagaagtggaatcacgcggggatttacgttggaaataacaacatccttcatcacgcatatggcaagctgtctcgccgggatatctattctggatggtacgagcagcataaggttttaatttgcaggcataaggagctaaaacatggcatcacatacaaagacgattaaactatctggttccctgggccgtcggttcggcgtcttccacaaacttgcggttgattcagtcgctgagtgtatccgggcgctgtcttaccaggttgaagggtttaagccgttcatgcagagcaaagttggttcaaacatgcgcttcggcatcatcgcagacggaaaaccaatcagcacggacgacttttctactttcgccgttgcaaaggagattcgaatcatcccgatcccaagagccagaaagaacggcgggttgttgcaggtcgttatcggagcggcgattatggttgcggccttctttactggcggcggctcgctggcggctatgggcgctttttcatcggctgcatttatggctggcggctcaatggttttgggtggagtaatgcagatgatcgcaccgcagatgggcggcaacatgcgggcgagcgaatcgcctgagaataagccatcttatgcgttcggcgggccgattaacaccacggcggcggggtatccaatccagttgccatacggttacagattggctggcggcgcgttgttcggttctggatcttacgcagaagacaacaactaattaagccattcgctttttagcctgggggcgtagcctccgggctttttgtcgtgtacaattgcgagactattaacaggaggctaaacgatgactaatatcaaggcccgcaagggtggttcaagcaagccacgcactcccgtagaaatgccagataacctgatctcaaaagataagatcaagttattgcttgctgtttcggatggcgaggtggttaacgacttcagcctgaagcagttgcattttggcggcgtcccggttcagaacgaggatggaacattcaactatgagggcgtgattgcagagttccgccccggcacgcaaacgcaggactacattcagggcttcagcgagtcaagtgctgaattccaggttgctcgtgaagtaactcacaacacgccttatacgcttaccgtatcgaacaaaaatctgtctgctattcgctttcgcctgttatggccgcgcgtgctgactcaaaaagataacggcgatatggtcggatcggttgttgagtacaagatcgagatggcggtagatggtgcaagttatcagacctacctaactggcaagattgacggtaagaacacgactggcggttacgatcggagcattcgcgttaacctgccgcaaaacttcacgtcgcaggtgcttatccgcgttagtcgagtaacgccggacgctgacggggtgaaagttgtcgacgctttccgggttgaatcctacgctgaagttattgatgcaaaattccgctacccgttaacggccatgctttacgttgagttcgatagcgatctgttccagaaccagatccccactatctcactcaaaaagaaatggaagattatccaggttccgagcaactacgatccgattaatcgcacgtactccgggacgtggaacggtgttttcaagtgggcgtggagcaataacccggcatgggtgctttatgacctgatcatgaatcagcgctatggtttagaccagcgcgaacttggcatcccggttgacaagtggtcgttgtatgaggtggcgcaatactgtgatgagcttgtgccggacaatcgcggcgggatggaaccgcgctatttgatggatgtagttgttcagtcgcaggttgaggcgttccagttggtaagggatatttgttccgcgttccgtggaatgacgttctacaacggtgaaagcctatcgattatcgtcgataagccgcgcgatccggtgtacctgtttacggctgataacgtcgttgacggcgttttcgttcggacgttcccaagcgaaaagacgatgtacacgtcgtgcaacgtcatgttcgacgacgaagaaaaccagtatgaacaggatgttgaaccagtgttcaacccggacgcagccatgcgatttggccacaacccaacgagcattacagcgatcgggtgtaccagaaggacggaggcgaaccgccgtgggcgttggattctgcaaactaacctaagcgctacaaccgtttcgttttctactggtctggaaggtatgattccttcttgcggcgatgtaatttacgttgcagatccgcactggcaatctgcctttaacctggtgctatcaggccgcgttatggaagtatctggcgtgcaggtgttcctggcctaccgctgcgacgcgaaggctggcgacactctgatcctgaataccgacgacggcaagccagtgcgccgcacaatcgccagcgtttcggctgacggtaaaaccctaacgctaaacgtgggatttaattttgacgttgcgccggacagtgtattcctgatcgagagcgatcagcttgcagcagaacagtatgtagtaacccggattgaaaagggtagtgatgacgacgaattcacctttgccatcacggctacgcagtacgatccgaacaagtatgacgcgatcgacaacggggtaattaccgatagccgaccaacttcggttgtagacccggattcattgggcgctccgaaagacttaacgattagctcgttttctcgcattgttcagggaatgagcgtcgaaacgatggtgatcggctggtctgctgtacagtatgccaaactgtacgaggtacaatggcgcaaggatggaggtaactggaacaacgttccgcgcactgcgacaacgcaggttgatatcgaaggcatctatgctggcgagtaccaggcccgcgttaggtgcattagcggcgggaatgtagcgtctccgtggtctgcgttggcaaccgccacactgaccgggaaagtcggagcgccaaaaggcccgattaacctttttgcgtcggacaatgagatcttcggcattcgcgttaagtgggccatgccagaaggggcggaggacacggcatacattgagctttaccagtcgcaaagcggaaccgatcaggacgcaagcctgcttaccctgattccctacccggcggctgaatactggcattcaattttgcccgctggctacgtgaacttctataaggctcgaagcgtagaccgtatcggcaacgtttcagcgtggactgattacgctcgcggcatgtcgtcgactgacgttaacatcatcacagatgcaatcctggatgaaatcctggacagcgacgcgatgaaagaacttcaggagagtgcgcaggatagcgcggcaaaactcaatgactacgcgaacagcatcattcaaaacgctttggcgaatgatgcggacgtcagggttatgcgcaaggagaacggcaagcggaaggctgagatcgcgcatactaccgtgctgattgcgaatgagtctgaggcgcgggcggctgaaattacgcagcttaaagcgcagattgatgacgatatcacggcgcagatcacgacccttaacgaagccctggcgacggaaagcgagacgagagcaacgcagatcggtcagttgcaggcagattttgcggctgatattgacggcgtaaaaacaaccatgaacgctggttttacgcaggttaatcaggctattgcaaatgaaagcgacgcgcgggcaagttcagaggcggcactagatgccaaaatcgggcagaactccgcagcgctaaaccagaaactcgactcgtgggcaaacgttaatggcgtcggttccatgtacacgatgaagttaggcttgaagtacaacggtcaggaatataattccgggatggcgctacagcttacaacgcgtggtagtagtgttgtttcgcaggtgctgttcattgctgatagatttgctatcatccgtaatgcggcgtcgggcgcgtacacgctaccgtttgttgtgcagaatgaccaggtgttcatgaataacgcgcttattcaggacggctcgattaccaacgcgaagatcggcaacgttattcagtccaacaactttcaggagaatgttgcaggatggaggcttgataaaaacggcgtatttgtcaactatggttcaacatctggcgaaggttccatcaagcaaactaaccagaacatcacggttcgagatggtagcggccgcgttcgttgccagttgggtaggatcactggatcatggtaaaattaatgccgggagaaatcccggcttaaccaacggaggtatttatggcttatggctttcaatcttgggatgcgaacgggaaccccaacaactatgggatcgtccctgtttcggttgctggatatattgctttggcgcaaggccagaaaagcggaacatggtcttacaacgttccacctggtttaaggttgggtttcttttgggtcgcaaatcaagaccagtacggcacatcgaagaggcgaattaccgttagcggtaataagatcgttgtttctgatgcaccagataatgcgctggaatcaggcgtctacccggcgacgcagggctttattgttgttcaaattatgagttgaatattatggcagattacggaattttacttaccaatgatagaggaaatgtttgggtttcccctcaaagcatcccgctggcactgctatcaaagcaaagtatcacgcttaggggcgggactaactccgacgaagtcagatcggtaacttacgacacgaatcacccatgcgttccgttcgtggtctttcatggctcatctccacaaggtgcatttacaaaaatcaggtacagcgggaacacttgcagcgttgttttttcttttggtaagcaaaacgtatatgcggaggtttattttttctccgtattcccacaaccaaaccctggttatggccttgcaatttgggatgaaaacggtacgctgattttgaccaatgaaaccagaacgctttcagacgtacagacctacgggactggatttaatctaaacgtcactaacggcggaaagtgggccgttagtcctgttcagttaggcgcaatcgttggtgttattcgtgatccttacccaagaccatttcagggcgactattgcgcagcggcattttttaacggttcaaacacgcaacttaccgcatatctaacgcaggctcctggcggagccgccagtgatctaacctacgtcgatatgaaaaatacttgcattgctattaattgcgcaaggtatgattaaaaagaaaggggccatacggcccctttttttacatacctaatttatcctcaagtgcggataaccgcgcttcaaatccttttgcgataaacatgtttaactcatcaatgcggaacgagtagcgatcaccagccgggatggttttgtagatcgggttttccgacccgtcttcattcgctggcccatattctgaaaccaccgtttgctcatcccacttgtcataacagataaagccatatttgaacggctcaagcccaaaactttccatgatctcgatcgcccgctgaacggtcaaaccgcagtgctcgcgcacgtcgttcatatcggcttgctctttccacgtccagaaaccgatctccttcgcaatggctttggccgcttcggtttcaggatcgctcatggctcgaacgtcgttcttcatccgaccatctgaggtgttgattgccccatttttagcgtagatgttattgactcgaccgctaccccatccaatatcataaccgccatcgcccatagggatgaagttcccgttgtggtcaacgcaccagcgagcggttcgcgaagttgagcctgccgcgcatgtttcgaacaaaattcgcgttggcgtgctggttttaccccacccctccggagcctgaatgttaaccgcgccgcgcattgagtcgaatttttccccatcgtggcccgaagccccaaagaagaaagtagaccattgctgtacagcgccaacatattttgccgagttacctaaactaccatcgcaccacattgcacgaaccgcaggcgatgaagtattagaaccgcgaggcgcaatcatgttaatttccggtgcaccatccgctgatacaatcttcaatcctcgaccatcctgattggtggggccattgaattttggaactgctgcatttaacgtttcaaagctacgcaccaacccaagatctgagtgcatggccccattcggaacaatccagagatctccgttatctgacagcctgaacgccggaaccctatcgctaatcgtcttacctttgggggtgacaagcaatcgaatccagccaccgtgattggttacagatgcatcgccagccccaaggaaatgcaaggccgcgttactgtgctccgtgtagtcagaacctaaccacgggcgagaaccataaccacctaaaagctggttgttcttcgttacgctatttgacgcgccgcgcgtatagttatggaacacagcagaaccgccagccgtattttcaatcccgaaagaacactccgtcgtgtggctgccgataaagttaacgccaaccccggttgttgcggttgtctccttcagtggcagcttctgcgatgcggtaacatcaatgccgccgcgaaggttagatgcaccattgacgcggagcgtgcttaacatcgtaaccgcattgctgaaagtagcattcaacccggttacggtaaagtttgccgcatcaaaaacaacctgcttcgcgctgttcatatcgccattcgggcggaagtacattccttgaccgtcttccgggatggagtaaacgatcgcgttgttgttattggcccgaactacggcaccgttcagggttagcgtagcgtttccgcctggtacgctaattgcctgcggctggctgaacgtgttagctacgttggttcgcgggatcgtgctatcattagccatcaaataatcagtcggtgaattatatacaatccctgctggctccgtggtaatccacgaataaccagtgcgatcgatgatcggcccggtaatcaacccattattagatcgcacgttcaaacggtttaaccacataacgggaaagtaaccgttaggcgatagcaaataaacatcaaaagatccgtcagtttttttcacaacccccaacttcaaacgtgacgtgctatttgatgccggaatgagtgcgcattgagtaaagtttgcgtcaatattattactggttagcgtatcaggaagaccccggccagaaatagaaaagatatcgatcgggagattcgcagaaccgaagttagcgccgccaccaataataaattgcgcaaaacagtttgactgtccagcgttcttaacgttggcaatcctcatccacgcccgcgagctacctggcgaggttggcagcttatccggcgcttgaacgccagccacaagatcgacagtctggttgtacagcgcctgcgtctgatctcttgccgatccggcttgctgccttgcggtgagtgcggcttgctctgatgccttagagttagtttctgaagttttcgccgccacttctgacgcagccgccgccgacgcgctcgcgtccgccgcttcggaatctgccctcacctgatcggcaagactttgcagagcttcgaaatcgaagttcttaaagaagtcgacagcatccgcaatctgagtttcttgcgactggtagtagcgcagcgtttccgcaacatcttgcgccaggccgtcaacggttagcgagtcgcttaaaaggatcgcgtagtcgctagacgctacgacagcaccttttgtggtgatggctttaatttcagtatcgctaaccaccttgtttacgacggccatttgaattggtgacgacaaaaacataatcgtcgcgccggggcgaatcagcgaaagcgatgattgccatttagtgccagtcccggtaacggttccgtctgcggccatagccgctttgccttctctgtatagtgccattttaaaagcctcttatgttggttgagtaacgcagataatagcatcaatgaaccgataaaaaaaggagcctttcggctcctttagttgtcaagttagaacgggatatcatcatcgaaatccatccccggattcccgccgctgttttgcggttttggcggttgctgaactttaggttgttgaggttgcccccacccggattgctgattaccgccgccgctttgcgaaggctcgcgctggctgaattcgagttgcggcatgatcatttcattgtggctgtaaattgtgccgttgtgctcgcggttaacgatctgaagcgtccggcaggtgacgctgatcaccttattcatttgcagcgcttcatcgtaccaattaatcatattttctttggcaaagaaaacagcgcggtagttcgtgtaaattgtttcgtcctcgccatcacgattgcggatcttcatccgctccgacaggtctacggcgtacattttccacggcccgttattattgctgccttccttgatgtacggttcttttcggattacacctgttacaacatgcattgtcattcctatggggcggtttcccgcccggttaaattagttaaaagatgaaatatcttgtgcttctggttcaggttttgattctacctttcccggctcacgtttcgcaacctcttgcggcttaccagggttaaagccgttagccggggtgactttcagttctgcctggcgtttggtgatatcgtcttccgtcattttccattccgcaggcgttaacgtttgtttcgccatcttatagatctcccgaagcgattcgagatcttcgcacgcgtcaatgcgtttcttgaagtctttcggcgtcatcttcgtaatttctgcatcatcatccgcctgcttgatgccgagcgctgcggccagtgcatagcggcgggcgtaagatgttgttgaaccgtatgcttgttcgactgttttgctgatcggcatgttgtactgaaacgccatgaactctccgctttcatgcaaaaacatagtttcgaggtgcatcaccttttcggtgctggtatccatcatggattgaatgaccataatcttattcttctccagcgccggggaaatcgcgtcgaggatatcaccaagattcgcataggtgttcccaagatggttgttcttcccgcttttcttcgcggccacgaagccagattttgccttgattaatgcggctgcaatggtggtgaatttttcagatgtacgcatgataaagtttccttttcctgattggtaatgcgcactatatcacaagtgcgcaccagtgtttagctatttgtgccgtatacgtccgggaacatgtatttcacaaactgcggggtcggcaaaacaacttccgccgcgtttgactcatatgatggccatgaatcatgcttcacgcattccgcatactgatgaatcacgctttgatactgcttgcgaccgatctcgatctgctggctggtcagggtgaacgccagcggagcaaacggtgattttttctcctgcgttagcagtctgacaactacagggcgtttttcgttgtatgtcttcacgaacagatcgcgctgcaatgccatcttgagatagtagcccaaattgaaggcgagtcgcccgaaatcgtcaggcttggaagattgtgtggttttgtagtcggtaatcaccactacctcgaaaacttcatccgggttgaacccccactccttgatgagttctggatcggaaaccacgtcaacatgatcgagtcgaaccttgaccttgacgccgaagatctcaccgaagattgacaattcacgctgtgcggtaggcgattcgatacatgcggcgtgtcgcgggttggccagcatcacgctgcgcatttgaacaacggcatcgaaatcaacatccttaaccagcttgcgcccggagttcatcgcggcgctttcgtcgcacagttcaatagcccaccaaacatttacgtcaatcccggcgcgatatgccatttccagaagttccgggtaatccttgttggacgtcccaatcaggccacacgctttcagcttcgcagacaatgccgacttcgacgtaatcagatctttaacatcgcccggagaagtcgcccgcaggtactcgccattaaactttgccgtctcaagcatacaggtatgcgaacaggttccgaacgccagcgcggcggtttcctcacgcaccttgaatttccagtgcgccggggatgttgcgtaaatctcgccgaggcttgagccgctaacgtactccgcgcaccaggaatcaggatcgtgatattgctcgttagtcaattcactgctggtgtatgccctgaaaattgcttcagccattgatattgctccatttgtggtttcgttgcgttaagtatacgcatgacgattcccggcgcaagtcaaaaagtgctatccgtagttggtcaaaaaatgagcgaaatttacgtaagatttagtaagatgcatcttacgtgattttctccatacatttcatagagttaatgcaaatcggtaagatggtaagatccctataggtaaatatccatgaaaaatctggcgcgaaatccagcgaaaaaggacacgtaccccggagaaatcttaccaagataagtatagagagatataacaataataataatattattatttatcatatacttactatctatatattgcggttaattggttaaattttgcgcgaaatttacgtaagattcatcttactaaatcttacctaaagtggttcgaccagttgcaagccactgaatttcaggcataaaaaaaggtaagactgattttctcaatcttacctaatttctggtcaatatttaatcagagaagagatgatgccttgtataacttacgctcaaagccgagcttgaagttgtcaccgttcggaacgataaccttgagatcccgatcgtcggcagccgccagcatatcacgatctccacgacggcaaactacccgcatttctcgcttaccttctccgcccttgcctttatacctgtacgccacgatctcgacgtttgaaggtatgatgcaggcccaaacgtcgcacttgaacgaactggcaatattgaagtgcatcgcctcaacccaggatcgagcaaggtaaatcggcccgttaccgtcgtcgctctgattggtcactatcaccgatccgaaggtcagatctccagctaacatcttctcccggccttcttcatcaatgaacaggatattgcaatactcatcatccagcccatcttcatgcacgagttgcatcggtagcgcgtgaattagctcctgtctgccgttctcgtgagtttttacgccaacctgatatgatttgatgtgctcattttcaatgccctcatagagcgttacaggcgtgctatcgacggcctccgttctgtttaaaactgccagcactctttcatgatctgccatcttgccgtagtcatacccgttatcacgagctacctgcttgtttctcttgactacgtattcttgcggaaccttgccgagatagcgcccaagaatgttgatgcactcgctgtaaggctgcccggttaacttcattaaccagccgatccccttgtcagcgccgcaaccgccacagtatgcaccgccgtcgccgcgcgtttctaacttgtcagtccagcggaatctgtctttgccgccgcagttcgggcagtcctggtgcttgccgttgaagtatcgagagtggatgccgcaaatgttctgcaacgcttcgcgccacatgccagccatgtacggcaaaacctctttttcatcgtaaaaatccacgtcgtaacctcaaaataaaaaacgcctacacgagaatgataacccggcaggcgtttagtgtttagtcaaattgtgctatcggactacgcggagcatttcgcggcggtcgcatcggcgcgtcactggcttgccgttgctgtcaaatcttaaatcaggtcggcagaatgaggcccggaaacccttgcaattgttccggcggtagctcttgtgtacgagataagcgccatctgctgagatcatgcctcgcttacgccactgctgaacaacctgaatactaactcccaactcctttgccgttccagcgatgccaccgaaggcatcgataaccaactccatccgcgcagtcaacccggcgcgaacctcatctttcagcacgtagtaaccagtcgggcgtttgcgtttcttcttatctttcccgcgcgatgttccgttattgccgttcaaggttcgcttatccacctttgccatttgttccataatttaaccctcatagcattttttgttaaacatgataaaatgttccctgtattatacacgcaactatgcgaatgacaaattaggattgcccatgctaacaattgaacaacaaattgaagcctacgcagacaagatcccgttaatacaaaagcggttcaccgtcggaaatatcgttccttacccgtatcaggcggttgcgtatattgagaccgcgaagcggatcgcaaaatatgaacatcctttttacattaaggcttcggtttccgccgggaaaaccatcatgatcgccatgctcgcggcgcagtgcaaggcaatgaacttacccatgatggttcttgctcgccaggccgagatcgtgaagcaggattccgaggagatcagtaacctcgatgttcccaactccgtttattgcgcagggttaggcacaaaggcggcatacttcccgatcgtcgtcggttctgaagggacggtggttaatggcctgtttaaaatgcttggcgactacgtgccttcagttctggccattgacgaatgccaccaggttgactggcaagatctggcggaagcgatcgccaacaatgaatcgttcgagtacatgagcagaccgaaggataagccgtatcgcgtgaacggggaactggtcgatgccgaccacccatacgacgaaaaattcgacgacgtagaattcggcggcggtcgcacgcagtacaccatcgtcatttgcgagttaatgcggaggtgccttgagaagacagggcgagaacttcgcatcgtcggttatacggggtcggagtttcgcggggtggttcccatcttgcaggaagataagacgcagccgggattctggcgcgagcagatcaccgacattaacacaaactatcttgtcgagttcggttcagtagttcccaccatcttcggtgacaccgaggcagatgggttgggttatgatctttcagaattccacggctccagtcaggacggtacgcaggattttagcgctgaagaattgcgcaagatggaaaagaaaatccatgaatccggcgagatgacgaagctgatcatgcaaaaggtcgtggagcgtgcaaaaacccgaaacggcgttcttattacttgcgctggccagcggcattgcaaggaagcggcaagctacttaccgccggacgccacatacgcgatcatcacagagaagaccaactcgaagaaacgcggcgaaattttggataaggctaatcgtggggagattaaatacatcttccaggtgatggccctaaccactggcgttaacgttccgttttgggatttttcggtcatattgcgcaagatcggatcgcttacgttgcttattcagcttttggggcgcggtatgcgactgttaaaagactggcaaaaacagccgccttactcgtgggtgaaggaagaccatttagtttgggacttcgcagggactatggacgatttgggccagctatatttcgatccgattcttgagcaggcgcaataccaaagacgcaagagcagcaagaacggcccgaaaatttgcccggtatgcaagggagaaaatagcgagtacgcccgccgatgcatccacaaagacagcaacggcaatcgttgcgaatacttctggatctcgcagcgctgcgaagaccagaaagacccgcgaacagggaagattaaggtaaaagggtgttacgctgaaaacgatattgttgctcgccagtgcagatgctgcggggtgcagcttaaagatcccaacgacaatctcaccgggaagcactacacgcagaatgactggtatgatgttgtcgggttcgatatcgggttgactcgcaatcagtccgggatcatcttcaattacgtgttactgaaccatgacggcgagcgattcaccgcaagggaaaagttcttcccggaatcagagaatcagatttgcggcaagttatggcggcaaaaggcggtcttccagcatgttgatgacgcggtaatgcgtggaaagttgggcggcatgaaaaactcccgcaagatcctggagtatgcggaatacttccgcgcaccgaagcgcgtaacgcatcgcatcaacggcaagaaggaagatattatttcacgcaaagattttggagatgcagaatgatcacagataaagatgattatctcgaatactacggcgggcctgtaaaggcctgcccacttgagaaaatcgaccagatgaacagcgtttcgtggctgcggcacgaataccctgattatctgttttggcatacggttaacgaggggagcaagcacaaagcgagcgcggttatcgatcaccaaatggggttgctgaagggagttagcgacattctgatcctgattgggttcggcggcaaatacccgttcgcggccatcgagcta

SEQ ID NO: 9 - DNA, 166855 bp, Unknown
  bacteriophage strain capable of infecting bacteria of the genus Klebsiella
gattggaaaaccgcttatacagaagcaagaaactctgtttggtttaatcagacaaaaggtcgtgcttctcgtgtttccatgattattctaacgggtaatatggaatcatatggagttcctgctccaaagccagaaggaaaaagcctgtctgctgcttacgtagaaccaaagtctggaggtaatcctgaagacccatggactccggaagattcaagaattctttttaaagagcccgaatcttcatataatggtcagtatccatatgttcacacaatggaaacagaatcaggccatatccaagagtttgatgatacacctggctatgaacgctatcgtattgttcacccaacaggttcatacgaagaagtagctcccgatggacgccgtaccagaaaaactgtagccgatttatatgacatgactcagggcgatggaaatattttaatctctggggataagaaggttaacgttggagggaacgagacctattataacatgtataatcgtcgacagcaaattgatggcgataacacgctttatgtacgtggaaatgaaactaaaactattgaaggcaatggtactatttttgtcaagggtaacattaagatagtcgttgaaggaaatgctgatatccaagtcaacggtgatgccactactaaagtagatggcaaccacgacgtaaccgtcggtggtaacttaacttggcaagtagcaggtactgtgaattggaatgttggtggggcttggactgagacaatggcttctatgagctcaatcgcccaaggtcaatacactgttgatggttcacgaattgatgtaggttaatcatggctgatatacttcctattaataccacgttacgcgaagtaatagaaggtgaatacgttgagcagtactttactgctcaattatctaccaacgaaacattaaaatcaataaatattatcgactatcaaccagtatctgatatctctgtgtctgaaacctattataaaggtaattataactcggtttttacttttggaaacgatgtgcttaaataccgtgaaggcgatgagctgaagtccgcttcagcgtgggaggatttacctaatcccaaaactgctgatttatatctgtggaaagcccccagaacactagagaagacatttacctatacagttgagataatatatacagtgacagaagaatcgtctggaggttcatccggaggttctagtgctccaatcgtaacagaatataaaaagcaaaaggtttactctcaaaccgttaaaggtaactggagcagatggggcgaccaacttcgtgcttacgtatatgcggggaattaaatggctggtctttcatatgataaatgcgtaactgccgggcatagtgcgtatcctccgacagaagtaaatgctacacaaagtaaagtattcactggtggaatagcggtattagttgatggcgactcaattaccccacacaccaagacggttgaccctcatgatacgcatggaggagttgttcaacctcgcacatccaaggtatttgtaacaggcaaaaaagctgttcaaatggccgatccaatttcttgtggcgacactgtcgcgcaatcaagctcaaaggtattcatacactaatggctattaaagaacctttaaattatcagttaacgcgtactgcaaacgctatcccagacgcatttactggagcaacattcgacgaaattaaaaatcagcttattaactggcttagcggtcaaaaagagtttcaggactttgattttgctggttcgcgtttaaacgtgctattagacttattagcatataacacgctttacatacagcaatttagtaatactgctttatacgaaagctttattggaacagctaacttgagaagttccgttgttcaagcagctcagcaaaacgggtatttgccaagttccaaatcagcggctactgcatctattatgcttgaggtaactcatccaaatccagagccagcaataaaaatacctcgtggaaccaagtttttagcatatgcacgagattcatcagtagacccatacaactttgttgttactgaaaatgttattgcgctaagagatacttcagcaccagaaggggttaatagatatcttcctattgtcaatttggcgcagggacgtattattcgtactcagttgtcatatgacccgaagaaacctattgttattcgcgaccaatcaattgaccgcaagcaggttaagctgtgggtggatggcgctgaatggactaactggacagaccggtcaatggttcatgcttcgtctatttcaacaatttattatatgcgtgaaaccgtcgatggaaatacagaattcttctttggtgagggtgtggcagaagcatctgtggcaggaggagttcttgaaagcaacttcatcggcggattgaagcctactaagggtgcgcaagtcgttattgaatatattcgtactgatggtgaagctgcgaatggtgcgactgatttcagctatgctgataccctgcaatatatcgtagtaaacaaaatcattgaaaactggtcagattctcctgattatgttggcgctgatggcggtggtgaacctgaagacatcgagcgtattcgtgagctcgcccagattaagcgcgaatctcaaatgcgttgcgtgtctaaaactgactatgaatcattcgttagttcacgttttggttctatcgtgcaggcagtacaatgctttactgatcaggacaaacccggatatgcatttatcgcaattaaaccaaaatctgggttgcagttaactgcggttcaacgtgaagacattcaggattatctaaaacctttctgtcttgctccgattactccttcggtaatgagtccagactacttgttcattcgtcacaatattaaagcttcttatgcattgaataagttgcaagaatcagagcaatggttacagtcaaaaattatagactcgattaatagatattatgttgatgaagttgaaatgtttaacaaaaatttcagtaaatctaaattgttgacttacattgatgacactgaccactcaatcatcggttcttctgtagatatacaaatggttcgtgaaattgtcaactatttcactcttcctagcgcaggtattaaatactataatactattactccgcggacgttacgttctggtgatttggtctttactgttaccccaactgctgaaccgtattcagttaatatcgttggaactgacccagataaaaatggcaaaggaaatatggttattggaccgtttaagccaggtgacattaaagagaatactcatattcagccatatactgaaaacgattttgatagaactaccgtcggcgaaagaactcgttggtacaaaatcggtgaagtagattattatggtgataacatttactggagccttggagctattggagccgatcctcttcagtttgaagaccaaagtattgagctttattctactcctacccaggatatcgtcttcgcccgcgatggaacacttatcgtatttgagaatgaccttcgtcctcaatacacaactattaaattggagcctattactcaatgacaattgcaccgttcgtcaccagcttacgaattcataagctatctgcgaatcaggtcaatattcgttgggatgacgttggtgcaaacttctactattttgtagaactggccgaaactcgaaatcaagcgggggaagttatccccgctgataatctgagctggtcttcactgggttataccgcggataatgattggttcgaacaaaatcgtattgaaccgcttacttactataaaatgcgtgttcaaactacgtcggcaggttttgaaccgtctgaatgggttgaaacagaagagttccaaacttttgaagaaaacgcatatacgtttgaacacatgcaagaattcagtttagtgaaagaattcattaaacagaagttttctttaaacaacatgtcgtatgttaacttcaacacatctgccatgatggcatctttgatgactgagtcttttcagtttagtcctgaatattctcatttatcagctattgaaaacttcgttgtaggtgaatctggatatcatgaaattcagggacctattgaagcagtgtgtgttgataaaaatagaactatgctgggagaaatagacggaattttgtatctgtttgaaagattccaacatatggttaaagtatcaaatgataaaggacagaattggcaatacgttcagttatttaatgaccgtgtcggaaatccggtttctagagtggtaatttatcaatctaaaactacttcttatgttttaggatatgataaaatcttttacggaaggaaatcatctgacgtacgttggtcatcaaacgaggttaagtttagcgataacgaagttacatttgctaaattgggagaccagttaaagcttggctttgaagtagaattattcggaacgtatgcatcattgcctgctgacgttaccaaatatgcggaagcatttacttgtaatgacgactatttgtatgttgttgcaaaagacactgtccgtaaagttaaattaaaagatgctccaatagacactgatcctttaagtcctacatttggtgaaaaagtgtttgaaaaggaagtatctcatataacaggcaatcctaaatcagtatgctttaaaatggattccgttggaggcaaaatctttgcccttattaccggggaagttaaaaccttaggattagacccaacagacccaaggaacgttgtggattctgcaactaaaggcgtctatgtttaccaagaaggcacaaatacttggaagcgtgtatttggtaataccgatgaagaaaaacgtcgtatagagcatttatggacttctatgtcaactgacggaaaggaaatattcttttcatcagctaatttcaagacgacagagtatgttcaggatattgaacttgagacaaaatacccagaactaatttctaccgcagtaaaaaatgttaacccaattcagtatcactctgataagcattatcacatgatgagtttcagagcagatgaattttcaagatgggaaacatttgttcctggaccgatgaggttttatgctgaaccttggtttgtctggatggctcgtgaaggcaacagatgctggataagtacagctgaccacgcagttgtcatttataatgatattctttatcagaaaagaatagatatggctgcgcagggaactactgagcgtgttctttcggaagtgtgggataaaggtgacgcaacgttttattgccctccggtttcatttaacggatttttgcagtatgcttctggcatcatgtttcacgaaccagacggaaaactgataggctattatgcattcgattatcgtgttcgtgaccaggtaacgcttaactggaaaccaactgatgtaatgtttaaggcgtttctgcagaaccaaacccgtgaagaagactggactcctgaacatactccaggcttgcgtgacccggatttacgtccgtatcttactaaaatgatgccggatagctacttattgcaagatagtaattttgagcacttttgtaagtattatctccaattcctttcagacggaaatggaacgcattacaacagtctcgttaatcttgttaagaacaaatatcctcgtgaagaaaatgcatgggaatatctgtggtcagaagtttataaacgcaacatttatctgagtaaagacgctcgcgatgctgtcgtccgtttctttgaagcgcgcaagaatgatttctatgctaccaaaggaattgaagactcatacaagttcttgtttaaacttctttataatgaagatgttgaaattgacatcgagtcaaagaatacgacagaatatgacattattgtagagagtacaaatatttctgacgatttagttggtcgtacgatttatactgcttccggtcgtagtaatgtgacttatatcgagagagaataccgggatggtcgtctgttatggcgtattactattcataacttatcaggacggttcattgaaggccaggaaattaaatcagagcgtacggactttgagggtattatagttcaaggtgttcgtggaaaggatatgctgagtaataacattgactatataaaccgcagccgttcttactatgttatgaaaattaagtctcagcttcctacttctcggttccgtgatgatgtactgagatttgttcatccggtaggtttcggtttcattggtataacgttgttgacaatgtttatcaatagcggtttaaatatgaagcacgttgagactatcataaataaactcaagaactataaatgggatgcaggactaccatcagtttatcctgatagagttgctattatcgcttcagatgatacaatagaaagagacccaataactaatgagcctaggtattcttcaaggactcaagctggtgaacctttcccgttacctgctaactataatcaagaaaataataacagcattattgctggacaaaacccaggacaacgacgtaagccgttgagccctacatttgaccaatcagcagtaacgtttgccaattatcgtgatttagttaaccaacgtcttaaagacgatgcaggtaatcctcgcgatcctgaaaatccgacacaggtaaaaattgatgagtaattcaacaagagcaagttcaacgcgtagcacgatttatcgtgctatcattacatctaagtttagaactgaaaagatgtacacattttataaatcaattggtccgggaacggaccaaaacacattgtatgtttcatttggaaaaagcactccatggtcagataacgaatctgaacctggatttgcacctccataccccgctgataatggagatggggtagttgatgtttggacaaatatgatgggtgcagtcaaaattgaatcatctatgcttgactgtgttgttccaagaagagactggggagatacaagatatcctaacccgcgcacatttctaattggcgatatcgttgttgctaactctgcgccatataacagaactgatgctggatttggatggatggtatatagatgtattgatgttccaaaagatggaatgtgttcaattggaaatcttacaagcaaagatgaatgtattaagcttggaggtaaatggacaccatccactatttccggttcagcgcctcgtgggcgtggtgatgcaaatggtaccgtcgatttgggtgatggatatctttgggaatatctatatgaaattccagccgacgtatcaattaacagatgcacaaatgaatatatcgtagttccttggccagaagagattgaagaatctccagctcgttggggatttcaaaacaacttaacttggcaacaaaacgactttaacctaatctatcgtatgaagtgtaatacaattagatttaaagcataccttgatgcaatttattttccggagtttagtcttccaggaaatactgggtttaggcagttgtcaattataactaatccgcttgaagttaagccaatgccaaattctcctaacgttaaggctgaaaaaggttggtatagcgcttctggtcttgaaagacagtcaggtgaaatgatttacatggaaaatcggcaacctattattcgttcaatggaccaaacggaagaattaaacttaattttcgagttttaattatggggagcctttggctccccatttttatataaataggactatactttgataagaggttactactatgtatgtagatgaaggtaaaaaggttattgacgtcggtgaagtaggtaacgcttctacgggcgacattttatatgctggcggcgtcaaaataaatcaaaactatgacgccatttataacgcatttggagaccagcggctatttgctgcagggtctggagaaggaagtcaaaaaattcacgcaacgagctattatcaaaagataaaatttggtgatgctaactctgcagggacagttccaatgggggcatgcatagatgctgactgttcagaaggtgcagttcaaatacgtctttcaaaaggtaaagcgggagaagctgtattcatcgtaaatagtaatgggtcagcatcaaaatctagacccataaaaataacaacaaacggtgaaggcgtagctgatgcatttaaagatggatcgcgagagttagttattaataccccaagatgcagaattgagctatggtgtgttgaggtaaaagctaacggtgctgcagtttgggattattcgatttcaagtatgtttggcagcacatattcgccgttagaagctacgtataatttaacgagttctcctattaatatccgcattggatataatgatgattactctactgttaaattgctattaagcttcagcgcaaatccaggtggtcaaaccatcaaaaggcaatcatctgaagtcatgcttatgattgacccgactattacttcatcagcgccaaacggaagagtatttgacactgaatatgcagtgttaagaagtggtgaatcatctgaaaatgaaaagatgtattctatttcatactctattaacgcgcagaaagatttaatatgcacagcttcaacatcttatggaaacgcacgtttggcagttaaagttattgctacacagaccgtaggggtatctcaataatgaaacaaaatttgatagtaggccaatcagtagatgatgggtctggtgattacctccgtaaaggtggtcttaaaattaataacaactttgatgatttatattcagagttaggtgatggttcagttccattcgcagcaggtgcatggaaaacttttaaagctagccctactggaactactttaaatgctaagtttggtcaggcctttgctattaatacccaggcagcaagagttaacgttcagcttccaaagggtacagccaacgactataacaaagttattaaacttcgtgatgtttggtcaacctggcgattaagcccaatcacagttattcctgctcaaggcgatacattaaaaggttcagcttctcctaaaattttcaacactaacttccaagatttggaattagtttattgcgcccctggccgctgggaatatattgaaaataaaactgtagataagctaactaatggcaacttaagtactgtagcgaaaaaatcaattattgctactgcgggtcagactgactttcttaacatttttgatggcgtagaatacaacgaagactcgcttaatgtatatcgccgtggtaatattttatattacggtgaaaccagcgttatggataaagccaatgctgattacggttctcctggaacagtagcaggtcaattggtagaattaaacggtaaagacattcgtttaaaagttccatgtgttgaaggggaagtaataacatttgaaaccttcctagatggaattggtgtttatcggtcttcatacaacaagttggctatccagatacgagattcagcccagactacatcccagacgattcctgggtcaatgatagtagataaccttgctactctccgcagaatcactctggatgacatgggtgtacttccaggcgtaggggtaaatcctaactcgcttgaaatttcattgaacggaaaggaattacttgaagctggaactgctggtcttcctttattttattgtgaaggcgcggaaggcggatacgcagaagactgtataaacaatggtggtcaatgggtaaattctaaccaagattatagactggaatttgactcaactggtactaacgtcgaagctattatttttggtgaggcgtttgaagataaagaccttcttaccgtccgttggttcaataataacatcggtactactatggatattgacgatatcatggcagaaaccgaccaagtgtatatgaatgctgagcaattggtaactctaaaaaatcgcattgaatacacaaattatgatgaaccaaatcagaaaaatatgcgtcctgtcgctgatgatgttatgattaaagtcaataacattgcagcattctttgacgtaatttatccgattggcactatctacgaaaacgcccacaaccacgcaaaccctgctgactatatgggatttggggtgtggaagctttattcacaaggccgtgttactgcgggctggaataatgattcatctgacccttattttgcgcgtaacaataataacttaaacgaaaatggtcagccatcattaacagcaggtggaacggttggagatttgacatttacgttaggaaaagaacacattcctgaactaatgtcaagagataaagttctaatttcagaccctgaacatggcagcgtagttattggcggatgtcaattagacccagacgctcaagggccaggttattctaaataccgtgaagacactgttgcagtaaacaatggtgtagttccaaaggacatcactaaaattcagccaacaatcaccgtttatcgttggattagggtaggttaaaatgactattgaaactaaaactcgtgaaggagctaaagttaattcaagattaactgctttttcggaatatcgcgttgacccgcaaaatatcgcggtaggaaataaggctcctatagggagcctgacctttgaacaaatggatttgggtgtttggtatccaaacaccgaagctgctattaatgatttaatgtcattacagtcagcagagattggaactattgtttgtaatgacaccggaatatctccacaaccagcacagcaaattacacgcgctactttttcaggtgtagtttcgttagaacctaaagaagacggttctgttggtgacccagtaataattcatattctcggattgccgattagaattgcgaatggtgatgacttcgcagctgtagcaacacgttggtatgataaagtaaaagaattagaagctgttggaaaggtggttcaacaggttactcaatcacctgcaactcctcagtatgttgatattattcatctggattatcagaaccataattttgaaacatataaaaagtatggtttaactgttgagtttactattacttcacctgctaaagcgggttatggacaatgggacgctattggtaacgaaactaaaaccttcggtgcaaacacatttacattccactattttagaaggatgggataatggcccagaataactataatcactacagtgatttggccaaatatacgatatttgacccagcaaatacccaatggccagttgctacaaaagacgtccaatcagcgttagcgttgattggcagctgggcaagaactgacactggattacctgcagcatctccaacagtagcaggtataattcgtacagctacacaggccgaagttgaagctggaactgtaggtaatgctgcggttaccccagctacattaaaatccacaattactcggcctgaagcaactaccgcaattcttggcttaacccgatacgcaactaatactgaagccgcagcattaaccgcaggaaatagaactattaccgcggcggctctcggtcatgtgtttaaaactgtgaaagccaaagaaaacgtagatggaactgttaggttaactactgcggctcaagcacaagcaggaactgacgaaactaccgcagtaactcctaagcgtgttgtagaaatgattggaaagttcagtgtcagtcctcctagttatacctctgcgacagaaagcaacttgggattagttcgtgtcgcaacccaagcccaggtagcagcaggtgctgttcacgatggatacgcagtaactccaaaaaccttcatggcatcaaaagcgtctgacagtgtatttggtatagtaaaatttgctaaagactcagatgtggcttcagctacttctaacaatttggctgttactccaaaaagtcttcaagcgctaaaatccaccaaggataaatatggattaaccagattatcaggttctccaactactgatgcttcattggcggctgctgcaacagatgcagtctttaaaactcgtagaataaacggaaaaactcttgataatgacataacaattactaataatgatattaattgttatacaagacaagaatccgacgggcgctacatgccagctggaactagagtaggtaatgttacttgggttgaaggacaatcttggattagccgaggtacaacgtttacatgtaattcaccatgggaagctcctagtaaattagctttaaatgttaatgtaaaatttgagcgtaacaacgacggatatgacaatcgtattttcaaatgtgttttaatagttaatggctcccaatggggaggtgaacttactcttaacattgaaaatactaaaggcggacgaaatggtcattcatggagatttgaagcttacgcatctagcaactttttcttctacgacattcctccaaatgccactgttcaaataagaccaatagaagacagccgtattatattttatgactgcatgcttacattctgcacaaatagaccgtaaggaacaatatgaccaaactagtagattcgcttccgttcgtagacggaattccagacgattttcaacagagaattaactggataaaaaatacagagcctcttaatggggcttcaacccgctatggaaatgatggagaactgaatagagcctctgtgcagattcagaaaaatgtggttcaagtacatagtgacttgaatcgcgttggagctgtagtagaaaatgttcaagtagatgtagaccaaatcaaaaaatcgttagaaattacaggttcttctgacgctattgagcaggtttatatcaataaaaagaatattgaaaagcatgatgggcaaattcttaaattagaagaagacactgaaaaacttcgaactgatcttgattttctcgaagaggatgtaggtgtttatgattctagtaaagatgattattacagaacagttcgtgataatatagtttgggttaaacgtgaaattggtgcgtatcctgggcaagatgttaacggacagcctaagcaagacgctccaggttctggtatgaaatatcgaatcatcaataatgcgtcagctatagtaaaacatgacgagcgtattcaggcgctagaggatgcgtacaatgattcagacgtaggttctctgactattgaagtaaacgacctgcgtaaagaagttggtcctaaatccggagctacgtcagcttcaatttatgcaaggcttgtgaataacgctgatgctatttccgcagctaataatgaaatctttgctattaaccaagccattgattttaccaatccagtaaaaattggagctcgtactactagattagaaaacgattatcgtatagttgatgctacactaaattcagcacagactgggttagttcctcgtgtcaataatattgatactcgtttaggttcttctgataaacccgatagtattgaaggaaaaattagttctctttcaactgaccaagggtacatttctgatgtagtaggacgtgatacttcatcggggcttcaaggccaagtagcatggataaatcagcaagttggtattgttcctagtggacagcaagttcctccggggtcaattttagcgagaatgacaaatgttgaagggatgcaaaactctcagcagtctgctatccaggacattcaagtagaaattggcaataacagcgaagggttaaaaggttctgtatttacgttacagactcaaatgaatggtgacttttcgtcagaaaatccggttcagcgggatggcgtgtatgccactgtagtagaattgcaagataaattcgtgactgcagttactgacgtagaacaagatggagcatacctccgtaaacggggcgaatggtttaagaagccttcatcaataggtgaattcagtaaagaagatttcactgttgatttaagttctgatgcattggtaaatcctaactcattggtcgctgcttcattcaatgctggcattcgtattgttgatgatattattgttgatgacgatggcgtattttgtgtagaaactgatacagttatcgaagcttctgattcagataaagccgtccaaattgttattctcgtcaataacattgaggtgtttacttatagcctaggtgttaaagcagtaaccggcgagcaactgttgaaaaccaagaaacttattgagttttcgtctggcgatgcaatcaaaatcgtgtatagagctgcttcagaagaatcaaaagttcctgttagtattaaatcattggatattactattcatccagcagtataatgaaagggaccttcgggtccctttttcgtataaatagaatataaagaggagcttatatgtcatacaacacatacaacccaaaaacgcttaaagacgctatacttcgacgtctaggagcgccggtaattaatgtcgaagtaactgaagaccaaatttatgattgtattcaacgagcattagagttgtatggtgaataccactttaacggattgaataaaggctatcaagttttttatattggaaaagatgaagctgacaacgcaagatttttaaatggtgtgtttgatttgcgtggtcgtaatgtatttgctgtcactcaaattgttagaacaaatgtaggttcattaacttcaatggatggtaatgctacttatccgtggtttactgactttttaatgggaatggccggaattaatggcggaatggggtcaagctgtaataagagttatggaccaaacgctttcggtgctgacctgggctattttactcaattaatgacttattggtcaatgatgcaggatttgcttgccccacttccagactattggtataactctgataatgaaatgcttaaagtaatgggcaacttcatgaagggagacatcattgtttgtgaatgctggactaaatcatttatgaataccgacatgatggtaggtaatactgcaagttacggcttcgctggtgaacaaacttccgaccattggggcttaggagataggtatcagaatcctaaccttcgcaataacggccaatatgcaggtgaaggtaatacaaatagagaaggtgcttataataatcgttgggtaaaagattatgctacagcactgactaaaaaattgtggggtgaaattctgtttaaacaccaagggctacaattagccggcggcgttacagttgatggtcaaacacttaaagtagaggcccaagaagaaatcgagaggctccgagaggaacttgatttacttgacccgggttgtcctattctgttggggtaaaagatgactacatttaattctagtttattcgctcgccttgaggattaccgaggatacaataaaactaatgagacagaaattctcaatccttatgtgaatttttataatcacagaaatagccaaacactagcagatgttttatcagctgaggctattcaaatgagaggaattgagttttatttccttcctcgcgaatataacaatccggatttgcttttcggagaagacccatcaagtaaattcaccaaagcttggaaatttgctgcttatttagattcatttgaaggatattctggtgataacacgttctttagtaagtttggtatgatggttaatgatgaagtcaatctgactattaatcccaatttattcaagcatcaaactaataattctgaaccaaaggctggtgacctgatttattttcctatggataattcgttatttgaaattaattgggttcagccgtatgacccattttatcagttaggtcaaaatgttcaacgtaagattactgcgcagaaatacatttattccggtgagcagcttcaaccagaattgcagcgcaatgaaggaattatcattcctgagttctctgaacttgatttagaaccaatcaaaaacattgattctcttgctgatatttctgacgtgcaatacgcagaaagcgaggcaattaataaagaagcctctgaatatgttcatccgtattatgttaataacggaagaggacttgagtctcctcctaaagcagattcgtttgatgacggattttttgaataaataaaataaagatgggacctttgggtcccttaggagaaatcatgtttggacattggtataattcgtccttgcgccgatacattgtattgctgggagatttattttctcatgtacaaattgctcgttggcgtgaagacactggactaaaatatattaaagtacctatcacttatgcttcaaaggaaaaattcctttctcaactcggaaaatggactgctatccagtctaccgagaataaagcaaagatagaaactgttttgccaagaatgaatttgcacttggttgatatgcagtacaatgcgatgtataaaacatcacagttgaatagaaccaaatcatataaaaccccttcaaaaattacatctcagtataatcctactccgattaagatgatttttgaattgggaatttatacacggaaccaagatgatatgtatcaaatcatcgagcaaatcgttccttattttcagccgcattttaacacgactataactgaactttacgacaaagacacgagctttaatcgtgatgttagaattgtattacaatcattttctcaggatgaagctgttgacggagataatattactcgtcgtagattagaatggtcattgatgtttgaagtcaacggatggctatatcctcctgttgccgaggttgacggcgaaattagaaccatttatttggatttcttcgctaatagtaaagaattaacaccagaaggaaattttgaatctgtggatagcgaagttactccacgtgatgtccagcaagaaaactgggatggttctagtaaacaaacttattctcacgatattcctattccggtaaatccggaggctcctggaccgagaggtgaaaaatgagtgaattacaattagatatggctaaattattagacatcgaaggaattcctggaatagaaggacaagaaattccagtttatgaaaaacttgaattagttgaagttaaatctaatccaaatgaccgtaaacctgacctcgaagatgactattcggtcgttcgcaagaacatgcacttccagcaacaaatgttaatggacgcagctaaaatatttttggaaactgctaagaatgctgactctcctagacatatggaagtatttgcaactcttatgggtcagatgactacaactaacaaagaaattcttaagcttcataaagaaatgaaagacattacttctgagcaggttagtactggaaaaggagctaatcctcaacaaggaatgaatattcaaaacgcaacagtctttgtagggtctaccgctgatatgatggatgagtttggagacgcctatgaagcacaagaagctcgagagaaaatagtaaatggaacagactcaaccgtttaacgttctgagtgatgcacatcctttaaatgacggtaaacaagtggttattcgccatccgtctgaaatggaaacgaaaattgaaaatggagttcgtttctttaaatcgcaatgggatgataagtggtatcctgagaaatttgaagactatcttaagctgcacgggatagttaaaattcgcctgcaaggtgaagacccagcgcattttcaaacgtttaaggataaaaataataagcgcactcgttatatgggattgcctaaccttaaacgagcaaacattaaaatgcaactaacccgtgaaatagttgcagaatggaagaaatgccgagacgatattgtgtacttcgcagagacctactgtgcaattacacatattgactatggtactatcaaagtccagctccgtgattaccagagggacatgctggaaatcatggcggctaaacgtatgacttgttgtaaccttagtcgtcagcttggtaaaaccactgtagtagcaatattccttgcgcactttgtctgttttaacaaggataaagcggtaggtattcttgcgcacaaaggctcaatgtctgcggaagttctcgaccgtactaagcaagcaattgaactgcttcccgactttcttcaacctggcattgttgaatggaacaaaggctcaatcgaattagataatggttcatctattggagcgtatgcttcaagtcctgacgccgttcgtggtaactcatttgcaatgatttacattgacgaatgtgcgtttattccaaacttcatcgatgcatggcttgctattcaaccagttatttcatcgggtcgtcgttctaaaattattatcacgactacaccgagtggattaaaccacttttatgatatttggactgcggcggttgaaggtaaatccggctttactccttatactgcaatttggaactcagtaaaagaacgcctatataacgacgaagatatgtttgatgatgggtggcaatggtcacttcaaactatcagtgcttcttctcttgaacagttcaagcaagagcactgcgctgaattccatggcacatccggtactcttatttccggtatgaaacttgctaatatggattggattgaagttactcctgactcacacggattttataaattcaaagaagctgaagcagaccacaagtatattgcaacccttgactctgctgaaggacgagggcaggattaccatgcactaaatattattgacgtaaccacatctgagtgggaacaagttggagtattgcattctaatacaatttctcacttaatcctcccagatatagttattaaatatctaatggagtacaacgaagctccgatctatatagaactcaactctacaggtgtttctgtggcgaagagtctttatatggatttagaatatgagaatgtcatttgtgattcaatagttgacttaggaatgaagcagacgaaaaggtcaaaggccgtcggatgttctgcactaaaagaccttattgaaaaagataaactcattattcaccatcgtgctactgttcaagaatttcgtactttctctgagaaaggagtatcctgggcggcagaagatggatatcatgacgatttaattatgtcactcgtaattttcgcatggttaacaacacagcaaaaatttgctgatttcgtggataaagatgaaatgcgattagcatctgaagtttttaaacgcgaattagaagatatgaacgacgattacgctcctgtagtgttcgttgacgccgtgaatagcgcagaatatgcgcctcaagaacatggtctttcatttgtataaataataaaaagcaaacaacattgaggatatatcatgcctttagtctctcctggaattgagctcaaagaaacgagcgtacagagcacggtagtacttaacgctacaggtcgtgccgcaattgtcgggaagttccaatggggtcctgcatatcaagttacccaaatcactaacgaagttgaactggttgatatgtttggtggtcctaataaccaaactgctgattactttatgtcagcaatgaactttctgcaatatggtaatgatctacgcaccgtccgtgtagttaaccgtgaagctgctaaaaacgcatctccgctggttgataatattgaatggactatcactactgctggtagtaactatgaagttggtgataaaattacggttaaatatgcagaccaaactgtagatgacaccggttcagttactgaagtagatagtgacggaaaaattaagtcggtgttcattccgacatcgaagattattgcatatgcaaaaagcattaatcaatatcctgatttagggtcttcgtggacaactaccattacttcacagagttctggtgtttccgctgtcattactttaggtaaaattatttctgagtctacagttttactgactgagcatgaaactgcccatgaagaaatgacaaaaaccgaattccagactgctcttgctaagtataaaatgcctggaattgtagctgcgtatcctggcgagctcggaaatcagttagaaattgaaatcgtatcaaaagctgcatttgataaaggcgaacaactgacgatttatccgagtggtggacagcgtgcatcaaccgcaaaagctgtatttggatatggtcctcagaccgatacgcagtacgctatcattgttcgtagagatggcgcggtagttgaatcaacggtgttatcaacaagccgtcaagataaagacatctacggaaataacatctttatggacgattatttctccaagggttcttcacgctatatatttgccactgcgcagggatggcctgaaggttttgctggtgttattcgtctgggcggtggggtttcagctaatgaatcagttactgctggcgatttaattcaaggctgggatttatttggtgaccgtgaagcattgcgtgtaaaccttctgattgctggtgcttgtgccggtgaaacagatgaaattgcaagtacagtacaaaaacacgtttcgtctattgcagatgagcgtcaagactgtttagcactcatttcgcctccaaggtcaacgattgtaaatattcctctgactcgtgctgttgataatttaattgattggcgtcaaggtgaaggaagctacgactctgcaaacatgaacatcaatactacgtacgcagcaattgatggcaactataaatatcagtatgataaatataacgacgtaaaccgttgggttccgttagctgctgatattgcaggcctgtgtgctcgtacagatgatgttgctcaaccttggatgtcaccggctggttatcgtcgtggtcagattctgaactgcattaaacttgcgattgaacctcgtcaagcacatcgtgaccgtatgtatcaagcaggtattaacccggtaacgggtcaaggtaccggtgatggtttcattctgtttggtgataagactgcaaccactgttccaactccgtttgaccgaattaacgttcgtcgcttgtttaacatgctgaagaacaacatcggtgattcttctaagtggcagctgtttgaattaaacgataactttacccgtagttctttccgtatggaaaccagccaatacctcgcaggtattaaagcgctgggtggtgtatatgacttccgagttgtatgtgataccacgaacaacactccagcagttatcgaccgcaacgagtttgtagcgagcttctatatcaaaccggcgcgcagtataaattatattacgcttaacttcgttgctacggcaactggtgcagatttcgatgagttgatcggaccacaataaattgtacattttcgctaaatcctgatacaattgcacatatgaaatattatgtgcaattaaggaaaaccaagtgattatctctaaatttgttaaagtaaaaataattcctaaaaattttaaatacttttcggaacttggatacaagctgtctcctctgggttcgcctaggcatggattcaaatattattcaattgatatcagtgttgaccatcttgaacctgggtcaaacatatatgttgagtgtgtttgtgataagtgtggtgaacaatattcgcagcgatattgcagagacaccgacgtgtgctatgattgccgacatgttaaagccatgactggcaacaagtatggttccgcgaacaaagggaaatctgttgaaatcatgcgtggagaaaatcatcctcgctggaatccaaataagacagaatataatgaatatgctagtaaagttagaagagaaacttctaagcataaaccaatttattctaaatgggaaaattttgataagattggactatgtggaatacctggagcgtatcagttagaccataaagtttctgtcgcgtatggattttacaacaaagttcctcctgaaattataggaagcattgacaatttagagataatcacttgggaagaaaatcggtcaaaatcaaaaaaatctagtattgatttatgggatctattgaaatgaaccccaggacattctggggtcatctaatctttagatgataaattatattaccgcacactttaatagcctctacgatgatgtagtcaatcgagaggctatataaatatctataggaaacaacgatggaattaacagacatcactcgtgcgtttgaatctggtgactttgcgcgtcctaacctgtttgaggtagaaattccttatctgggtcgtaacttcagtttcaaatgtaaagcagcaccgatgccggcaggtatcgtagaaaaagttccagtcgggtacatgaaccgtaagattaacgtcgctggtgaccgtacttatgacgactggactgttaccatctataacgatgataaacacgaagtacgtaaggcaattattgcttggcaggctcaggcccacgctcaaggcaatgatatctctggtatgactccagctgattacaaaaaagttgctactgtacgccaatttagtcgtgatggcaaaactgtcacaaatgaacacaccattactggtctgtggccaactaacgttggtgaagtacagatggactgggacagtaataacgaggtagaaacgtttgaaactacctttgccatcgactggtgggaataatgctatggggcttcggccccgtatcgaagttctgtgagttatttgcttaaatatctgacaaaacttcgatataaatatacttatagataatttcggagactccaatggcctttcatattttggacttattcgctccgtgggaaaaacgcgacgaagctgaatataagcaacaaatcaacaatgacctagagtcaatcactgctccaaaatttgatgatggagctcgtgaagttgaatcaaacgaaaacgaaatccagtacaattcattcaaccaaatgatgtttggttccaatgaacctggaatgaaaacaactgctgatttaatcaacacttatcgcagtttaatgaataactacgaagttgacaatgctgttgaagaaatagtttctgacgcagttgtatacgaagacggtcacccagtagtttctcttgatttagattctaccgacttcagtcaagcaattaaagaccgcattcttgaagaatttaatacagttttaacatgccttaatttcgagagaaagggcgctgaccatttccgccgttggtatgttgactcaagaatattcttccataaaatcgtcaacaccaagaaaatgaaagacggaattcaggaactgagacgtcttgacccgcgcaacttacaattcattcgcgaaatcgttactgctgatgatgctggtactaaaatcgttaaggggtacaaagagtatttcatttacgatactggcaaagaaagttattatgcagatggtagattatattccgccggaacgaaaattaaaattccacgcgatgctatcgtatatgcacattctggattagttgattgttcaggtcaaaacatcatcggttatttacaccgagccgttaaacccgccaaccagttaaagctattagaagatgcgttggtaatttatcgtattactcgtgctcctgaccgtcgtgtgttttacattgacactggtaatatgccttctcgtaaagcggcagcacatatgcagcatattatgaacacgatgaaaaaccgtgttgtatatgatgcatcaaccggtaagattaaaaatcagcaacataatatgtcaatgacagaagactattggttgcagcgtagagatggtaaagcagttactgaagtagatactcttcctggtatgtccggtatgagtgatatggatgacgtccgttactttagaacagcgttatacatggcattgcgagttcctctttcgcgcatgccagatgcaaataatcaaggtggtgtgcagtttgatgctggcacaacaattactcgtgatgaacttgattttgccaaatttattcgtagattacagcataaattcgaagagattatgcttgatccacttcgcactaatctaattcttaaaaaagttttgtctaaagatgagtgggaagacgaaataaataatattaagattgtgttccataaagattcatatttcaccgagttgaaagatgctgaagttatggagcgtagaatcaatatgctcacaatggctgaaccgtttatcggcaagtatatttctcataagacagcaatgaaagatttccttcagttgtcagatgaagaaattgaacaagaagccaagcaaattgaattagagtctaaagaggctcgcttccaagaccaagaaaatgaagaggatttctaatggaaaattatatttccgcaattgaatccagagacctcgtagcagccaaaaaagcttttggtgcaattatggctgaacggacatctggtttaattgaagagcgcaaaaaatttatcgcagcgtctgtcatgattgagggtgaagagcccgatgaggacgaagatgatgacgacgaagatgaagataagtctgataaagacgaagacgacgaagaggacgagtaatgcttatactgcctgaaaatcatgaattagttatcgacgctgtcgaagcttttcttcctgaagcacaggcacgttttgataagttgtccgcagcgctttctaaagatgatataaataaaattgtagagaacatggttacttctgagcctgatttagcaattgctttaggttcaattaacgaatctctacaattaaacgaatttatcgttaagcacgttgattctaaaggtactattacccgtaccaaagatcgtaaaacacgtgagcgtaacgcgtttcaaacaaccggactttctaaagctaaacgccgccaaatcgcgcgtaaagcagtaaaatcaaaacgtgctaatccatcggctcaaattcgtggattacgtaaacgtaagaaagcacttaaacgccgtcaggctctggggctaagttaatggaaaacctcaatgaacaacttttaattgagcattggggtcaaccgggcgatgtaattgatggtaaacccatgctggaatctattatcgttgaaggcgaaaatgaatctggcttaaaacctggtctgtatatcgaaggtgtttttatgcaggcagaagtagtaaaccgtaataaacgtctttatccaaaacgcattcttgagactgcggtaagccgttatattaaggaacaggttgctactcgtcaggctctaggagaattaaaccatccacctcgtgcaaatgttgacccgatgcaagccgcaatcattattgaagatatgtggtggaaaggcaacgatgtttatgggcgagcaagaatcatcgaaggagaccacggtccaggtgataaattagccgctaacattcgtgctggttggattcctggtgtatcaagtcgtggacttggttctttgaaagactcaggaaaaggatataacatcgtacaagaaggctttcgcctgactgttggtgtagacgcagtttggggtcctagtgctccggatgcatgggtacaaccgaaacaaatttcggaaaatacctcggcacaagttgccaatagtgctgatgatgcttttatggctctcgcagagaagttaaaagcgttataaataattatgtaacttaacacaggacatcaaaaatgcttaaagaacttttaatgaccgaagctaaaactatcgatgcttccgtcgctcttgacagtattttcgaatcagttcagctttctccggaagctaaagctaacttcagcactgtattcgaagcaacagtcaaaaaacacgccgtagctctggcagaatctcatattgaaaagattgctgagaaagcagaagaaaaagttgaagaagaaaaagaaaaagctaaagaagaagctcgcgaagagctgaaagaagctgcttctaaatactttgaccatatcgctgcagaatggatggcagaaaaccagctggcggttgaccgcggtattaaagctgacctgtttgaatccatgtttgtcggtatgaaagagctgtttgttgagcacaacgttgtaattcctgaagaatcagtagacgtagtcgctgaaatggaagaagaacttgctgagcaaaaagaagaaactgctcgtttatttgaagaagtttctaagcgtgatgcttatatcaattacgcccaacgcgagtatgctattcaagaagcaacccgtgaattgactgatactcaaaaagagaaagtagtttctctgacagagggtatggattattctgactcgttttcaactaagctgaaagctattgttgaaatggtgcagggttctgtagagcagtctgtaacggaatctgccgatataaatactatcgacaaagaagcagacggtttaaacttcacaactgaagcagtcgaagaaactcctgcgactaaaaccccatccgttatggatgcttatgtggcccaagcggctcgtctttcttaatttaaaaggttatacaacacatgaaaaagaataaacttatcgaaaaatggcagccgctgcttgagaacgaagctctgccggaaattgttggcgctagcaaaaaagctctgatcgctaagatttttgaaaaccaggaagctgatattaatcaggctcctgaataccgcgatgaaaaaatcgctgaagcatttggttctttcctgtctgaagcagaaattggcggtgaccacggttatgatgcacagaacatcgcagctggtcagacctctggtgctgtaacccagattggcccggcagttatgggtatggttcgtcgtgctatccctaacctgattgctttcgatatctgtggtgtacagccgatgtctaacccaaccggtcaggtattcgctctccgcgctgtttacggcaaagacccgctggctgctggtgctaaagaagctttccatccgatgtacgctccggatgcaatgttctctggtcagggtgcaaccgagaaatttgaagcagttaaagctggtgatgctctgactgttggtgatatcgttgttcacgatttcgcacagaccggtcgtgctcatctgcaggttgttgaagatttcactgtagacgctggtgctaccgatgctgctaaactggacgctgcagttactgccgctctggaagctggtaaagttgtagaaatcgccgaaggtatggctacttccgttgctgaactgcaagaagcctttaacggttcgaaagataacccgtggaatgaaatgggcttccgtatcgataaacaaaccatcgaagcgaaatctcgtcagctgaaagcacagtattcaatcgaactggctcaggacctccgtgctgttcacggtatggacgctgatgctgaactgagttcaatcctggctactgaaattatgctggaaatcaaccgtgaagttgttgactggattaactactccgctcaggttggtaaatctggtatgacccagactgttggttctaaagccggtgtattcgacttccaagacccgattgatatccgcggtgctcgttgggcaggtgaaagctttaaagctctgctgttccagattgacaaagaatccgctgaaatcgctcgtcagaccggtcgcggtgaaggtaacttcattatcgcttcccgtaacgtagttaacgtactggcagctgttgatactaacgtatctccggcagctcagggtctgggtcgtggttataataccgacaccactaaagcagtatttgctggtgttctgggtggtcgctaccgtgtatacatcgaccagtatgctcgtcaggattacttcaccatcggttataaaggtgctaacgaaatggatgctggtatctactatgctccgtatgttgcactgaccccgctgcgtggttccgatccgaagaacttccaaccggtcatggggttcaaaacccgttacggtatcggtattaacccgttcgccgattctgctgctcaacagccgaaaggtcgtattacctctggtatgccttctatcgtcaactctgttggtaagaatgcttacttccgtcgtgtatgggttaaaggtatctaataccaataagggagccttcgggctccctttagttgttttaatggatataaataaacttataaatccacagaggaaagcgcaatggctaaaatcaacgaacttctgcgcgagtcaactacaacgagtagcaacttaattggtcgccctaatctcgttgcattaacgcgcgcaactactaaattaatctataccgatcttgttgctacacagcgtactaaacagcctgtagcagcgctatatggtatcaaatatcttaaccctaatggtgacctgacgtttaatacaggtgcaacctatgcaggtcaaatcggtgccccggaacgtgagtcaattgaagaactcactatggcgaataaagattcttttaataaagatgacatgtttaagtaccagaacgtagtctttaaagtacttaaagatagcccgtttactggaacaacagaaaccgatgagtttggaattgtatctgaagcagtagcagctaataatattcgtatgttgtcagatgctgcagtcactgaaaaatttgaaggacccgattcagacccaatcaccgaagccagttttaaaattgataaatggcagacccaggttaaatcacgtaagcttaaaacagatttaacggtagaattagctcaagatttagaagctaacgggttcgatgctccagagcttattgatgatttacttgctactgaaatggcagaagacattaataaagacatcctgcaatcgttgattacggtttcttctcggtttaaagtaactggtgtatccgataaaggtgtattagatttaactaagcaggattctgccccggaacaaggtcgtactctgtatcgtttcatttgtgaaatgaattcagcagttcaacgtaatacttcttattctggtacttatgcagtagcatctactcgttgcgcggcagtactggcagcttcaggttggttaacacagaagaatgatggcactattccggacaacgcgtacggtatgctgaataacggcttacctctttattgtgatactaacagcccagttgattacgttattgttggtgttaaggcagaatttggtgggaaggaaactgtaggttctttattttatgcgccatataccgaaggcctggatttagacgaccctgagcatgttggtgcatttaaagttattgttgacccagctagcttgcaaccttctgttgctttactggtacgatatgcattgtcagttaacccgtatactgtaggattggacgaggacgaagctcgtgtgattaatgctgcggatatggataagatggcaggaagaagtaagatgtctgtactgctcggtgttaagttacctaagcttattgcggactaatttatggggagcttcggctcccctttttgttataaactaaatatgtcaaacctcggggagtattcatcctcgagggatttaaacacattcttatcatagagattaacacattctatcccatgcctgcgggctatatcaacagctactctcgtccctccagatacactcccacatcttttttcaggcgcccaatataataccttatctacaggctcagtgcattctaggcccaatacctgcatagaattccgtgcgaataaagtctgcactatcttcgagcattcatcccagtacgacgtaacttctctcgccttaatgatgcttttgattttggcctcgtttgataattcagaccatacaacaacgcctgtatcaggaaagtgaccacaaaagccagagtaaggaataatcctacaagaatttgacctatcgtatttcgccaaccacgcttcatctgaacccggagctccacctgaatatgaaaaatgcccctcttcagagaggcgttgaccgattatagtcattagacttagaactctgcgtggcgcttctcttgaaccaatcagcgccagcctcattattctaaaacctcatgccatttgctacgaatagtgttttgaattaaagtagtcagttctttcttaacaacagaaggattatcagcgaatagcatgtcatgaccttcacgtgctgcttcattaatgatatctttcatagtcagacccataacacgaccgaaatctttagcagttacagtaccaatatgagacagaacgttacttacacggttccaggttacatattcagaaaagatttccagaacacgcttatcattctcggtgagttcaaccttcgctttaataggcttatcggatttagccttctcactgaacttagagttcttacacttaatagcaacacgagtaccattattgaagaacttaggatgaaccggcttaagaacatagccttcagctacgccagtttcagaagaagcctgcggaccgaacacatgtttatttgcatgttcaaggtcagtcgtgtcaacaagctcattatagtaattgacaatagatttaaagtcattcacatactgagatagctcggcaaatgaacctcgaccaagaagtggagctaatttaagaccaagaccagtagcaaacgattctactacataatcgtcccaataaactttttcgttaccggaatccgacaggatatcaaatacgtagaaatctttctcaccatagtctacgcctttctgaataccgccaccggcaaattcgccgaagatttgaacagatactaaatccatggcgttcagcatgttctgcatcttaacgaaagaatccttatatttcttcatgataatatcatgaccaaagaaactttcgctttctaaaataggtccagtacgcttagccggaacgatttcggtaggagtaataatcacactgaagttagtgccatgaatcttctcacgagctacccactcaacagtatgcatatcaaaaccagcaccacgaatcttctcgatgaacttaccgttgtaatgattctcaagactagaatattttgcaaacattataatttccttagaatgtgattttcataaagtcagtatcaccgttacgctgggaactggtataatttgtaacaaatccttcatcatgcaaataattaagaacacttgtaatgtgtttcttaactagactacttggatacataattagctcacgcttacccgctaaagcggttttctcaatctgagttaatacttcttcttttgcttctgataattcttctgtggctacgttaatagcagtattagccattctatcggcaaggttcataatttttctctcaataaataaaataaaaccaggagtccatctattttggacaagggtaatggtatcagaggatttcccctgagcccattataccacatcgatttttaaagcaattaatatccgcttggaacaaagcgatacattaatttgtcatgtttatttcgcatgatttcaaactggtttttaggtccaacttctaatactaacggaacatttacatccattagcatccaatcaatttttccataccgttctttaatcaaatccgatattttgcgtgcgccatttttataataagtgttatcgaatattcgagtcatcatattatcaacaaatcttgatgcagaacgccaataattaatattgctcgctgcaggagcaaacttgcgctctaggaacatctcaagtttctcttctacccttttatctactttagacattataaagtcctcatgtgtttaacaagtttcttatgacgagattttatatcaacgtttgttaagcgttttcgatatacaactttctctttttgtttaaaccgctcatgtgctttctcgactgagacccacaatttagcagcttctgctggagtgatatctaatgctctcgcaatttcttgaaaatcttttccgctttcatgcatcaagtgagcttgtaatgctttcataataacctcatctatgtgacgaggacataataaaccaatccgtgaatagcaaaaagggagcccgaaggctcccgaatattacggatagataatacctgcttccagcgcagtacgatgaacaatgtatccatttctagattcttgtacatcgacctctggataatcatctagcattttagctagagtataccgatgcaggtaataatcgctgtcagggtcgtcgagtttccaatctttgccctcaacagtcattcgctggatttcatccattacccaccatccacaccagatataggctgttccacggaacggtagaggatgaatatacggaagttctccgtctggctcaggggctactcttttggtaatagttacattaccggttgtagtcactgtgatcggattgtaattttctgcagaaacctcaacagaaacctcaatcacttgagaccctatatcagacgtgtcaatcactaacgtgcttgttgagccttctacaggtgaaccgtctttggtccaagaataaaccccagttgcaccttctggagcaccgataacgttggctttaaaagatgcttcagacccttgttcggtcgtaatagactcaggagtcaaagtaacagaaacaccgctcatggtctttttagtaaaagcgacagcaatacctttagttgcagttccattattatagtctggggcagaaaccgttacttcacaattcagtgtgtagctagtttccgttgactcggttaaggtaattgttttacccgtttggccagaaataacagaagagccacgtttccaaacataagcaatgcttgctcctgacggggcgccagtaacatcagctgtgactacttgggattgaccaatttctttagaaacagaagttgggctcaaagttaaagtaatcgcaggcatagttttgttattaacggtcagagtagtttctgcttcagccgtttcaggatcgccttcagccggagtaacagtagcaactactttaacggtcttactacctgcaggtcctgcagcaacataattcatagctgcggtaacagaagactgtggtgctccatttacagtccatacaaacgtttctgtgccttcagctgtggctccagaagttgttgcagtaaaattggttgttgctccaatgactgccgaagcagccaaaggagcaatagatacgctataagccataggtgttccttattttaaagttacaaatgaagaattacgtgtttcacgaatcataacagacccgtttcttttgatgtaatagattaaactaaacagtgtctggtgtgctgatgggtgttcaaacgacgttggccgagatttccagtccgggttatctttaatccattggtaaatccaccatggaagagtaatatatcctgggttcttacctagcaactgcatgtttggactaaagtttttaggaagctcaatggtttcatcagttttaacaattttaactactttgtccattgctttggagaattcttcagggtccgtagtactaattggaatgtttgtaagttttccttcatcatcgatatggataatgctatctccaataggagcttcagcataaaatcctttatcattgatagaaggagtttttacttcaaatccagggtcatttactttaggtgtttctttataaaaatctgggtcaatatcatgaattttaacacttgcacttactggagcatcaaacagtagttttgcttcatcagacgcttcatcattgaaaagtgcttttccttcaatttcatcatctgcttggattaaatcagcaattgatagaccatcgttgtcttctggcataggctcatcggccaatttagccagttctttttccaaatcagcaaccatattgtcaaatgagcgggtcttcttcagtttaataccgaaggttttggcatattcgtcgagcttgtctttagcttcttttttatcgagtgcctgaatttctttaatatagtctttatctagcattgggtgtgcctcatgtaatgtataaatatgattgtatttataaactgaggatagtacagtgcacgacatccaagtcaaatttaaagattttagtcatgttcatattgagtgtgatgactcaattttctatgaactcagagactattttagcttcgaagccgatggatacagattcaacccgaaatatcgttatgggcattgggatggacgaattcgtctgctagattataatcgtctcttaccgtttggtcttgttggccaaattagaaaattcgctgaccaattcggatataaagtttatttcgatccaactatattcgagcaagaaactctttcacgggaggattttgacacgtggttagcatctaaagaaatctattcaggattaactaagattgaaccccattggtatcagaaagatgctgtatatgaaggactagttaataggcgtagaattcttaatcttccaacgtctgccggtaagtctcttattcaggcattacttgctcgttattatgtagaaaattacgaaggcaaaattcttatcatcgttcctactacagcgttagttgaccagatgattgatgatttttgtgattatcgtttatttcctcgcaatgctatgttgggtattcgaggtggtactgctcgtgattcgaatgcattagtttatgtatctacctggcagaccgctgttaagcagcctaaagaatggttttctcaattcggcatgatgatgaatgatgaatgccatcttgcaacgggtaagtcaatttcaacaatcattgcgggtctcaccaattgcatgtttaagtacggactgtctggttctcttaaagacggcaaagctaatatcatgcaatatgttggcatgtttggtgaaatcttccgtccggtatcaacttctaagttaatggaagacggacaagtaactgagcttaaaattaatacaatcttcttaagatatccagatgcagccgcaaatgctttaaaaggaaaaacgtatcaagaagaaattaaattcatcaccaatgttaagaaaagaaaccgttgggttgctaatctagctgctaagctagcatcgcgtgatgaaaacgcttttgtgatgtttaaacatgtagctcatggtaaagagctatttgagatgattaaagctactggtcatgagcaagtttattacgtatcaggtgaagttaatactgaaacacgtaatgctttaaaggctatggcagaaaacggaaagggaattattatcgtcgcaagttacggtgtattctctacaggtatttctgtaaaaaacctgcatcatgtaattttagctcatcccgttaaatcgaagattatcgttctccaaacaattggtcgtgttcttcgtaaacacaaagataaatctttagctactgtctgggatatcatcgacgacctcggtgtaaagccgaaatccgccaatgctaaaaagaaatacacgcatttgaactattgcttaaaacatgcattagagcgtattcaacgatatgctgatgaaaaatttaactacgtaatgaaaacggtaaatctatgattaaatttgaagatatttatgaagccacaattcgtgaggctactatcgataacttcatgagtaaaattaatgcttgccagaccttagatggtctggaagaactcgagaagtattacgataagcgctctaaagaaactactcttgctgattctgatgacatcattgtgcgtgatgctttggcggggcgtagacaggctcttgaagccgattctgaagatgaagatgacgaagacttctaatacaaaaaagccccaaccgaaaggaaggggcaaagccaattggctacatcaacactagactaaattaaaagctgcgtttcttgtaattgctcttctgtgtcttcagtgacaggcaattcaatcgcataattatagcaagctccgggatgaaccgggcctttgtctgtgtggacaaccaatgcttcatcgattggtcctttacagacgacacataccgtattcgacatgattgtctccttagtttacaggtttatttattacgcgccagcttcaaactgacgaaggtcaataatgtgcttaatgctaaaacctcgtgacttgatagcatccattgcatcactacagaactccaaaagaattccccaatattgcaatttagtatctacacccaagatttctttatcagcgcttaaaacagttttcatttctgatttttcgtatacatccatgcatacttcaccaccaacctcgccacggccagtgtaataatccaatcgtgctttaagattttgctttttgagggcatctaatcttaacatctcttttcgacaagtcgagtgcttacgcacccatttaccatacagaacggggttattagccgcttcatactgtagtttagtctggtcgataatcaaatcattatccaattcatcctgtaattcttctaatctcattctatctccactctactgtttctttggaaggactagtcccattatactctactgctagagttagcattactacgcatctgtatacgtatacgttctagcgtatcagggtcgtctactatagaaaactgcacggtgacaattatagcgttatcgtcatataacggaagcacatcaaccgatagacgattaatcctaggctcataattacgcacggcagagactatattacgctttatcgtatcaccagttaacggagtcatgttttcaaataattcgtttgtgatatcacaaccaaactctgggtcaaatggccgagacccctttcttgtggttattattccaagaaggctatttttaactgatcgagctcctactgtttttgacacatcagtatcccaagcaagtcgcatctctgggtcaaggtcggaatatagtttatcgatattgctcatgacataatcttaaagaattctttaagccccttaattacatgaatgtgagaaattccgcattcacaagtaatgggaactgccaattgaacctgtggcttcaatagcatatttttgatgttaactacatcttcggttgtaatagcagaatataaatcatcgatttctgcatcgtttaaatcattaaagtaaatctgctcatttccaaccacgatataatctatgcattttgatatcatcattggaatgtcggaatcgtcaaaaagattaggatacttaaactttatcttgaatccctttaagtcataccagaggtcttctggaggatcgatttgcgcatgtgtataatttaatggcacaggaattttacgcccacaggtgcaattccaggtcacctcatgattaacctcgcctatactgtgcgcccaaagtataactataagtaattccgattcttgtttgtttaacccagtagcattagtacattctctgagcaatgctttaacgcattcatcgattgtaccgtttttcttcgctgcaattaaattagcgtattcttctagtgtaaaagctcggcactggatattcttgccatttattcttgtttcaaatttatatgtgatgttcatatccactcctcttattcaaatatttataaatagtataaagaggattaccttatggccaatatagttagatgcgaattaccagatggtgtccaacgttttaagccatttacagtagaagattatagagaccttttattggttagaaacgacatgaacaccaagtctgaagaagaccaaaaacagcttatagcagaattaatggatgattattttcatgaccatcctgtcgagtatcgtccttatatatttcttaaagtatttttgtcaagtattggtaaaactaaaataccagtcagaatgaagtgcccaaaatgcggaaaatacaagcagtatctttttaatcttaatcaacctccgttgacaaatccgaaagtagaggttgcaggattaacgcttaagttcaaaaaacctatagaaataattgatgatacaggtaaaatgattttagacaacattatatctgtgaaggattcatctggggaataccagtggaatgaattaagcgatagtaataaattgacagttatcgatgctatagatgttgaaaccttggaaaagattttatcgcagatgaagccgtttaactttgagctaaaaacatcatgctgtgataccacgacagtattaaaatatgataacattgttgatatctttaagctattgctacatcctgacgagattttcacattttaccaaattaaccatagattggtttctcaaggtaaatatgacttgaactctataatgaagatgctgcctattgagcgtggcataaccttatcgcttattgaaaaggaccttaaatcatgacaacacaaagattaggatatcctaatataagcataaaattatattctggatatgatgcatggctagctaatagatttgttgaattagctgctacatttattacattaacaatgagagattcattacgcgggactaatgaaggtctacttcagttttatgattcgaaaaatatgcacacgcgtatgaatggcgatgaactagttcaaatatctgttgcaaacagtaacacatcgagaacacaaacccgaatttatgggattaaacactttacagttggtgttgatgataaaggtgatagcattattactcttcagcttggaacgctgcatgacataatgaatctcaagttcagcagagcgttttttagttctgcatatgaaactataaaagaaatgataggtgcaatgtatgttgaccaaccattaattgctccaccgattaacggaattaacgcttacgtcccacgggttccctggactagtaccctcaaagattacttacgatatgttagaaatgtaggcatttctacagacaacgatcaatttatttttgcgtgggaagatatcaccggaattaacatgatggattatgaatcaatgatatcccaggatccaaatgtattcatgttcggggctcctcaaacaataggtcagtttgctgcgggattaaaatatccattagcatgggattttgaatggcttgttaaatcaaatagatataatagaaatcccatgaaaaacgcaacattttatgcacactcgtttgttgacaaagatgttacccgaattattaatggagaaggccaaaacagcgtattcattaatagatcaggcggatattctgacatgatttttaggaatggctatgaagaagcactacgcatttctacgatggctcaatatgacgggtatgctcaaactaaatgttacggtaattttgaactaactccaggaatgaaaatcaactttgttgatttaaaggaccagttcagaactgacttttatatagatgaagttatccatgaaatatcaaataacacatctataactaacttatatatgttcacaaacggctctgcccttgaacctgtagatttgattaaggtgaaaaatgaacttaaacgtgattcttcctattaagaaaatagtaataaatgaaaagacgatatcaattccaaaactggggttaaagcaccataatctgatgaaagatgttaagggtccagatgaaaacatgaatcttcttttggattcaatttgtccaggattaacagcagccgaatctgatattgttgtattacatttattagcatttaacaacagaataaaagaaactgttgttaaagatgattttacctacgatttgaataaggtttacatttgccagcgattaactcaaaggttagatggtaaagaattcaaattcagagctcctcctcgttattccaaactaggttcagtagattcaattttgagcgaatttcttgaatcagtagatggaaaaccaatggatataaactttatgaagcttccagcttttgtaacaaagtgggctgatgacttagtaaacactatagccattgatggacctgaaggaccaatcaaaggcatgcttaacgtaatggaaatatttgaatgactaagaaatcagaaatgaattcaatgcgtagaagagttattgctgactcggctccacagaaaaaggctgagtctcaagctgatgctcagattaatacgctagaagatattggtcgtcgcttagacgaccagcaagcgtctactgatttgatttcggatgtaatagaaactaaatcaaacgaaattatcaaatcagtagaagatgtttcagctggtgttgaattaactgccgaagcttcagaacgcacaacagatgctgtctcgaaattaaatgatactgcatcgttaattaatgataagctcacgaaacttgccgacttgttatctaaaaagcatgatgttcaacaagatgtccaaaaaactggtactggaacatcattagaaacgataacagaacaagtcccggatgctcctactcagcagccattggaggaattacttgaaaggcttattcctcctcaggatgatagaagacctgatgcagatttctttcctagcacagaagagcaagaggaaaaagctgagcctaaaaaggaaactgaggacaagaataaaaagtttcttgacctgaaatttggagaattaattaaaagcgttaaatctggttttggaaaaactatttcattaacagataaaattagcagtatgctgtttagttatactgttagcgctttggcccaaatggcgaaaactgccgccatggttttgggcgtgataatgcttatagatttaattaaagttcattttaattattggactaaactgttcgaaaagaactttgttgaatttaacaagcaagccaaagaatggggtccgctattaactgcaataagcgagatgtcgaatgaaatagtaaaatcgttcgtcaaaggagattggggtggattagcaaaagccattggctcgggtttggttgatgtaattgataagctcggagaaaccattatgctcggaatgagtaagcttcttgctggaatgttacgcgcattaggatttaacgattcggcagataacattgaaggcgctgctttagacagatttcaaactgttactggagcagaactcgatgaagaagatgctaaaatgagagcaaaatatgttgaccgtcaagaaagagaatatgacgaacaacctgaatggaaaagaaagctttctgctaagttccaaaaattcaccggtcagattgatgacgatgaatataacaaactgctgagcggagagaaaaagcaatcagcgtatgcagacttgccagaagacgaacgcctcaaaatcatcacagctcgtaataatgctgaagcagaaatgaagagaacaaaagcgtatgtagaaaaaactgacgcatctgattccactcgattagactctgctaaggatgcagtacaaagcacaaccaccagatataaagaattagagaaattatctccagaagttgcaaaagatttaaaggttgaattagaccaattgcaaaagcttcttgattctaaaatatcagaacctgctccaactgccgaagctatacctgcagcagaacaacctgaggttaaacagtctgcttctattaaagccgccgcggatagtcgtgaagctgctcgtacacgtgaatctaatacacagtcgcaacctattcaggttaataccgctgtaaataagaatagcacatacgtttatagaacgcctccacagacttcaacagctgctcctggaatgcaaggcgctatgaaaacctcttaaggaaaaacaatgatttttgaagaactggccgatggccttgaaaacatcaaaaaatcaggaactcgaatttcccaaggtaaatctaaactgacgaatgcgcctaccactaaggtggcgcagtttccggccgaacgctcagccggaaacgattccgcacaagatatgagagtacatgacttgtatcgtaacggattattattcacagcatatgattttaaaggaagaactactcctgatttgcgttcatttagacgagatgtaatgttatcgtctgtattcgattcaccaatgtcagcactggctaattcatcaagttctactacaagtactgcgccggtagctaatattctattaccacggtctaagtcagacgttgattcggttagccataaatttaatgatgttggcgattctcttgttactcgcggcagcggtactgctactggtgtattaagcaacgtggcttctactgcggtgtttgggtcgatagaatctttaacgcagggattaatggccgataacggtgagcaaatttataacactgcccgtagtatgtatgccggacctgacaatagaacgaaagtgtttacttgggatttaactcctaggtctgcagatgacctcatacaaattattcgcatctatgaaatttttaattattattcttacggtgtgacgggaaattcatcatacgcaaaagaagttaaagctgctattgatgaatggtataaaggaactcttaaatccgcagctccagatggggctaaagtagaaaacactgtgtttgagcaaataacatcgtttttaagcaatgttattgtagtttctaacccaactatttggactgttcgtaattttggatattctacatcaatggatggtagagaggatatatttggtccatgccaaattcagagcatccgctttgataaaacaccgaacggtcattttaatgggttagcaatcgctcctaatcttccaagcacatttacgcttgaaattactatgcgtgaaatacttactcttaatagagggaacgtttatatcggaggtattgaataatgtttactctcgaagaatttaagagtcaagcggctgacatcgatttccagagaactaatatgttctctgttgtattcgctactgtaccctctagtaaaacccaggctcttctaaacgactttggcggagagctgtataataatatgggtttagatggaaattggcttggattgacaccaggtgaattcaatcagggtataacaaccatagtaacacaaggaactcgacaggttgttcgcaaatcaggtgtgaatacatttatgattggcgcaatgacacagcgtgttgtacagtcgttgttaggtgaattcacagtaggtacttatctgcttgatttctttaacatggcatttccgacagcaggcttgatggtgtattctgctaaaataccagagaatagactgtcatatgaaatggataagttccataacgctcctaacataaaaatcactggaagagatatggagccgttggttctttcatttaggatggacccagaagcaagcaactatagagcaatgcaagattgggtaaatgcagttgaagacccggtgactggtctgcgaggattgccacaagacgtagaatgtgatatccaagttaaccttcatgctagaaatggattaccacatactgtatgcctgttctcaggggctatgcctgtagcatgtggagctcccgaatttacttacgatggagaaaacacaatagctgtgtttgatgtcacgtttgcttaccgtagcatgcaaacaggttcagttggaaaacaagccgcaatggattggttagaagataaaactattcagaaaattgagacgattaatccaaatcagggcttgagtgcgtctgcttcaagattgtctcgtttaggcggggcaggtggtggaatttctaatatcactacttcaacaagcagaataatttaggggccttacggcccctttgttttatgcaatgcagccaataaaccctggctcagtacgaagaagtttcatttcttcagtagtccaaactactttaacaggaataataccttctgctttaccgttaagaaccgcttcaacaaacgatggttcagttggcttacggaagatatcttgaataagaaccgtcggagtaccttcgttaaacccttcaagcatgataagaacttcttcattgaacttctctgcatctttaacatcagcagaccattcaataccgttaaagcggaatacgtgtttcatatcaatttcctcattggtttgtgtaagtctatagtatcacatccttgtgataagtaaacaactttatgcaagtttttctgggataccatccaggttgatagcaccagccagtagctccatggtacgtgtgtagctaaccttatctgtggaacggtctggcgaaaagtaaatctcatttaaaaagcctttgaacttgctttcttcaagaggttccactttgccctgttccatcaagatgtcaccatcatagagatgaaccgattcatcgatttgctctggcggaactaccgtcatttctaccatgaatgtcttgttattcgctacaccaactccatttctaaaaggagttccccatactttgttgactttcattgccaacccgcgaggaagaataacttcagcctcatcgctaaagcttgacaagacacccgggataactaccttaactttatcagccccatgaataacgaacccaaacttaaactcatcaccataggcaacttcctcgcctctatcaactctttccaagttgtctgttccaataacagaagatactgcatcgatagttgtttctttgttttctaaatcagaactaggtgcgtctggcattaatgaatcaccagcatttgaataagcaccaaagataattggacttaacgaagtagaaacatagttctggaaataaaacattttagactcaatgttatctttaaagtcttcatattttcctcgctgaccacgatacaaaagagtgcctggttcaagacgcaaacctttttcaaaggcagaatcgagcggacgaattttcttgtcaataatcggatcgcctaagctttccatgccaataagatagttattaacaaatgaatagccagaaccacagtaatgatgtattgcatctttttcttcttcgcttaaacgagattgcatttcacggttatattcaattgctttggatatagaatcgccaacgattgacacataagcggatatcatataattgacaagattttggtattgacgtaaagctccgaaatcgtcagccggaggcatatcaaatccacgagtagctacttcaacgattttacgcaacgtttccatagatgcaggatttttagcctgttcaataacatcagcaacgtctgaaattcgttgctcaacgattttcattttgtctgaccccgaaggaatgaaaaccttccagtcgtcatgcattctcgacatttggcctacaaataatctctcaactgcatcgccaaaattacttccatatccgccacgaacacgatagtgcttgatatcatcaacataaaaaggaattgatttttctaatccggctttgatatctttttggaggtctaccgtatcgccttctgcgtttagtactggagtgttagtagttaattcataccagcgttcacgtttattttctggccaatcttcatcaacatatgaaacaaatttgccgtactgtgctcggattaaatcttttcgagacactttcattttactcattacagcgagttcagatttcttgtcttctttttcgccaatggaattagccaatgcttcggctttggtaacgttttcgccggtttctttagacacataaatttcacctactttggattcaacctttgtgtataactcatctgaaatttcaggaattccttcaatctcttcaagtttcttgcccttgcgaaccataatggaataagcatacttacctttatagtaagccatgtctttcattagattgaaccgaccaccggtgcgagtagtaatcaaccgagcaagaatgcgttgaatagctttatcctgtccttgcattttctttggattaaagcggaacattactgcatcggctttaatttgtttaactactttgttgacagtttcaaaaatggtattgatagcaccaatagggtcttgtcctaacccacccttgagggctccaatattacctttttctgacacagagaaaacatatacctgaatgaatttatcacccattttgatattcttaactgcatcaccttgacctgacccgtgtactaagcgaatcattaaattgttattacccggcaccttaatcaaaaagacctgtggcacctttagttttggtttaacgttctcgacaggatagattttactattctcttcatcgaaaacttcatttaaaagttccatgacatatcctcgttagtttattctatttatacgaaaaaaggcccgaaggccttaattaattattgttactgtgcgccaaacctgtaatccatttacagactcatactcttcaatgttttctttgaagtttttgaatacatcgatattatcaaaatcaagaacttcggtatggacggaaatacctcctcgcccatcatcagttttagcaatcacttcgtatagaactttcattttattcctgttgcctctgtaaagttcacgccaaatgcggcttcaaatgtattagcaacttctttatcatatctacgctgtttaatgataggtaagaataatcctactgtaccatcatcacggccttcagcagttacccaaccattgcattcaagttcccagatagttcctggaagagaatctctaattttccatagatgagtacggtcaagctcgtgcagttcttcgggcttatctttaagacctgacccagcgttaacacgaatacgaccacattctgatacgaacattaagccgcccattttaccaggttgtttcctatgctcgtacgaaccaacacacttcaaatctacggtgataacctctttaaatttgacgaggttcttagaacgcttatcttcccaataagcaccgatattcttaaggataataccttcgagacctttgtctacgtatgtcttatagatagctcgagcttcatggatgttgtgtacgacatggttttcaattagaataaccttgtcatagcctttgctcatcatttccaatgcacggaatcgtacatcataagcaaatccaggaactttaccttcagaatatactacgtcaagtggaacgtaatcccagacttggaatcgcataccatcagcttcttcagcagagatagttcctttaatagccttattggccaagccgtttgattctgtacgagccgtctgttggaattccttagccttacttagctcaggaagctcaggctctttaaacatatcaaacaggtcgttttcttcttctttcacttcgacatgatataccaactcgccgtcaatcatcacaccattaggatggcgttctcgggcttctttggtcatctcgataagttgacgcttaagtttatctagacccaggtattcattaccggaacgagtaagaagagttacatcatctaattcatctccgcggatttcagcgaagcatcgagctccatcggctttaagctgagcaaatgcagggaacttaatatacgatagcgctttctcagagtaggctgatgctaacatctgtggcatctcaggaattaatttcttccataccttattagcaatagaacctgaagcgccgcaacgcatatccttaagaagtacacggaccagtacactagcatcaccctcgttcatcttagagagcaaatctactagcccctggattgccatattaccagtaagtactcgtgctgccagaatgtcttggaggtaatctagaccatcagaaaacgtctttgaaggaacatttggatatttaacgggagtatattctggaactttcttaataaagaacttaaatcgccctgaatacgccagcagataagctcgttttaaatcaacgttatctttattgtcaacgagaatttgggttttggctttagaacccttagcatcttcaattgctttgatgatatcaaaaatcattattcacctaattcttttgaaagttcgcttacactacgatgataagttaatccatcaatataaacaaacccgttattgatgcattcattccaaatcgggcacgactttgcttcacgccaaattggattccaacgataaaactgattaacatgaccataatcacatgataaccagcgtttacccaccttagtatgaactacaaacatatttcctcctagggtatggctattataccatacccagattgttagcaattaatttggtggttatcacatgtaatacgaccgttattccaccagtcgtttccaggaggaacatgtggaccaggactaaacggaatgataggttgtttccaccaatctcctggaacttgtcgtggaggccaattaaaaggatgttgctctttactaatttggtctttgatagcttcttcccacaatccagaaagagacttctgtggtttcttaacggatttcagagattccaggcaagttacaatttgatgccaatcttcaaccataattccaggagcagtcactgaaccttctcgctcaccacgaggcatatagaacacacgagtttcagtgtcttcaaagactttgctagccgcagcaatatgtttgggcaaatcgtcaacatagcatacaatgcgatcgccgtattttgctttagccttttccagtaaagcatctttagattcatcataatcgcagaccatgatttctgtaaatgcatcagggaacaaagcattcagattgaaacgacgattaaggttagcatctactgagttgccaagagccgtgatagcgacaaaatcgtatttttctttgagcttattaactgtagctaaagcatcagcatacggagcaagataacgaataaaatcgctgttgttatacttcagaagcagcttaacagccagttcttcttcacaatcaaacagctcagcgggtttaataaatttttcagtagtcatcatatcaaggatatgctctaccggaaggttatatttttgggcaaagtaaggcagaccactttgccatttaacgatgattccatcaacatcagtcgcaattacaggttttgacattcggggaaattcctcaatgcttgtttaaatttggcgacgctatttgcggcaccggtgaaattgaaccagattaaccctggagtgtccgagggttctatatcaattaattctatattataatactcagcagtctttagcatttccctggtgatacgtcgggcaaccatatgaccgaaatgaggattaatagacatcgtcgttagcagcccttagttgagtaatcggataaagctcagattccgcatgaattgaacgattgccatcaacccagttgacttcataccaaggctcaaccgagtaggctttaatggctggagccgtgtcacatacaactccaggaattccatttgctaatcttactgtactgaagatatgatatttcatgcatcaagtctcactgcccattcgggcaattcaaagaaatccggagcatcaatttcatactcaactgtatgttgtttaacatcagctgacatgatatcaaccattgggtggtttttcaaactgcaagaaaaaataccagctttagatttaggcacggatacaatcatgatgatttcctcaaaatttagttatgaatttttctttcggcattttggcatttgagccatcactgtcagaatacccaattggcatagttgcattaatgaattcaattttagcatttataacactaatgctcagagaatctacgccatcaaccatacgaaattcaggagggcaatacttatcaatgtatgctttcacgccatttttattagcaggtgtaccatcgcgagtatcgctgataatggtttcaacttttttctttcgtgaatcatagaaagctgatacaatcatttcaatttcctcttaaaacggacgaatattaacgtgaaccacagggacagcaaaaggttgcatgattacaacttttgtgtctttagttgcattcaggcgttgtacttttgcaagattaacagcttcttcctttgttaatccgccattgtaggtatcatttcctttatttgatgtccaaacaccccaatcattgcttccatcatcgtcggtcttcggttcaggttctttgtcggtggtttcttcaaaataatgttgaaattcttgattagtaagaatacaccacatgtgagaaaagcggggttcatctactataactcgttcgcgctctccaccgggcttaatgatttcaaattcaattaatccaatgttttccgcatatctaaaggttctggtaattttaatcggattattaccgatttgctcaaaaacacccttgataagagcgcctggagacaagattggagtctttttaagcttatagaatttacctttttccattatcatttcctcaatagtgggggccgaagccccgagttagttaaaacttgatttcgtttgaaacgatatcccagattgcttcacgctgttcttcggttgttttacgaccgaggatgtggcgcagataaattttaacaagcagctgacgatttgtgttccaagacggatgtgaagataaatcacgtttacgaacttcatcatggaatccaactttgatttcagaaccgttgaactgaatatccagagtaggaccattttcaaagctgaagaatacgtagttatcttcccagtacatatcaatttgagctactgtaccattgttgtgttcccaaagcaaagtagtagatacgtcccaagcattgttctgtacatatttgcggttgaagttagtgaagttcatttttattctccgtagtttgtttatctgtttgggtggtacaggtctatagtaacccagaccacccaagaagtaaacaacttttattcaaaaacttcagacatttttcacctctacagttttaacagtttttacttctgcaaatccgatgcttttaaacagttcatacttggtagtttctggaacgatatcggttagctcaaggatgatttcttttgcttcttttaaagtgaagacgctacgcccatctttaaccactggagtaggtttaacgaacgttgatgggatttcaaaaactgcataacgatcatcagagctttggttttcaaacgctcctatttgcacaacctttccttcttctaactcgtggcgagaaaataggcatgaaagtgaacggtcattttcatctcctaccgttttggccgaaataattttgccagtttctgttttaatcttaaccactcgtccgagtaaatctatttctaatggcgcccaggtttgaatcccaatagcggcagcaatcaaaccgttaatgctattctttgcactcagccatttgtggtaagtttccggagaaatacagtatgctttgttttcgctgtaatacattttgatatcctcaaagttggggccgaagcccccatcagattattgtttagaccaattatccatgtttaatttaccgacctttttcatttgctcaattaaagcatcggcacgattacgaccattttcataccaagttacatcttccgagtaaccagtttcttcatcttcataagtttcagaacgaatacgaccaacaaccggagtgttaagaacatatactgaacctgtgaaccagtttgttaaagtgatatgccagcagaaatcatctgatggaccgtccggtgtcatgcatggaacgatatcaccttgaactttagacaaaatccacattttctcgtggacagtctgagctttataaccgtcatggtctttagtcttgatagttgcgttcaggttgatggtattcattttattctccgttgtccgtttgggtggtacaggtctatagtaaccttgttgagcctagaagtaaacaacttttttcattctgtggaaaataaaaaagggactcccgaaggagtccctgaacttatgctttcggcttaccaaaacgagaagcatcatcgcgaagaaccgcacgagctcgacgcatgattttctcaaccgtctgattgatacgcttgttcgacccacgcttgtagccagcgcgtttagaggtaccaacaacttcttttactgcagtttttgctttagcttgtttagccattttatcatcttccattttggagaaatacatgggagcacgttcttccgaggttcaacttctttcgacagttctttcggttgtagctcccgcaagcccctaagggtacgtttaaactcttatctgttgcacaccgttagcttaaaggttccgggtccgatttctcggggataagatatacaccgatggatgtataggccttgaggcgtactcccgattggccatcgcctcggggtagcatgcacttgccgtttattttctagctgcactttggtagcaaatcaccgatggtttcggatgttttacgtggggataaccaacaacgtccacatcatacgttacccatgcgtacacatggtgggcgtacaaattacttcagcgttaccacaaagtggcgaacagctttgcgagcagcagaaccaagatgcttagcatacttcagttcatccatcgcttctaaagtatcacgaaattcagcttgagctgggttcagatgtttaaaacctttcagaacttccagagcttctgcgtagatatcaatagaagcaccgtaattttcgtgaccggaattccatgcattacgttggagttccagggctttagtaagttgtttgttcattgaaacattcctcaaatgaggttaaaatttggtggacggtaaccgaggtttagctcgggcatccaccgcgtagaattgctcgggtaactaattgtccgacgcccaattcatattattatttatacacacaagctagggacttataatgacaagtcacaaacttctgccggatttctttaggtttcttcacacctgccgctaccaatggatgcggtacatttctaatattaccaacaggcagtggagtcaaatcaccgacttcaacaaaacctttcggtacatcatcaccgatagaatagatttcacacatatccggcagttgtccttgttcttcttttccaagaataataccggaaggagaaacaatttcatcacctttttgtgcaggttcagatacgagaattacatactcgcctagagctttaattggaagttccatgtgttacctttattgtttaaccatgtagttatattaacatggccagtttaaagcaaattacttaccgatcatctgcagcagatgctcaactttcataccatttaccgagatcagtttatcaaaggtaaatgagcgccaaccttctttctcggtatcatataccggaagtgaagtagtgctttctgttcgtgcagatttagtagtactttctaccaaatcagatggaataatatctttatcacgagtacagcgcagagtacgaatagtaccatccgctttttcaaacacaatctgggattcacccatgctcagcacagctttaagtgtttcacggatatggatgttttgttcagtagtcagtttcattttgatgtctctttaatagttttgataattacagatttgcgcttggataattcttttaataatcgaactgcttgatcttcaaatttaaatgttgctaatggtttccatttaaaccaacaccggcgttctactgagtatgatataacaacatcaccacttaggttaagtttattaatttcaacaattctaagtttcattattcaattccacagaattctttaatgttataccagttcaacttatccaaattacgttttggaacattgaacacctcaattccagccgaacgaagaatatcgtcccaaccgggttcgttcttgtcgtatgtttcacagtatactaattttttaataccagactgagcgatggcttttgcgcaatctggacatggagacagtgtgacatacattgttgctccatcaatactactgccgttccgggcagcaaaaagaatagcattaagctcagcatggatttcattgactttagaccatgcagagtgggctgctcgatgttctttgagcaatccgacctttttgacttggaatccgtcttgacgcaatcccgtagatttgtaaggaatttcaccaatccaaccttgttctgccgcatggtcacaacagttcacaccaccagaaggtgaaccgttatagccagtagaaataattcgtccattcttttcaattactgcgccgactttccacgagcagcattttgactcttgagatacgagatacgcaatttgtagtactgtcgacgctttcatttaaatcaccagataagttgtgttatttgttttaaccaattttaactcgtcggtaggagaagcaaaactctctactcgagaagtacgaatacctgtgccatctggaaacggatggtttcctcgttcaagaacatcggaaaagacatagccataaagaggttggccttccttaacaacaacgttactgtacaaaatagcatcatattcttcgcgtggaattgaccaaacaccttggtcagaaccaataacagcattaattagacgaataccattttggctaatttctgctttaatgccacgagcatgttcaattaaaagagcttctacagcctcacgtaaagtcatcagatatgtcctaaaatgttagtcatttcaacttggcctgttccggttaaagccaattgagtgtgttgattgctctttccattattaactgtaatgatataagcatcaacatagttaaaggatgactctcgtcggagagtcactttacttccaggaacccggtttgctacttcctgcgcgaagattttaaccttcgaaataaattcatcatatgaaaatttagcgtcagacaacataagtctcaacctgttgggtttcaaaattagcaataattccaacgataaaccaatcgtgttcaccttcgccacaagaaattttaacttcagatgaaccgcctgaccggtcaatagaaaatttaataacttcgccgtttggaataagtgcattcatggcagataaaaactctgcatgcattttggctacttcagatggagtaaactcatctgttaaatgattagcaacaacttgcgtaaatgatacttttactacttcggaatactttggaaacattatactttcctctaaaaatcaccgtgggctacttgccagcattcaacaccgatacgacgccacatttcaactacctgcgccctgtcatctactgcaagttttacattataacgatcagcaattcggtcccagaagatttcttcttttaccacatcgtctttgcgtgaatcgccttgcttacgttggaagtgttcgcctgtttcgccaacatggtccaacaaccatttcttcgtaatgcgttgataaacagtagggtcttctttagtaccagactctctaccagaaacggtaagaattttatatcctttgttacgaagcattttaagaaattcaattaccatttcctttggatggtctttaccacatttggccaagtcataaggagaacgatgattgttatctgctaacgtgccgtcaaggtcaaagataactgcttttggcaatgattcgtctggaatgtacaaatcatatggatgcatcttagaatagaagctacgaagcacttcaataggaactgcattcgcgccacgatagaggttacgattaagcaattcagtccaaggaacgtcaaagcgtttaatttcccacttgacaccatcaatttcgtatgccaactcttgccacttcttgatagtcgttggattaaggttagtatcagcaatgatgacacctttagtggtttccatctcgagtagagtcttcgccatagaaaactgacatacagatacggacttctcacgaagcttagaatatttgtaatcattacgtttatcaaggccaaagatgccttcacgcaaatcatcacgagacaaaacataccaacctggattagatgctacatattcattagcccaggttgttttaccagagcctggagctccttgtgtcaaaaccaattttttcattatacatccttaagagtgtcaataaaatcatgaagagccttagacttttcaccccaattagcacgatatttttctttaattgctcgcaatggcttattcattgacagtatatcatttttgtcataattttcagccgcgcgtccaaacacgatgcacgctaattcattttcagcaattaaccctttaagtgtttcatactgttctcggttcattataataccatcacttaacgcaacgaggttctttaaggtcagaacgataataacatatcattccattagcatctttagtataacgtaaaatgtcattcatccagatgcgatactcttgagactcttcaaacggcataccaacccaggctttaccgtcaattacttttacttcccaatgtccttcccatttttgaattgggtctggccactcaggatgcaaaaccgggacatccggtgcactagaagaacatccaacaagtaggctgataatacccatggctaatagacttcgtttcatctggtagcctcctggatatcttctgcaaacttattgaagcttgcattaatctgtttttcaactaacccaggtttagctgcaactacgtttccacgcttagcatctttattcatcttagcgttagaagtatcacgcgcagctcgattttcctgatagcctttataggttgtctgcagattttttatagaaacaccgatattttctatttcttttgcttgtcgatcagattcatcttggacgactttgaggtcagctttaagattttctacccgccacgaaagatatttcaatccgcctgcggataatgctaacactccaatcatcaaccaagttgtgtttattttgagcatagtttaaggataacctctacgatatcatcacgggataatcccgaaatgaggatgtgacgatcagaactttccgaaggagaacacttgaagcaagcttctacgtattctgccatttcagaataattcaactcgcgatgcataataccaagacgatgcttgccataaatcgggtcaacgattacatagcatttgcatccgttagcatgaacgtttggctgggtgatgttcttgaacacctctgcaccatacttcgcgagatgattatctaggaaatcaatcatttcatctacggcttcaggaagggcttcggcacgctgctcgttcacacgattagtgtactctttttgcttcttacgagcagcttccttgcgcgccatgtgcgtccgtaggtcagtgacaaatcccactttcttggtaccattccacacaaaaattccatcagaatgagtaccatatttgttaacaaccatatctaaagtaattgcttgcatatccatttcaatatcctcatcagtttgtgtaagtttatagtatcacactctgacgaggatgtaaacaactattcttcagaaatttcaatttctttttcgtactcttttggaacatatcctgcccagtacttcaagaacactctttcgaggtctttaagcagtttatctacatctacagttccttcgtacatgttcatgataacaccaaaaagatgacgctgattaaccgttgctttctgcgcagcaatagcataatctttacgagcacgacctctgtattcatcgtagaacgactgacatagctcaagtgactttccgaggtaatctagataagcttgctcaaatgcagaaattttcttaattgcatattcatctccagcaaaaagagaacgcaagtcatcagagtttgcagatacaacagacgcaaacaatctttcatttgacgttattgagtctttagtgtgatgaagagcagaataccattcggttttaaccttaaatctctgcccagtgtttagaactgcaatgtatccttctacgccttcaagcgcacgaactccttcaacccaggtagtagggtcagaaattccgtaagcattaattaaataaggacgaatcttagcattagcgtacaaatcatcatatttaatatactcgccagttgtgttattacggacgtttaacacaaacagctgtggctcctgatatgctaaaacaacacgattattaggtgaaacaaattccatgtttaccgtataaccatctagcgctagctcaagaataacctgatgaagcgaagaatattcttcactgttaagcaaagctgaagcttgtcttgcctggtcactgtagagagatgtttttgacttaaggtatagatacccatcatcaacataagatgatactagagagccatcagccttatccataatgtattctacatcactaatatcaattcccatcgttagtgggttttcattcaaattgaagaatttttccatcggacgcgaagcaattcgaattggggtatcgccatccatctcaaacataataccacggcattcgagagcatcaggttttaaccactcactgtagcttgcgtagtgatatgaaaacactctgaacttaccatccataggaccagtaaaatctttataaaagaattttgcaacttctgagctttcacacagattcattaaatttttatatagctctaacatttctttaccttatgttgtgtgttccatggaggattgaactttttaataaacatcggttcttccaagtccatagtggatattgacatctcgccaagttcattattaatcaaaagattaaaacactgacgagcatagaactctacttttttgccagccattagtgcttcaaaaatcttggcagatttagccgaatcagaggtttggtctttccgattaatagcagttctataataatttatacgtttacgaagatttttagtcttaccaatgtaaactagttcatcatcaactgcgatggcataaactacgtttaacttgtttgctatcaaaattggtttgattgtaaaatctggttctaactcaagttgaacatattttataaaagaaaactcgttagcaatatcattcataataaagaggggccgaagcccctttccttataagtactttttaaatccaattagaacatcatcagtgacatcattgtcaatctgagctaccagataagaacttatctcaacttcctgaggagcagattggactgcatcagagttaagatattcacgaatccaaggaataggatgtcgagttggtgcatcagtaataggacaaggaagaccacaactacgcatgcgagacacagtcagatagtcaatgaagtcatgaagaattttaacattcagacccggaagaccaccgtcgcggaaaagatggatagcccaatctttttcttggcggttaacttccatgaagattttaattgcttcttgttcacactctttagcaatctcaacccattcttcgccatcagtgccagtttgaagttgacgcagaatgtactgtgtgcccttcagatgaagttgttcatcacgagcaatgaacttcatgattttagcattaccttccatgatttccatatttttatggaagttgaaggtacatgcaaaactaacatagaaacgaatagcttctaatgcgttaataacatgtaagcaaagataaagagatttcattaaatcacgtttagcttctttaatttcgatattatcttgattaaagcagcgatttttggcattttcccatgcgcgagtcttcgctataacatcatcatagtaaacaccaattgactcagcgcgtttcatgattgcttcgtcaagaacgatttcatcaaagattttagctgggtctacatataggttacgcatgatatgcgtgtacgaacggctgtgaatagtttcactgaacgtccaagtctggttccaagtatctaggcttgggtcagaaataagtgcagataaaactgctgctggagctcgtccttgaattgaatcaagaagagattggtacttcaagttatcagtgaagatattacgttggtgttctgggagtttttcaaactgaccacggtccatcataacgttaacttcttcaggacgccaaaagaaactcaattgcttctcaatgagttcctcgaatactttatgacgctgaatatcatagcgtgcaattcctagaccagaaccaaagaacatcggttcggtcatgatatctacttgcttggtattaaaaactgtactcattctatttcctattctgtggtgttaaccatccgtggtctaattataattcccttttattaaagcttacaggccgcgcagtcagcagagtcttgaatcatatcatcgttaccggaaccatcacgggtgttatgatagtaaagagtcttaccaccaaagtaccagaaataaagcaagtcgtccatcattaccgacatttcaactttgcctttagggaaattcgccgggtcgtaataagtattagcagagatgctttggtctacaaatttctgcataatcagaacctggttcagataaggcttattaccctgtttcgcgagctgccaggcataatcataaagggaagcattgtgttcaacatttggaacgacttggttgaagcttccttcttttgattctttaactgacactggtccacgtggtggttcaataccattggtagagtttgatacctggctagacgattcgcatggcataagcgcagataacgttgaatttcggataccgtatcgcttgaggtcttctcgcaggagttcccagtcacagacatagtttggagctgcgagttggtcaattctttcgttgtaccagtcaataggcagttcaccacgtccgtatcgtgtttctttgtaaagcgtgcacggacctttttcgctagcaagtttaacggaggctttgatgagtgcatattgaatacgttccatcatttcgtgagtaatatcattagcatctgcgtatgaagcaaagttgcttgctaaccaagctgcatagttagtaatgccaacacctagtgctcgacggtctttagcttttaacgctttgtctacaggataatcttggtaatccaaaaggttatccaaagcccttaccattacttctgcgatttcgttgacttcttcttggtcttgccagttgaagttgtcgagcacgaatgctgcgagtgtgcagagcgcgatttcgccatcttcttggccaacatccgaagttggtaacgcaatttcgaggcagaggtttgattgcttaaccgtagccacatcacgaataaaaggaccatattcaccaacattatctaccatgtatggataaattcgagcagtaccagcgcgttcagtaaggaacaactcaaacagttcacgggctttaatacgtttctttcttacgtctgggttcttttccagctcttcatataatgtacggaacgcttgagcgtcacggaagtattctgtgtacaaagtaccaagacacgcatcgggactaaacagagtgatgtaatcattcttaatcaaacgttcaatcatcaggttattaatctgaacaccataatctaaatgacgaatacggttttcatctacacctttgttgttcttaagtacgaggaggttttcaacttccaagtgccagattggatagtacagtgtcgccgcgccaccacggactccaccttgggagcaagatttaactgctgtttggaagtgtttccagaaaggaataactccagtatgtttgacttcaccgaatccaatttttgaaccctctgcgcgaatcattccagcattaataccaatacctgcacgcttactgatgtatttcgtaattgatgcagcagcttcgttaattgaattaagactatcaccgccttcaataaccacacatgaactaaactgacgtgtcggagtacgaacaccagacataataggagttggcaacgaaattttcttagtagaaactgcgtcatagaaacgaataacgtttgctaaacgattttcgccatcatcttgatgcaggcacataccgatcagcataaaggcaaactgtggagtttcatacaattcaccagtgtgacgatcttttacgagatacttctcgataagttgcatcgttcccgcataagtcatagtgaaatcacgctcgtgcttaatgtaagaatcaagcaaagtaatttcttccgcagaccacttactcagaatttctttatcatacttatttgcattaacacaccgggaaatgtggtcaataaaggcaggtggttcaaactgtccataaacacgtttacggatttcaaacatcgctgcattggatgctacatattgataatctggctcatcaatagaaatgctattcgccgctaccttaacgatagtcttttggatatctgcagtgctcataccatcacgcagatgggatttaataatttcatacagctcgtatgggtctactttagttccttcgcatgcccattcgaggactttaatgattttctgcatgtcaaattcttgactaacacctgagctcttaattacttgcataagtcctctaattcaaatgtatctttaaaaagtttattcactacaagagctattatatcaccatggcaaggaagcggtttgcaggtgcatcctaatctcattcctcttaaagtttctaagtgctctcgctttatttctccgttccgaatcttagcaataaaatcgtccttaaacgctgcaatagcatcaggacgattatcgcaatctttaccgacgtaatttccccacattgttccgcgttggatatttacatcgaagtcggaatggtatttattaaccacccgacatatcttcatgttatatcaacttcaaaccagcagattaattgtgttttgccaatagaccattcatatgatttaacaatagacagaaccctttgttcggttccgttaaatactattgcgtcattaatttcaggcaaatcactggagaatgcatcatacatttctcctagtacagttttagactgatgtcctttacgaacaaatcgaatattcatatcgccatctttcctttaattgttgggtgagattcatatcctttaagaacaaagtcagatggtttcatcattcctgtaacccaagctaattgttcttctgttgctaattcatgaaattctttatcttttactggaggccaataattaatttcaagttcacacagctcttttggctctcgacgcaagatttctttacactgttcaatatggttcagataaatgtgagtgttaccaccagtgaataccaaatgcccaggtttaagattggtcattttagcaatgatatgaactagtgctgcatatgacgcaatattgaagggtagaccaaggaatacatctacagaacgctgataccactggaggtccaaatatccgttacgaacgttgaattgataaagcagatgacatggtggtaatgccattttgtccaaatcaatcgggttccaagcagttacaatctggcgacggtcagatggcagttgtttaatacgatcaatgactagttttagttggtcaacgcccatgaaatcacgccattgctttccgtacacgggtcctagctcaccaccggaataccccatgtcttttgcctggttttcgtagttgtcgtcccaaacagttttaccttctagtaatgaaccatgctgaataagacgcaattcatggacattagtagacccctgcaagaaccaaatcagctctgcaatacacgctttccatgcaagacgcttggtggttacagcaggaaaccctttttgtaaatcaaaacgtagctgagtaccaaacttcgcaatagtgccggtaccagttcggtcatccgtctcataaccgttttcaaaaatgtctttaattaattcttggtattcacgcattaaatttttcctgaagaggtgtaaagaaaagctgattaccacgcttttcaaatcgcccaataatagacactacatcatctttgaccatcacattgccatgtgacattccgatgaacatcttcttataatcacgttcaatttcaataggtatatttccatttcggttatatactgtagttgaaccgttataagtgctaagaccattataactaaaaactagaagatgaataccatgcttaaatggaaatcctttccacttcttttggactttatcttctgatagctgagtgatatcatagtttgcgctcatagaccacctctgaaatgttagtcacttcatcaatatgataccagtgattttctttagtaatgaatcctgattctggccaagtaggagctgctacaaattcagcaggtagagtgacatcagaattcactctatgactttttctgatgattgtttggataaccctatccgcgtatggatatgccttctggatgattccagcaccacctatgatagaataattaaggtctctattaaaagtgatagtactgttgtaagaagtatgagcggccataatgtcaccacccaagaaaccgataaattctaattcacttacataagcatctgcaaagaagccatttttagcagttgctaacgcacgactcatgtcttggacaacgattgtcttacgaccaggaagaggtttaggaaaactcataaaagtctttgctccgcaaatcaagatagtatctcgagtacgattagcaaagtttttcatgtcctgggaaatatgtttccatggaagaccatcgcctaaaccgaaagcattttcatttttgccgtctacagtttttgtaggagcaaaggcataaactatttgaatcatttaaacctcagcaaaattcaactcgttcaacattgccgtcttcccacttctgttgaagctcttgtaggcgtttaattgcactgtcgacattggacattgcgcagatagttacccattcacgaccgtcccaccaaatcaaatcatcgtaatcatctactgcaaaattttccattatccttgcctcattccgcatttaaaacaacggccacctaattgccataggccaccaccacagtacttacactcccagtcggttaaaatccgcatgacttgtacccacttgctttaaccatattctgaagagttttaaacccttcttttatggcttctgaaatttcctcaaatacttcctttttcagaatatacaacgaacctgcttgttcaccagaaatagctgaaacaatcacttggtcattaattaaaaattcgccatacgctgaatcaattttacctgaaacctgattgcatcgcgaatgagggtcaaatacgagctcaatatgagttactccagggatttcgtcaaattggcagcgaatattaacgcgaggatatcccgttacactaaatttagacatataaaaataatcctaatataacgccgctaataaaagcggcagtaacagaaattaacaaaactactaattcagcctcaatcatttcttggccttagcaagtttaaatgcttttttgaattcttcaacatcttcaacaggaatccagaagcctgagccatacccatcttcatagcatgggcagttatcacagtaatcattccaatagacagtttcaccacccatagtgaatggagcttccatttggcacagtacttcttcaacacgctctaattcttctgggtttttatcgcaaatgcagaaattccatttaccacgatattcagaaccaagtttgatgctttgacgttgaagtttcattttttattctccagtagattatggagctatactatcacaagcatagctccttgtaaactactttttgaaaacttttttgatcaagtcaatcatttcttctgcattttctggggtaacgatcaagtccaagcgagtaggaccaggttggattgcactaccattttcatataccggttcgaagtatttgaattcataatcagagatttcaaagtatgcgtctccaaatccttcagcgtcagcagttgttccatctttaaattttacttctgtgatgaaactattatcttcgtcgagcattttagtaggaaagaacgaaccgccatgctcttcaatcatcaagcgcatccggcgatttccgctagatgaaaggtcccactcggcagcaaggcttgggataatgcgatattctgtgttcagtttcataatttacccactgaaagtagttaatgtatcttcacggcattcatcatccatgccaggaaaatattcttgttcaagccataaccatagggtaggagtatcaccttctaccgttatttcgtttcctccccatggggcagacttgttactaacttcaatcaaaccgtatttttcaatggtttcaatgaagtgttcataatcatatatttctacagtaacctgtgccattgtcatttcctcaaagtggggaccgaagtccccaaaggtaattactctttccagtcttccatcatcaaatcaatatcttcccactcgtttgcttctaaccaagcacgaaccgcttctttagaaccacggaggtcaatatttggccaaccgccaccagggccttctttaataactaaatcaaaatcaataccatggtcagtgtcataaaaacgtgaaccatcttcaaaaatcaaatcagtacaaaatcctgatttattaatgtaaggttctgccacgatatcaatgtttaatttacccatgatgttttcctctactcgttttgtttcgatgtagatatagtatcactcatcaactggcttgtaaacaattttgtgaaaatattttttggagggataaagaaaaagggacccgaaggtccctttatattagaggtcgttcaaaatgtcattcagatcgtcatcgccaacactgtcaccagcatcgcccatgatatcgtctgcggaacgagaagaggtcggtttggattcaaaatcagacaggtctttgtcaaaggaatccaggtcatcaccaattttatcggcttgagctgctgcttttgccgcggcaccaccaagagctgctgtacccataatctgtttaaatttggcttcgttaacttcaaacgatttaaactgagatggagcaacaatttcgctgaggtcagccatattttcggtcaggaatttctgagtttcttcatcattgatgtttgcaatctcggactgaccaaggaatttacattcatcatagttctggaaaccaccgactttcttaactttcatgacgaagtttgcaccttcatacacacaagttacatcaaccggagtttcacccatatcaacatcgacttcaaccatcgcgttgattttgtccataattttctgaccgaaacggaatttgaatactttaccttcgttttctgggttagccgggtctttaataaccaggatgttagaccagaaagaagttttacgtttcagaagcttatattcagccgggttgctgttataagaatcgtttttgctcagatgagcacaaaccgggcaagaatcaaaatcaccgtgagtagaagtacaattttcgatgtaccatttaccgccgtgtttgaaaccgtgattgatcagttttacaaacggcagagagttttcatctttaccaggcaggaagcgaattactgcttgaccattaccagcattatcggtcttcagtttccattcatttttgtcttcgttagagaaagaagaaccacctttcagaccagccagttgttgttgaagttgagcaggatttttacgcttgaacatatgattacctttttaattttaacagttgttgttgcaacatgggtccttgcaactggacgatagattaattatatactaatttctttacaagatttgattatgctaataaagagtttcttagcttcagcaccgtcaacgtttaaaagttttttataagcttttaatttagtggagtaattactccaaactaagttatccgttgcagtatcatgtgtatttattatatctaaaaacgagtcaagcatgataaatgtctcgaaagatataacatttgactgaagaagtttgaacacataagatgttccgactttctcattatattcaaaaatatcatgaagcttatctacattaactttcttagcaaagtagtaaatattctttacgtcttcagagaatgtagttttgatttgcttcaacttaccgatgtattcacgatagaatatcaacgcgtcagcgtcactgatatcaccaatccaagcgtcttgattagctacaagattgctcatgaatatcagagtcaattcctttagcgtatacttctcggcaagtttctcaaagaagtatttgtctctgcgcttttgataagctttatcagagacacgcatgacccaattatacttaacaacatcataccgaccagcgaagtgctgtttgagcattaaatataaaagataaacgctcttaccgttaacgtatctattattgttttggggcatgcggagacgaatcataataaaaaatccagactattcgttttatgtgtttgactaaatgatggtcgaagcatattttcttctaatgcttctgacataattttttctatgattgctggaggaatatatctattgaagtttccctcaggaatagaattttcttctagccattgtgtcgttgcctcgagataccccattccaagttctgttaccatagattcaatagcgaatccattagcttgcttatctagcagctggttaatggattcggagggggatgtgtccccctcgtctttaagcgaaaatagagtcataagcttctaccacttcgtccttttcagtttcgtaacgatcgcgtgtacctttatggaacagggcaagcagctgattaaataatttgccttctacaccaagctctttcttggcgcggtctttaatgtctttgttaagctcaagatagctttctgcctttagcttattacctgaggcttccttaatcatatctcgcagagcctgtccgtgtactgcttcatcaaatactacttgctctttttctttcttagccattatattcaccttaaaagttgtttatttctttcattaatttagacagaccggatttaacaaagtagctataaattttaccacgacccggtagttgatagttattataacaatctaaaatgttagcaacaatgtcttcacggatgtaatcaaaatcgattaacacacgattttctaagaaacgcttatactgttcttcagtaagcaaatctttaatgttttcgccagcatcaagacactcttcaacaaacgtcattttcgttgaaggagtacgctcgccatcaacatgagtgtaccaaaaatctgaacgaactttaatagaagcgacgttatctttcttgtcacctttaataattttagccatgcagtctaaagcaggagagccggttttagattttaccagttttttctgcatcggtgaccattgcttaacattaggatacttatgcaattgagtaaagtcaccatccgaagaaacaatcatgactggatgaccttcgagactgaactttttggttaatactgcaatactatcgtcagcttcagctttatcaatatcaatgacataataaggcatatactgcttaaattcatcaattacagtacgaagaccttcaaagtaaccttcccagtcccaattggattcttcgcgggctttggcacggttctttttatagtagtacgctacatcccggcgccaatacccattaactgcgttatcaacacaaatgacaattttagtgtatccatctttcttccacttaaaagcattaaattttaaagtagaaagaataagatgacgaaccataggagtggttagtttgtcaccttctttatacgtatgaagaattgtcgccattgcaatttgtgacaagtcaattaaaatgacgccctcttttacctggtcttcttcggcgaataagcaatttaaatcagacatttgaacctcgttcaattagttagtacagccattataaatacttctataatgaagcataaccccataggagactctatgagcgatttactgaaacaacatttccgtgcaacaaacggtttggatgccggcggaaataaagttataaatgtggcactagctgaccgcaacgttaaaaccgacggcgtctccgtcgagtacgttattcaagaaaatactatccaaaaatatgacccgacgcgtgggtatctcaccgattttgctgtgacctatggacgacgcatttggattgcaaacaaagatattccaaaaccagccggagaatttaatcaggccaattggacttctttacgtgttgacccgaactggatttataccgtccgtaaaggagagtttgaaattcaatccggtcagttcatcaacgttgactctaacgctgcaggtaatgctacattactgcttccgttagcaccggatgaaggcgataccattgtagttcgtgatattggaggtcgtcctggatataacggaattttaattaaagcacaggatactggtgcatccattgtgttcggcgaaacacgtttgcgtgaagtaagacttacacgtccgtattcacaaattatgcttacgtttagtaacggtgcatggcgtgcaagtttaaccgattttggcgatactgccaagatggtagttccgaatgggattgttccgacgcaagttcaggcaggtgataacgtagttcgtcgttatacttccaactcagagatttttattactctgccgttgttcgctaattcaaatgatatcatcaattttactgaccttgatggtacatcgccgattaaccatatgactgtgcgtacgtttgacccaactatctcaattgggactcccggacaaacggaaattcaagtacgtacttcaggtaatggatttttggtgtatgacgctattgacaagatatggcgtatctttgaaaatgatttgcgtacacgtgtaagaataattacttctgacgttactttaatgcctaatgagcatatttctgtatttggcactgacaatagtacagttaaaacaattaacgttactttacctactgacgtagctgttggtgatactgtcaaaatcgcaatgaattatatgcgtaaaggacagaccgtagtaattaaagcttctgatggtgataccatcgctagcaatttgaatttactgcaatttccaaaacgctcagagtatccacctgatgcagcatgggttcaatcaagctcgattacctttaacggaactacgtcatatgttcctgttcttgagcttgcatatattgaagataaagcatccggaaaaagctattggattgtaactgaatctgaccctaccgtagaacgtgttgatgctaaagacaatactaccagagcacgattaggtgttattgctcttgctacacaggctcaagctaacgcggagtcaagtccggaaaaagaattagcaattacgccagaaaccttaaacggacgtcgttctactgaaactcagactggtatagcaagaattgcaacttccagtgaagttaatcaggcaacaactgcttcttacttggataatgtaatcgttactcctaaaaagcttaacgaaaggtctgctactgaaactcgtagaggtttagcagagattgcgactaatgctaaaatggatgcaggaacagatgattttacgattgttactcctaagaagttactttatcgtactacatcggattcacggttaggtgttattcagttagtaaaaactggtggtgctcctaacacaactgctgatcgttcttctgctggcaccggtatattcgatcattctgattacaaaaatgcagttactccaaaaactcttcgcgagtataaagctactgtaaatcagtcaggaatagtttggttagcaactgatagcgaagttagaaacggaactccggcttcttcaaatattcctacggtcgttacaccagaatctttgcataaaaaagttgctactgatggagcaattggattaatccaaatagctacacagacagaagttaatgctggcggcgtgactaataaagcagttacacctaaaacattaaatgaccgtacagcaactaacgatcgtactggtattgctcgcttcgcgacacctggtgcccagggtgaatttgaagctggtacttcaagtatagtaatggtaaaccctaaattactgttcgataaatttgctaataccgatcgtatccaagttaatactagttctggcttaactattactgggaacctctgggaccattataccatcaacatacaggaagcaagtacttctcaaagaggtacaactactcttgcaactgctgctgaggttagaaccggcaccgacgccaagaaaatagttactgctgccacgctacatgctaaaacagcaactgaaggagctatcggtcttgctcagtatgctacgcaggcacaagttgatgcaggcacattaagtgatagaattgttcctcctgcttacttgaaacagactattcaggtaacagagtcatggcaagctacagacagcgttagagggaccgtgaggctatctacaggcgatggaacgtggaaaggtaatgataccaatggctcaactcttccggataacgggtatgcctctaagggcgtcgcagtgtctccgtatgaattgaacctcacattgaaacactacttacctcgtcttggtaaagcctatgacaccggaatgctaggtggtcaaacaccagacaaatatgctcgccgtgatatagcgcagactatttctggagcttggacgtttagtcaggacacttcatttagcaataatatttctgttcagaatattatatatgctaatggtggtgaagtgaagatttctccaacagctgataccggaaatgtgcatgttcgttttcagaatagagatggaactgaacgcggcataatttatgcagaaacccaaacagcttcagccggaaacttaaaagttcgtgtcaaaaacggaacaggaactactgctacaagccagacctacacgtttggtggaaacggtacattaaacgttcctaatgaagtatcagctaaaactttgaggtcttctggaaatgcaatagttggcggaactgttatggttaaggacgttcagatgcttgctgtcgagggattgaattcaatattcggtgcccaatcacagtccgcatttattcgttcccgtgacgctgatacacaaatttttgcacaggattcaactggatcgtatccaattttaactaccaaaaactacgcaagattagctgatggacgttacgttaagaaagctggtgacaccatgaccggcaatctcaacttaagcggttctgctatcgtcattacgggttctgaatcgtggtatgtgccgactaatgatactgtattgcgacaaggttcttggactgctgaaatcaaagacgctactaaattgaaaggtcttcgcggttatatggttccaatcagaacaccgattgacccgggtaacccaagcactttagtagtgaccggatatgaagaaaaaactgcagctggtggtgttttaactcaggttggtgtaactacaaacaatacttatcagctttggacaccttatcctccaacaacagaaactgctgataagcgtttcgcgcatactgtgtggatgaggatttataatccaaaccttaataagtttgatgattggatgcgggtatttacatctgctactcctccaactgcagctgatatcggagctccgagctcagtatcaactcaggttaaaacccttgaagtcctggaatggattaagcttggcccagttaaaatctggccagaccgtccaaaccaaactctcaaatttgaatgggtaggtgattaatggctgaaccaattttaatggcagcctttggcgaggatttcgtggaaacacgaatcctctctgaggcaaactctgtgaagtattggctaaaagcttatgctacacattctaatgctgttccgaataagccagaactgaatattaacggtgcttttgatatgacctcctccttacggagggggattaatgttgttcaagttaatggtgacagttttattaactttaaaacatttgacgttaccactgatgataacaacgctaataacaaagcgtttgtagaatatgcaaatggattaacttcaggattgtatattataatgacacatgaacgatttcaatccagtccgttaatagacagatggtttaaaaacaagtggtctgcttcttggccaggttctgacttttctaaatcatttccaaactccgcctatgttggagtgctcggagcggcaaaaggacgtatattaattgagtcattttacggaaatgatggtgtagtcaaagaagattccagagctaaagtagatacggtatatgataatgtgggcgatgtaggatatactgggtgtccttatcgttctattgaagataccaatgaatactcggattctactggatatgaatataagcgatacccagtacaaaatgaatctataagcaaaatcgctgattatggattatctcccggggattcggtgtttttagtgtgtgatatgtatgcatctaaaagccttcttgatgcgggttctacaactagagctagcttgcgatggttcaagggtacatctttgttatcttcaaacgtatcattagaaattccaaaaaatggagctgatagatggttaagatttgaaagatttaccgctgttcctacggacgctgatggatttactattgtggtatcaagatatccaaaaacgtctgtagttggtgactctaaaatcaaaaaccttgtatttgttcaaacctctcatagcgaaaaactgaatagcgttgttcaagaatttggtgtgaatggcataagaatgaataaaggcgttgaaggaggaaccactatgattatggaacttccaaattcaaaagtcgatccgagcggtgttattccagttcaatcgttcagagaaacatcagactaaggaagccttcgggcttccttttttcgtataaatagaaaatatataagaggataaactatggccgatttaaaagcaggttcaacagttggtggaaatcctatttggcacgcaggtacttttcctcttgtgccggcaggaaactccctaacttatagaggtaaaaaggtttatactgagatagataaacctcaagcaaatgataacgatttcgtatctaaagctaacggtggcacaggttctcaaggtttccagcaagaagtcgaatttaaagctggcgttaagatttccgcaacgttttctggtggttcaaacttaaatgggttgtattctggtaacggagatggagataccagagaaaaatctaacatggatttgcgttcatggtacggcatcggtatttggaactcatgtacaagtgatggggtccagggacgcacaatctggttcagtgctaggcgtggtactatcggaacagttggtgatattgtttcaggtagtcaagttattgctaacgcttcggccccaacagccgcccagcatttaactcgcaaagattatgtcgatggacgaataaatactgttagcaacgtagctaacgcagcagtcaggaaagctggtgataccatgacaggtacacttagagctgaagctggcgtagttatagtaaataaagcaacatccggtgaatacgctcctagattagatcaggttatttcacgcggggtaacaatagattttggcacatactaagaggtagccatggccgatcaaaacttaaaacaaatacaatttaaaagaactagcacagagaataaagcaccaggtgcagatatcgtagcccgtggcgaaatcgcgttaaatacccatggacgtactctcgctatctacaccaaagatgaagccgataacgttgttcagcttgcaggtaaaggtgttcctttcttagatactgcaggtaatcttaatgttgatggaactactacgttaaaagacaacgttactatttctccgaataaagcgatcaattttgaagcttcggatttaagcggagcattagtacgtcatatcaccggtaagtgtgctaataacgatggctggtacattggagctggtggcgcatctgaccagggatttcttgaaatcggtacgtatgataacggaaacgaacctatctattttgttcaaagaaccggtggaacgactcaagctgaagttcgtcgtttagcattattagatgggtttggcgatacctctatacctggggaccttcgtttaactggtaaaacggtaaaaatttcaaacggcagcactcttactttggaaatgggtgtaggttctaatgacgcatacattaaaaacctgagaggagctggtgttcttcaattaaccaatgacagtaatctgacattcagaaattcacaggtttattacgccatgaacggaagaggtcctggtaaatccggtactcttctgacaaatgtagaaaacaatcgtcaggcgtggcaatatactatttctgctgcaactgctggaactccacgttgggttaaagtagctacaattaaacacccaggagatgcgtcttcacagttagatttaatgattactggtggcattgattctggacacggaaggcattatgttgattttatcacgttatcaggacgaaatttaacatcatggagcaccaacagtttagataactgggttgaatggcgccgggttgggtctccttctaaaacgaacgttccagagtattacgttgttaaaaacgattctgctacagattcagaggcttcatttgatttttacgttaaggttcctcgatacggcaatgccctttatgttacagtgctaaacaccgctggatataatggtcaagatagcggtaaagtaattatctatgaaacaggtcaagatactggtgctactgcaccatctggaagcattcttgtttcaatgaaacagatttttgatagtttagcaaaaccagatttcggcgatactaccggtactcttccggttaaccgcggtggtacaggtgctactaatgtaggagacgcccgaaacaacctgggccttagaactgcggctgttcgcgatgttggtgaatccaacggaaacgtgatggaagtcggcgcttttggtgttggcggcgccggaaaatcaattgttgatattacatccgatgtcgatttaatgaatcgccttaaagctattggtggtacaacatttagggctaacgttaagacagtaaatgggaaagctgagtataccggttctccttattattcgcatggagcaggattcttttctagaaccggcgatacaatggctgctcttaatatcgattattcatctggtaatattaaagtatttgccatcaatgaccgaggtttagcagacggtaaagtaaactataacatgctctatggtactgcaaataaaccaaacgcagatgataacgacttcgtatctaaatctcgtggcggtacttatgacgcaagtattacagttaatggtgatattactgctaataccgtcagtggtagggtgttaaaattatccggtggcggcgggtcatttgttcctccatcccagggtgcttatgtatcttggaacaaagagaacggatcaggtcgtactgattttattaaccatcgttcaaatacttcaactgttcctggcggatttgatttttggaactatgaaggtaatacgagcaacatgcgtcatctggcgcaaattagaaacaccggggatttagtattattcccttctgacatatctaaagctgtgacgttccagactgatggaaacatcgttggtggtactttattcggtggaaacttaaacaattatttaagtaatttaaccggaactgctaatagcaaagtatccaaatcgggtgacaccatgactggcaggttaaacgtctaccaatctgatacaaatgctggagcccaggctatatacattaagggcgttcagcatacaccagtagttcttgaaagaaatactgatgcaaacttatcaatagcgttcagattgactggtgttaacccaattcttcaacgcaagcttggtttagctaaagatggaactcttcgttggggaaccggtgataaccaaactgataatgctttagtatttgaccaaaacagcattggaatggttagagttaacatgaccggaggttatctcggtccggaagtcgctgaagacatcggtggaagaactttatctatcgatgatcttttcttagactctaacgatgttggtactcgtagagtatattcgtgtttagctcaaggacctggagcaaatattactggaatgcctccagctttaactaatttgaagggcgactttcttgttattgttgaaaagatgcgatcagcttcgggtgtagatttccgcaataaacaaacgtttatatctggacgtaataataaaacctactttagatatggtgctggaacaggaactacttctgctactgctgtcaattggacgccgtgggaagaagtaataactacatcaaacagtaacggtattttaccaatttcgtctggcggtactggggctaatactgcagctgatgctcgtaacaattttaacttaggtttagggcaaactgcgacgtttggtggattaattgttaacggtgttggaaataatgatccggtagtcacgtttaagaatggtgctataattcgggaagctcaaggtggtagtattggcgcattaattatgtcagcttctactgcagccccaacagccgcgaaatatattgcttttcgtccttacggtgatacatctaattctgagattagagtcaaagcatatggcaataacgagacgatgcttgaatgggcgcaaggccctgctgttcgttcaaacactgcaggtgcttttgtaatctatgcaaaagccggccaagcgattcatttaagaccgaatggcgatactgcaagccaatcaactgttattgatcaaaccggtaaaatgacagtcggcggtgagttcgaggcccagaactcgaaaatcacaggcaacttgaacgtttctgaagataacagaatgatcgttcttggcaaaaactctgatattggtttagtcaagaaaaacggtatgccaggaaaaatggctatcggtaaatctaactcatttaccgttatggtatctgcaaataccaacaaccaaattaatcctagtgacacgtttagcgatatattcaaagttgatgctagcggaaaccaaactgtttacggaaatgcccaaattaacaggcagcttacagtaacaagtaatactaacttgaactcagacttgatagttaaaggcaattcccgcttcagcggtgtgattaatgctgatggaaacatcaacgtcgcttctggtaagtttgttattgcaggtcaagctcctactgataactcgcacctaaccaacaagaaatatgttgatgacaaggttgcttctgctattagtaatgctggtgatacttatcttccgttagcgggtggtactgtaactggtacgttaatagttacaggtaatcaactgaaaactacttctctgtggactaccggagacgctgcagttaatggcgttttaactgttgatggaagggctagatttaatcaagagttcattgtatcaacttcagttaacgtccagaacaccggtaatagtcatttagtcttccgtaaagcagatggtacggaaaaaggccttatttgggccgatgagcctggtagcgttagtataagagctggtggtatctcagggaagacgtggaatttctggaacagcggttcttgccaattcccaggtgctattagtaactttaacggaattagctcaactactaattatcccgcaggacagcctagcggtacgtacagtaataccgcaggattggtaactagatttagtaatggtgcttatgcttcgttatatttccaagagtatgtaggaaattatcaccaggctattcttaatgttaacggattcaatagagatgacaatttctatttcagggccggcggtgacttcttctgtactcgtaacggttcttttgataacgttgagattcgttctgaccgtagagctaaatctgatattaaagttattgaaaacgccttggaaaaagtagaaaccttatctggtaatacttacgagcttcataacacttctggcggtattactcgttctgcgggtttaatcgcacaagaagttcaagaagttcttcctgaagcagttacgcaagataatgaagaagatggtggtatgcttcgtctgaattataatgctgttatcgctttacttgtagaatcagttaaagagcttaaagcagaaattgaagaacttaaatctaaataatgtatggggcttcggccccatctttaaggagatatcatggcagtaacaggaccatgggtaggaagttcggcaaaggccgttactggtgaaacctggatggcccaggccggagcaaaattgagattggggacaccattttggatgtccaacatgataggaagaaacgtttggaatgctagtataactatttcaggtaacaacccagctacgggtgctagggtacgtggtgcttggataactaaaaactgcgcttcatggaacgtaaagctcgacgctcgtgggtctttatcaggaatttgggaaactgggtttaatttggttgcctttggattagcagagcctagtagatgggatggatataatgatgcccttgttctagaaggcagtggaaactttaacgttaattggcgagttgataccgaagacggcagacaatggcattttgttagttctagggattatatgggccgccgttgttataactgtactgacaataatggattttgggattggctttatggtaatgatggacgaactttccaactgtcgtttacagcatattaagcatatgctagagcaataaatagctctgtaaggagagcaatatggcaagcaaacaatcaataccattttttgatatgtttcttgggttgctcgagctattattcaaagatggagccacgggaagagttctcttttcccgtgtttttgttgtcgtacttttagcattgttggcgtttgctggatataagtctgatagtcttattactgcttacgtcgatagtacatatgacaagtatgataaactggttcaaaaggatagggatacccgatttgataatacagcactcgaacaactccagatagtacatatctcaagtggtgcagatttttctgcggtctttacgttcagacctaaaaacttgaactacttcgtagacttaattgcttatgaggggactttacctagcacggtagattctaaaaacctgggaggatatccaatcgacaaaacgtctgctgaatatagcacgcatttatcgggtagatatttttggacggataaggaattcgttttcttaccaacaaaaagaaaaccgcctgagatatcgtatatgtttagctgtccatatttcaatttagataatgtttatgctggaactgttgaaatgtactggtacaattccaaacctgcattatctaacgaaagactaacatcgatatgtggtcaggcggttagagctctaggaagagctaagtgattacttattactatgcatagccattgttcgatagatagactcaaatccctcgttgtattcttcaacgagaattctcttctcttcgtcagttaactcagaaaccattttacgaaagttgctctgatttaactgacgcccctgctcgttcttgattccaatttcattcaagaacgcaataaattcatctcgcttctccatgatatgttcagcattgaacttagtcagaatagaagcaacagtaacgatttcttggacaatttcaaacttagtcattatttttcctacaacttaacggattatgtggattatagtatcatcttgataccgcgttgtaaaccagtttatgccaattcccaacgagaattcaaatcttccttggtagtgatatactcagcaccagaggacatccagagcccgtagcgaccatcttttactttagccgttaaataccattcctttccaattggacgaaccctacgattcatccagtgacatacgtcaattgcctcctgaaaagacaagtcaatcagactcccaagcgcgattttattcattaacgcttcgagatatctttgcgattcaacgacagactctaagttatggctcatgctaaaactacctctccgcgattacctaaaatgctttcgatatactcaactccacttataatgtcacctctatcctttgctttaatagtaataattccatatgagtaaaagtcagccgataaactaaacgaagtgatagtatcgtgtgtaaacctaagcattaccatctgttctaagtcttttacttctatgtcattagcccaagaattaagaactttaagtctaacttgtaaagtgtattctactttaattgctgaaagcaattcaacacgtttatgatatgccttggcttcatcttctctgcgtaaagtttcagtattcatagataatctccaatatcataagcatcaacgcatttctgaaattgctcaagaacttcttcaggttcaacgttagcgataatagctacagtaaaggtgccattattccaatcgtgtaccatccagtccccatatccagcattctggaggtcttccattagttcagaatggatatctgctactaatccagaatggtcccctaatttcttgtggagagcttctaggtcatcacaaataatagttaaagtagtacatttggaattattcagaatgcgcattgtctttacctttgtgtttttgcttacgttttgattctttggcagcacgctttttatctttgtgtgctccgcctttattaaaatcatgtttagctactagattttgcaccttcaagttccttgatgtaatagtcaatatctttaatcatttcttctgtcattattttgtacatttcagcaagaaatggtttagcaccgccattaaatggatagctaaacgggcagatgtattctttatccatgagagttttcatgaatttgctatctgccattttaaacccggcttcattggtatatgtaccccaattatcgtccatcatttctaatgagcgctgaagcgatttacgttgaatttttaaaagcgtaatgttattctttaatgtactaatcattagtataaatcctctgagaataattcgttggcgggtcctgatttaggacgaacggtattaacttgacctgcatatgtagcgatgattaatgcttcttcacgtgtgaagtactcgccccactggtcaacaaatccttgattgtctccatggacatggtcagaaactaatttgtcacggaacatatctagaacgttcgccatatcaacagaataatgacgagtgcctggaactacaattgttccaccagttttcaattcaaaacgatttgctgcacaaacgatacggcgttgaagtaatcgtccatcccaccaatcagctactttaaagcagatttctggaatttcgctatttacattacacatttgactaacttctcgttgaaagttttaataacttcacggccatggtctgcacctttcttacagtctgcaattgtccatgcttcaccgttttggtatttgtgaagagcccgggtattaatatctttcacaagattcataatcaaatcattaatttcttgttcagtcatttaaagaatcctttaattttctgccacaaacttttcttttcacgaataccaatctgacgaataacaggttcaccctgcattttctctaaccattccattgagttaacagcttccgctaatggaacaaatttagcaagggccttttggtaattatctacatccatgatatgtttaccatctgcattgtagatagcatagcattttgtgaatttcttatcaatgtatccgataaagtgtccacggaaccatacatcccaacaatcagttggcatattcagattaaggtcaaccttttctacacaacgctgaagttcattcaatactttaaacttgttcattacagttccttaatagagcggatgatggtttcaatgttttcagcagtacgggcgatatctaagtaagtattgcctgttgcagctacacggcaagacattccaaggtcagtgaagtgtttctgatgctcttcagaaatcttgtaaccgaagatgcggaaagtacctttgttgttaacttcaagactacgaataccgaaggtacgtttttccagaactgcgatatagttactacggtaaacagtaagttctttcagaggtaagatatcttccatctcaccgagaagtttcatcatcaggtctttgtgctcattcatatcttcagtcagaggacgagctttacgagtattgcgtttcttcagaagttcaggcttgttctcttctgcatagataactgccgctttagagatgatgtcctgtgcttcaccagtgatgattaaaccgtcaccagatttctcgataagacctttcttaatcagaacgccgatgtttgagttaacagaacttgcgttcatggtttcttcaaagatttcacgcagttcagaagaagtgatgaaatcctttttagctacctgaaccaggatagcagcagttttttcgttcagagcatcttcggaagctttgatgatgtaagttactttagacattgtgattctccatgatgttttattcaatttgtttggtatgagactataatatcatctgctaaccagcttgtaaaccattttattctgctctctgaaaaattttcttcaaagagcagtaaaaatgttatacgttaaagatcaagaacttatcgccattctcaagtttaagcacccagaaatcatcatatacacaaagaacgacttgatactcttcaccgtcttcatagttactcgcttgaattacctggcgcataggatactcgcgattaacttcgaacacatcaagcaccacaatgttacctttgacatagtggctcagtcgagtgccatcagcttgagtagaaatataaagaatgtttttgatatcagattttaatgatgtaatcattttgttttactccgtgttgttttgatattgctataataccacaaccgagtaagcatgtaaacaactttgtgaaaataatttggggcattctaaggagggattttggagggatatagatttatatggaaggacctggagatgacctccaggttccctagattaactgaggagcaataaaactagacctaatactgcaattatagaacctataattaaataaaattctatcatagttcttccaggtctttcagatactcagcctcaggagttgtcttttcccagtacttaacctcttgggcaagacgttttgcttcctgagcgagtttctttgcttcatcatcagtgatgtgatagatgttcattgaaacaagtttttcagaatgttctttgaatagttcattctgttcaatttctttagtcaactgcttacgagttttgccttggataacgatgttacctgcgataacctctttgataaattgagcttttgcctgagcaagattaaatgcctgcttagtttcagcgattttatgctcgattcgtttggcggtgaatgtcttacggacttctacaaaatgacgaatcagctcacctgaagttttgaacttatcgttcagtttgccattctcgtcaattaccacaatgtactggctcattttctcaatgagtttaaaatccttcatgattttagcatgacgctgctcagggtcttcacttaaagcatagtctttacggaatttcaccttaaagccaaaaccagtcttagaacagtcatcatcataagtgatgtatcctgcatcttccagaggatcgagtactttctctacataagaagcacgttcaaacttatatggaatttcgctgatatagatcgagttccgtgaagtttctttatacacaccgtgtagttcaacagaaccgtcttcggtttgaacgatttttccattaaatttagggaactgaacttcaggttccataacttcgccacgaagagccgctttagtacattctaaaacagattcaaagctatgcggaagaatagaagttgaatatcctgttgcaataccacgaacgccattcagaagaacagtcggaattaccggcagataatacgcgggcggaacatgttctttatctttatgtgctggagcgatttctgtatctttgtagattttacggaagttgtcagaaatccgacagaaaatataacgacttgccgcagcagattgaaccaagcgagaaccgaagttaccttgcccatctaatagaggatagttgttattccacgtgtttgccatcagtgcaccagcatcttgggcagacgtttcaccatgatgatatcctaaatcagctacaccaccggcgacagacgcaagcttatggaatttttctttattaccgcgagctaaatcaagagcccgagcaataacaaaacgctgtacaggtttaaacccatcaatcaagttcggaatagcacggttttctacagtgtaaatcgcatactcttttgcttcattatcaatgatagatttcaaatcgcgatgacgaagatttgacgctttagccaaatcatcgatagaacctgcttgttttaatagagtgtcaaaaatatccattgtacctaccagattagtgagccgatttgtactataacatcggaaatgaaaagcacaatataaatcattccgtagatcattccatagtacataactaatagaaaggcggcagcaatagctgccacaattaggagtttcttaatcatttgtaaactcctacaattttacaaatgcgctcaaacataataaatgctgcagtgaacgcaatgcttccgattactttagtggtaggcacgaggccataccacatgaatgttcctgagcaaatcattagggccatcagaaacacatagcccatcacgaagaaggttctcattagtatttctgcaaagtaaagatgaagttatcattcagaatacgattcagctcagagtaggtctgcgcgtcacttgaatgctgacgagtaaacgccaatgcaagctgacctttgccataaccagtggtgagtggtttcattttattagcaggaatccagaacacaccgtaggtcatgcaattcgagcgcagagtacgacccaactgagaacgtccagaacggatatgagaaagaacactttcaaatcctgcctttgaacgctgtttagctacaaagaaacgggcagatgcaccaatataacctgctttgccatcattgaacatcaaaaaataaaatccttcgcgctcagtaatttcacgagatggagcacctgctgcccaatcaccgttacgaatagaaccgatcagttctgcgccagcgttatcgagatcagcaaaagtcataatattacgcatgttaatttcctcagttaattaaagtttattctccgatgaggggccgaagcccctcttattaccaaaatactactaccgctgtcacgataccaacccaaaatacaagaagacctgaagccaacagacgatacacaatgtgtcgtttcatttttgaccttcccatacggtttctactaaagatttgaggccatcggtctgaataatatccaccgcttgaatagcaaaataaattccgaatccgaatatagcaacaattcccagcgctaccacaacgataaaggacagaacaacagttctcattaagttaaagcgacgatcaaaactactacgaatcattatattttcctcagatgaaagcattaatccagacgttaactaaatcccatgcgaaaacaccaatgaaagtaacgataaggcagaatactacaaaggtgttcttcaaaatcgtaagtaactttttcattttgttctccagtttagctaacaagattatagtatcaccgaagaacagtaaagtaaaccgttaaatgcacaagttacgaattttttcttctaaggctttaactttatctacatgctcatcgcgagctgcagctgctccattgggatacaatccgccgtaagttgaatcgccattatcgcaagcaatgatagtataatgccaattcatagattcgagaatcctatactctttcaaaagttcagctttaatagaagcatttccgcgtttagctcgaagtgattttagctctaagtaactcatgttttactcccgttcagtttgtaaggccatagtatcatggccaatcccggaagtaaacaactttttaaaatttgtgcatgatatacccgccagcaccaactcgtgaaggttttactacttccatgaggtgttcgataccgccggcaaacattggtgtgtaccgtatgacattctgggacacttcttctgcaacgaatataattatacagtctgcgactttatgtttaaacatggaccctagatttattccacttccattagggaatagaccgtctttaccagtcgtaacattaatccatggcttatgatttgctcggtcatgaacaaagtgtgttttaacttcaactctaacaccttggtaatgtggatgagctaatacgtcccaggcccattcgtatggatcgttgttattatggtcaacaacttgatcgttcacgtatccatcgagaaaatctgctaccacatactctgccggtatagcaattctacatcttttaagaacatcaattctgtcttgagatggatcgatatctaagctatatctggcagtatcaatgatttttacttttgcttcaccccttagcttattcaaatctagggtaaatgtccggagttggttcaatctctgcagggctttgttcatcaatgccataaattcctctgatatgtaattcaccaaaataaacacgatcgtcgtggttacatgtgtctggttccacaacaaaatcatcaccaagttctacaagttcatcacagtgcaaccaagcgtagtgaacatcaccttcatgtttaaccacatgatgacaaaataccgtagcagcatgatgagtaccacgaagattaacaactttagaatgagatacgttaaatggattaatcatgtttcacccataataaaagaggagccctaaggctccttataattagcgaagttctgaaccccaacgatcggttacatcttctaatactacataaccacatgtacgcattttagcgtcgttgtaatcaaccgggatagatactacatcacgcggatgaactttaactgaaacaatacggtcagaaccactaccgaagtgaccgatgtaagatttagagcagacatgcagacctgcggaacaagtacgctgatcatcttcatctacctggttacgcggcattgtaacagttttacccggagagttatcaaatgtgtttgaagcacaatccatataagtggaacgaactactttccaaccaatgaagtgaccatcatcggtgatatcgatatcgtttgcattcaggaaatcaaacagacgataaactgcacgacgagacgggttcagcatcaggttttccaggaaaggcagataacgtttaaagtcttcgccatcttccatagctcgaacgatacgctcagtcagaccagatttcagctcgatatctttatagaacaaagtaccatcttcaattcggacgttaccctgaacgaattttttgatgccttgttccaggttaatgtggtcaatagcaccagcgatatcaccatctacaagtttctgcagtgcagatttaaacccgggatgttggctatcagcgttataagtagtacggccttcagtaattgaaatgaatttggaacttgctgcccatttaaattcacgctcaactggagcttctactttagcaggaacagctgccgccgcagctcgagcttcacgctctttaaacacacgccgaatggtgtcacgagaaacaccataattctcggcgagctctttcttagtgtacagaccgtttttgaagtttttaacgattgcatctttttggatttcagacagacaggtaacagccatttattcacctttattttcagaattttgagtagaagctccatcaaggagctccatgatttttacgatatcatcgacgagtttgctgtcagtccgccaagtatccaagacacttgcgatgacaggataatcatctttaaactgttcaatctttttatagaagattgtctcagcatcaccagacagtttattataaattttattacataaagctaaatcatcgttttcatctttgattttacttgtacgacaaaccttagcgattttgtttagttttgtcaggaacggatttttcattccagacgcagtaaacttactcgacaagaaattcaatttatcgtaatgcgcaatatttccacagatacggtttccagtagcatttgatggcatgtactggtcgtagtctaccttatcaatacacttgatgtattggtcaataataaaccggtcaaatgaaagcaatccatcagctttggccgcggctttcatagcactcggacgaattgcatagaatttcttaattccacatgcttctgccaaagaacgcatatctgtgatgctcatattccaccaccaaacattatctgggaaagtgtggatttcatcacgattgcgaccgattgcataaccttcaagctcagcaatttcagatgatactaaagtctgacggtcttcttcccagtacccgtctttatcaatccaatgcagagaaacattaggagattttggacgtttctcttttggaccagtgtcataatcaggaagagcttttctctgggcttcaagttcagacacacggaatactacaacttcatcagtatccatgattttcttcagctcatcaatgacatgcaattcatcttcattgtctttgattactgtaatgtgtgcccagattggaactaatccagatttacacagagcacgaaccgtagcaatacgcttacccgctttatcgtcaataagaacaaacgctttagttctatcaaccccgcaaatatcagaaatgtttacttggttatgacgatgccaagaactgcttgacactttacgacgagcaggttcatcgcatgaaacataaactgatacttcgttatctacatagtatgaacgaattttatcaagattatacttcgcaactacttgtttaatatcgcggttcccaatagtaataccgcggctctgaagaatagagcgttccttagaactcagcttattgaactcacgcaggaattcacggtcagattcatacgcttcaaacgctttaatatctgcggtaattacctcttcttcaagagcattcacacgcttctggatgttggcaatagtttcttcatcaagagaaagctcttcacgagatggagtgatatccaattcacccagtgggaaatgaacataaaccttaccatagcgattaagcagccaatctgccttaacatctacaccgctgataggatatacgatttttccataaaccgcgtacagaccatagctttcatacgaactattaacgctaaaccaatcagttttatctactgggaaatattcaatttcgcgacgaagagaatctaccttcggaggaacagcaccaaacgtacgcaaaatatatgcgatttcatagtgccaggtatcaatatcttctactttaaccggaacagtgatttcaagaccagtttcttcgtcttctttcatgtcatcgacaaacatcggacgaatagtaggttcaccgcggtttttcatgacagtataaccggtggctttaccattatgatatgatactacgttaaatgtacttgtatagcttaaaggcgatttagaaccaagaccaagagcaccgatgaaatcattactattattctttgtagattcaaagaacgttttgtacatcgtcatcatgtcattatgattaagacccggaccataatcacgaattacaaagcgcgggtcaagacgagttggtgctttgatgtaaaatggacgattttcattaccgttcagtttatgagcatcatcacagttagtagaaagttcacgaacaaccgcacgaactttatacttatagagtttgtttgacaagatgtcaaaagctttacctgaagctttaatggtaaacgttgaatcctcagcgtcagaagaaccaataattacttcatcatcacatttaattttcattttattcctatcaattgtgtcgtttaatgatttctgctacttcaagtaactcttcagcagtagcggtgttagttgtaaaaattttatcactgatttgtttaaagcggtctttgaattcctctgcggcttggatatcaaagaaacgttggatgatacgatactctcggtatatagcatcatcaaataattctttattcggaacgtagcttttctttagcattttactgctcctgacgatttaatcactttgaccatgtcagcaattttaatatcaggacgtaaaaagcgtatcactttcatagcaaaaaggctgtgattaatagggacactctggttactttccaaacggtcagctatagaatttaataaccgtttgattaaaagttcttggtattcattggaggggtcgactgagtattttagtgcctcagtgcggagtattgaaatgatagttgacttcataataatttcctcagaaaagagggccgaagcccctcgggattaatgcactctgctaacgcggccatacacctcatgtttagaaccatccgagttttccacccagatagtaacccaagtgccagggagaggtttcttttcggcaaacatgtatccataatcgcctgagaccaaagtaatccaataacgttgcatagtaattccttctatagcagggcaatattacccgtactatttattcactcatccaggtcttacgtggtgcagcatcattacccataattaattcaaacagttctttccagttttcaggaagagatactacatcataaaccgggtcttgaataacacgttcgtattcatcttcttcaagagagccaagacctttaatataacgaagtttccaacctttgaaatcatctttatggtcttcatattcgccaagagaatagaaccaacgttgttctttacctttggtgagaataataaccggagttttcacaaagcggattctaccttgttcaaacagttcaggccaattactgaaaaacgctaaaagacttgggaaaattgaaccaacaccatcaacatccgcatcggtcatgatagcaatatttcggtagttagtattttcagcaggctcaccaatcgtcaaaccggtgattgcacaaatgtcaaatacttccttgttcttcatagcatctgcagcagacattccccatgtattcatgaacttaccgcgtaaaggatatccgccatgaagttcacggtcacgggttgtgagcagataaccaatcgcagaatcaccttcggtcaagaataaagtggtgtcagcatctttgccatatttgtttgccttgatgtgcttagctactttggctttctgcgctttcttggcggctttagtttctgcggctttctctgcagcaagtttacgagctaacattgcctcaataataggcatatgaatatcttcggatttcataatagcgttagcaagtttcttataatcaatatcaatatggctacgaatttctccccaaggagaagtcagacgctctttagtctgagaatcaaatcgcatgttagacatatcacgaataaacatgatgacagtcagacattctttaattcgtgctttattaacttctaacttgtacttacgttttaatgctggaatgagttcattgctcagttcatcgagaactaggtcaacgtgcgtgccaccgtttttggtgtgaatgttattaacatatgaaagctgacggaacccatcatctgagcggccaatagcaatagcacatgtatcagaatcctgcactacagcgttttcatcatacatgtgggcataagctttaaacttgccctgaactcgtttacccatgaatttaaattcaatgtcaggataaactacagctaacgtcatcagacggtcatgaatgatggattggtcaacatcagtcaatcctgtgctttcaaagtgactgaaatctggaatgaatgatactacagtaccagtcttatctttgatgaattctttatcttttgctggatgttcttcccaggagatattttctgcgccattagaacaacgaacaatgatttcatttttaccatcgcatgttgcaccagtaaaagatactgaaaagatgttagttaacgcagaaccgacaccgttcataccaccggttttacgctcagcatcatcgccaaagttaccacccgcacgaggacgagtccatgcagctactggtcccggaatagtttctccttcaggtgttactacaggagcctgcggaagaccacgaccgttatctgttacaataattttgttgcctttaatgtcaactgaaatcttgttcgcatgtttgaaattagtacgaatagcttcatcaacagagttatcaatgatttcatcaatcagtttgataataccaggaacatactttactgattggaatttaccaaaaagaaaacggtcatgcgcttcaaacgcagaactaccaatgtacattccgctacgcttaatgatatgttctcggtcactcagaattttaatttcgttcttaatcattacatttcctcggttagtgaaggaattatatcaactattaattatagcaagtaattcttctttgatatacatcaatttaccaagaacctcatggcctcctttaaccgctttatactctgggtatcggggccgctgtcgttcaaacatagtccattgagcatcactaacgttagcgtatgcatatcgagaatttccgtagtactgttcaatccggtactcgttgttttcattaagtgaaatccactcttcacagacttcataatatttctgcatccaaatagtacgaccattcacgtcattaattggccaccaagcaaacctgtattttccaatagcccgctctactatttttaaatgtcgtttagcacgcctttgcgcagttgtcattccaataatcataatattctcctctggccaacaagactataataccaaaacacgatgtccatgtaaacaactaaatgacccgaaggtcatttattcataacgaattgtgctgttcttaagaaaaagccctgagcacactgttccgttaacaggttttcctgttggtccaatagccgtaaagcctgtgtgctgaaaatcatcctctgagcaagaaaagaacttatatccagtgattttgatatcagtaaatcccgcgttatctaacacgcgagttgcgttatcagcgtcagtgcatccaatcatcatgaaggcaagcgctgtaattaaaatctttttcattttaatttaaccctataagttatattacctactttaataacccggatttctccgggtttcatggtaatgcgtgctttagttcccatcaataatcaccactctttaatccatcgtagtgaactgccggagcagaaaccacccgcttcatttgaccttcacacttagggttaaagcagttaacagtatagtcacgatgggaaattttacgcataatttctatcttttttccacagacttcacacttgtaatcatacattggcattaacagcatccttccatttttgtgttttgactacgatttgctcattcagcgcacgagtaaccatcatggagatttcatcatctgatacatgcgcatcatctttatgacgatttctgaaatgaagccaaagtgcatctactacacagttaataacatctgcgcactcgccttcaaactcttctttctgccgccatggacgattaatccaatcacacatttctccagtttctgaagaaagttgcaacatgacattcccaatgctacggttaggaataggataagacagttttgatgcttcaaaaataggagctaaatttaacattgatatgcactctgcagtgctgcaatagcagcgattgcttgaccacggttatgaatagaaagattcataaccaaatcggttggaattacattcgcggaagttccaacttcagtaaagtatttgaattcgctatcaaaaattacaaggtcttcaccgccgacttcatcacattctgtgccattagcccacataattccggatactctattattttggtagtcaactttagtaacagtaaaactcccgccattttcatagagttcatacacaaagtcttcattaacctcatagcgtgaagaaaattcttcttcagcttcatcattgacgaatttgtactgtacgccttctttaaaattcattacacaatctccatgtattctgggccatcaactgtgattacacgagcaaaggtacgaactgggacgatatcaccatggttcgcgaatacatacaaccaagtccagtgctcttctttaccgaaggttttctctttctgaacaacgattaagtccgggttgaacagaacatcttcaaaagcttcagcagtaatttttacggtattttcagttttcatgttattctcctcagtagttgataaaataatagtaccacatccttgtggcaaagtaaacaactttttatactaaaccttgacgctgtgattctgtcggctctacatcagctttaggcagaactgcatagtttccttgaaacactacgtttactaaggttttaccgtcttcttcccactcatcagtgacaagaacatttttatgcagcgacagattagtggctgaattagtagaactcacagattgggtaataacattgtccagtgaattcacgtgtacccacttgcgcagatagctttcactagattcaacgaattttttcaagcagtggatgtaatcaccaaaatcttcacggtaaatcttatacccagatttactgtcattacgattaactactttaacgattacaccattgtgaccagcccacttaccaccaattactttaacgttttcgcctacaactaaatctttcatcgtgtttctctcagtttgttaacgtagagccattatataacggctctttcataaagtaaatagctatcggtgagaaatttcacatccaacatcgacgccgaacagatacccagcttcccaccctttagccatcatagccttggccaccagaaccatcgttggagagattttcgggaggatttcccggttgaaccactcttcaaagttttcatcgaactcaaactcttccattagccacgccccttaggtaaactcagtggatcggtatcttctggacttggtgcttcgcttaggcctagagcatagcgttgagcatatttaagcattagaatatctttggcacagtcatggatactatcatgcgcaataaatccatcgagcgtaccctttggaagaggggtagttgtcagcccacgagtcagaagcagcgattcaattgcagtacgaatatcacgttgattccagaacttgcatggttcttctttaaatgtatcaatttcttcttcggaaattccttgggctcgttgaacatcgcgaagacaatcaacaaaaattggaaagtcaaagctctgtccacgacaccagccaaaggaatcccatgggtgaattccattatcaatcagatattgctgagcttctttaattccagcaattactgataaatcgtctggcgttgaggccaggttagcacgggcctcagctgattgtttcttccaccactcaagagtagacttaccaaacaaccgatgacctttctgggatttaaggtcaaacttaatacgatgaccacgcttgaccaattcatcgaagctttccagaacttcagggtcagaatcaaaggtgattagtgcaaggtcaatcacagaagagcttgacacatttccgaatgtttcaaaatcaataataaagtctttagccattttgagcctctagcataaatttaatttcgcgtaactggcaaccaatatattcgctcagatacacctttgggtcatatcctgtgaaccaagtaatagcattagcattatctgctatatcacgaagctcattcagaactgtatcaattttaatgttaatagcacgcttaacattatctggtgcttcaaacttagattcttgtaagccaacaatcattgtttgaaggtcttctaatttcaattcaaacatattacctcacacataaaacacatcatatcgacctcgggtagtaccaacatataataactgctgtgcgagagaagcatctgccatgtgaatgcatggagtataaatgaagcttctgtcaattgagatgccctgggccttatggaaagtcgaagctggtaatgctttcactttatgaaacttacgcttagcatcccagaactcagaccaaggagctttacctcctttattccaattcttatatgtatctgcagtttttgccaggaagaattgaaacttattcatttcttcttcggatgagatgacacagattttctctctagcgtactcttcatcatcgccataggtttcaatatctaatacccaatgacgaaccagatattcacctggaacacctctggcacccaaaaatgtggtggtttcaactgcatctaatatgcgaacaaactgaccattattgaaaagaatttcgctgaatttcttcccttcaaatttaagttccttggtaagaggctcttgcataacaacaatctcacctactacgaatggtcgttcagtttcatagattctgcgtctgattatttcattcaatttatccacagatttattagtgaacgcaagcattctgttttcaaataaatcttctggggttttaactaaattaaaataatttagcataaaatctttaagggcagttccttttgtaaaaccacggactccatgaccatcaactacacagtcacgaatccatccaccgtttctaatttcggtagcgacttcaatgattggggcattactccgcatcacctcggtcaaatgaagttgtaagaaatctttatgagtgaagaatggactcaatgcaggttcattacttccaggttctactggacgaatttgagccttatcaccaatggcaatgacaatacaccaagcaggaatagttgccatcaaaatcttaaacagcttacggtcatacattgaagcttcatcacagatgagaactcgaatagacgccatatctggaactttcttttgttcaaacagaacgttttcttcatatgtcgtcggattgattttcagaagactgtgaatagtactggcctgcattccgctgagcttagataaaacctttttggccccatgtgtaggtgctgccaacgcaatgccagagataccctgagaaatcaaagcatcaatgataaatttggttaaagttgttttacctgtaccggcaggtccattaatcgtaatatgttgacctttagctccttgtttgaccatttcaatgactttattaaaaatcgctttttgactttcttttaactggtcaaacgtaatcatgccacttttaccctcactacatgtagatttttaatttttgcttcaagtttttcacgctcaacatcgctaagtggttcatacaccaactcagatgttttccaccaaagcatccctttggttttgcttttcccagtaaaattcccttttgctaatttgtctgttaaaaccgacattgtacgaatccgtgctttattagccgattcttcattagtgaagaccacacatcgttctccatcgtacatatcagttgtgactggatggtcaaatccgtctttatccttatacgctactacatatccatagtgttgcattacattttacctctcaaaagttggaagaaggacgcagtcaatggaagaccttttttcaattttaacttatctagcattgagcatttttctaaccgacgaagtgagttaacaattagctgtattgattgcacgcggatttcagcatctgatggacgattcggaactgacgctaaaatagcagataacttacgctcaactttagctaattcagacttaccaccactgatacgagttctcagcgcattaataagttctaaatcagccgaggttgcagttccgttcttttccttttttacaaattgagaaagatgattttcacgattacgcaagttggttttaattgatgcgatagttttttcatactcgctaatcttttccaagcgagacgcttctttatcacttgtaggtttaacagaatcagaagagcgaactatgcgtgccgcaatttcattcgcttttcgttcaaggccttcaatcgtattatttccacgcaaagtattatacttttgcttaacaggaataacattccccattacatatcccaagtcattattccaacgctcgagcgtcatgctgtcaggatgatttcctttaacagttccaaacttttcgcctgagtatgcacagtgtgtctgttgcatgatgttaaacagatattctggggtgagattgaactccttgtgccgacgttgagcagaacctaaagttgtaattaaacgagtataaactttagcggtttcagcagtgaatttcatcgtgttttcctcaaaatgctttcgtcttacggacggtataatgggtctaggtccctagttctagataatcactagttgactaagctatagtaacactaaagtagtccataagtaaaccagatttttcaactttgttatgacccaccactttgaacttagttcccatcggtagcatcctttcttgttctttatcaatcatctcgatgtcagcgcttctgcgctgagcaatgttatcaatcacatcatttggtcgcatgaattcagaatctggtgcagtaattaaaagcgatttcatgttggtatgataatcaaatgattgctgacaattattgacttcaatgactacaaaggtcgagtaatgccatttgcctgcaaattctcgggcaatcgtttcatctgttgtgaatgatgctacctttccaaagtcaaatttctctcctttaataagagcgtcataaaaggctttagcctcgcggcatgatagacctctatagagaatgtcactgttatcaatttgatgacgtctaacgatagagtcaagtttcttatgaaattcttcgccaatcttattgttcatgcactgccacagaattgactgttctttgcagtcaaaccgattggctaatgcttcccatgcgcttaaatcatacacaggtaatcctctgtgctgcctcacggaattcagaatatcaatagaatgaacgctttctactagcatagcctgtgggtttaatgaaatagccatgatattctccatttttggttacgagaggtatcttatcatggctttttggaagagtaaactacttttgtgaaattattttgcccatggagaccagggcggcgggtcagaccagattgaagctagttcatctagaagagcttctggggctttaataccgtacttctgtataattatacggtattcgtctttgatgtccttagaaatcactggatgaacttgaacctcttcctgaggctcttccatcatttcaaacaaatccatcacatgaaccactcagtattgcgatacagacaactactgctgttatatccatcagctgctttttgtaacagcgggcttggagcaagtttgataaaatctgcacccatatataaccaaactaacttagtaaattctattagagaatctgtgctatcaatgataatctttttgcctcttgaaattatgtcattttcgtattcatataagctagtttcatgacatacattggtgtatcctttcaagtggagagcatgcagtatagaaacaggacttcctggaactgtatctacgtcaaagacatgagcagtcttaataatgccataatcttcagaaggacaccaaccaaacgcctcgaatttattaattaagtctttgaaatctttgtcaaaggtgctgtatagagcaacagtaaaaattctatcttggtctagacgcaaagctccttttgcatcacttcttgattgaactgcacgctgtaaacttactttatagatttttgcgtttgccacaaagagctccttcagtcatgttgttgtcttcaaaccacttatcatttgctttaattaaagcaggcgcagcttttagtaataacgctgcggctcttacacctctgtaccaacaatcaaaatgagacttctttaatgacgattgataccaaggcttagtataacatatcattttcttctcctcagttagtaggaataatatactattcccagtatagcataaaaggactcccggaggagtccttaatttttatacttctgcactagcttcaaacattttagcgttggtggttgcccaagttgcagcatcatcaactactgttgaataagcagctttttcagatgggaaaatctgatactgcgcgttagcaatacggtgcgaatcagaatataccttaaaagctacagatacttcagtacctttaacttcaccatcagcagttgtatggtcaaaagttttgatgtttacgtaagccattttaatctcctatttagtttacaggagtatttatatagctgctgtaagtgcctttaatatttctttatcaatttctcgagtgatttcttctcgaagggccaatactaaggccctttcttttcgttttctgataatttttaaacgacgcttagatattcttttagccatcagtaaccactgtcttgacgagcaaagttctctgcgtttttcagataatacagcttaaagatttcttcagaatccagaccaagcgccataaacatattcagaacaaagtgcaggatatcaatcatttcaaacttgatttcaagctggtctttatcagacaggtctttgatataagtttcctgcatcttgacgtggtcagctttccatggtttccacacagcactagctgccttttcaccattactcataccgccaagagacgtcagcagttcgcggaattcgtcatcaatgtagtctttttgattacgcagccactgcacgatatcaccggcttgagccaattcatcaggatgcatgttagtacctggcttgtcatttgcaagacgaacctgaagagatttttgcatatcaagcattacttgcagagggtcaccaccaactttacggacgatacctgcgtatcgagcttcagctttatctgcaccagcgatcagttgactacattcgttaaagtgtgccattattttattcctttcaattaaattagataaatattatatcacttaacataaatagcaggaggattcatgtctgaagtgaaacaagaatgtaaagacaaaggaggatttggaagatatctttacgtcggaatcgccactgctgctttagctgcatggaattatgtggtagttccattagctagcacgcacgggctagttcttcctccgatgccgttagaaaaagttgtgtcgtttattatgactggaggattgctttagtttaaggggctttggcccctatatcttcgcatatttgtcaagacgtaatttagccattaaaccttgcgatatattttgattaatataatccattatttcagaagcagttgccccctctttcataatcatatcatttatatctttgcttttccaaggcgacttatcccagaaaactaccttttcacctgcatctactaaacgtttcatacgcttaattgtatcaggatgacgaggttcatggtccataatccatgctcggttatcatgacatggaacttgagctaaatctaaagacccgccagtgattgcaatagcattatcaatgaacaacgaatctattggtccttccatgacgaatacgagttttgactcatcaatagtgtcgagaccataaattttggtcgcgtgttcgtgggctttgattgtgatgtatttttgtggagcattctttcgtagtgctcgtccttgaaacgactcaatctctcctttcttgttgaagataggaataaccaaacgtggttcgttcgtctcattcttataggttcctggattaacggagttaacaagagaaggccattggttagtaaaccataaccttttccaagaagtgcttggaatacatctggcagtcacgtatttaactatcggatgttccttaggaagtctatctaatcgctcgcagaaattaagtttttctattacggggagttttgcattaattttctcagacggttctacagcctttggcttatcaaagacctgctcctttcttttctcaagaagatactctcgatagaggtcaggttcattatctttaagatactgcgatagccacttgttatactcacagttgaagcaatggcagcgtaatccttgacctgcatcaaaaatccagaatcgggctttattgatatctttctgtgagtcaccacaaattgggcaacggcagtttaacttgaatgttgaagatgtagtaacgtgtctaaatttaggtaggtgagatattgcacgaattgcatactcgttatcaacccaagacataatatttcctctggccttaaactaataaggccattttatcactttttcttggcagcgtctttatccgcttttcgtttctttggaagggtttcgggtcctttattgacgatgtccccggaagtggtacctgatgcaatattctgtggattgccgccagcatcacctgcgaccatctcagtaacaaactctttgtatgttttcatagagcctcctactatttattcatgcgtaatacgtaagcatttatatgtaggatacagcgtcggagacattgattttggattgtctttgataagcataaactgcttgcctgtatcttcacacttttgcttaatcacggcttcatctttaccagtgaatgccatcttttcagtagacattccacctgaaccagtagatagcgccattattaaaacgtacgtaatcatcctaaaatccacttaacgatgttgaagttatcaaactgagcatcacagtaaagaacataattcaacttaagtgctgcgccgtcgtctttaagttctgcttgcacttctgtttgtttgctcgggtctacgttttccacaatatgaccaacatctgcacgaatctgctgagctacttcagactcatcagcagtcattgaccactcgcataagtctttatcatagttggccatagcaggaactgcagagcaacttgatactgcgaacactaaagcaagtacaatctttttcattttggtttcctcaagcagcttgtacgttaagagcagaaatcaggcgataatcaccgtttgcgtatactaacattgacacattgccatcagtgtttttgaatggctcaacaactactaaaactgtatcgccttcatctaatgcttttcgtactacgccatcacaacgcagattagcatatggagatttaactactttgcttccaactaccataccacaatgcggtacggtttccgctgattcatctttattcttaaagactacgtctaatgctttttcaattgtccacatgatgttttcctctactcgttttgtttcagtaaggccatagtatcatggcctttgaagaaagtaaactaccttttgaacaattttttcaacaaaatgtcagaggtcagattcttggtaggtaggtatgtagcagagttaacccagatgccatcgctgtcatacaccttgacctctccatagtcgcatacagataggtctgctttgttatatgcctcaatgcctcgatgaatggtatctgtggctgttacaacaaaagagtgacctgactggtcacggaccgcgctaaacacaaaaatcataaaatttacctagaatttcaactcttctgccagagcatcaagcttagaacgtgatactcgttcttgacgattagattcggctacacggttctgtgcaccggcaccttctcggacggtattgcttggattaggcttagttgggtcgttttgcttctcaatttctacccagcgttgattagccttatgcacacccataaagaacttattgttgatgttcttatcgccataacgtgatttaatctgcttaattaactgttgcttcatctgagcaagttcaggggtttcaatcacagctaacataaagtctgccgtagcaggtagacccgcagattctgcaatatcactcatgtccatatcagaagcatcccaagctgaacgaccgacctgagctgcggtccaaagaacagtttcagattctacagccaatgcgcgaagttcttctgcaatagctttaactaacgtgtaactgttttcagtatattgacgaatacgacaagaagcacaaataccaagatagtcaatgatgataatagtcggtttaaagttcttcttgagtttcaactcattcagaagagctcggaatgtattagcgttagcaccgccagtcggatactgtttaatgattaaacgaccaagagtactagaactacgccatttttccatcttgcctttatattcagcgtatgatacacagccatcatcaatatcgtcaagtgatacatcaagcaagttagcatcaatacgtttagcacaaacttcttcggccatttccatactgatgtaaagaacgttatgccccatctgaagatagtcagcagctaaagaacacaatcctaacgatttaccaacgttgacgcctgccatcaatacgttcagtgtaccagtctcggcaccacctttagtaattttgttcagaatgctaagtttaaacggaactttacgagctttattctggtatgataaccaacgagcttcataatcttccatccaatcatgaccaatatagctatcaaacgatactgataacgcttcacgcatgatatcaggaatagctcccatatcaggaagacgcttatctcgcttatttggctcaagctgggcattagcctgaatttcaataattcgagacgttgcgttatacatagccttttcttgaacgtacttctctgtttccttaactaaccaattcaaatcttcaggagcatcagataacttatcaataagtttctttgcgccttcatgttccgtttcagttatagacgaattatccagtgctacacataaagcagtctttgaaggaattgctgtgtattcattaacgtgtttcttaattatgttaaacaccgtctgagcaggtccttgctcgaagtactctttgtccatatatggccaaaccttcgtaaagaaagcctggttgtaaatcagattagctaagattgtttctaccactttaacctcttaaaagattttccataatgattttttcttggtctttaatgcactctggatttgttgtttaacacaagcttccacatgaggataaagttcatccttatgagcttcagatggagtactaaactcaatagttacttccccggaaggagaaatatttaatttatgaacataaaccaagtgtgattgaccatttaattttatcacaatttcttggataacggtcttcatagcttcttggattatttcatggcttttcttgaacactcgttcttgacgctcgaagtctccctcttccgagggagattcttgttcaaatttctcgagttcagattctaaatcaaactcagtcttcattcatgaagttctctaattcatcttcaacttcagcagctgatactgaaccactctcaggaagtttaacaccatcaaccttagttgaaacttttgagttaatcatttctgctacagcttcatcaaccgcagcgtttgaatcaatagcacccaactgataacgagctttgatagcgtcacggaatggctcatgcttaaacagaggaccccaaaattccgtactgctcgtatcttttgcccgccaggatttttcttcacgaatcatctcaccggtttcaacatccaggaattctcgtgcataccatccgtttttcggtttaaccacaaacccgatatccagagccatatcaagcagaccactatatggatcgataccgccatcgaatttaacatcgatgaagaacttacttttctctttgacagtacgtgatttctcagcgttcaggacaaactgatatccctcaagctcagtaccatctttaatttgacgtttaccaatgatgaacacagtatccgcagaatacataggacctgtaccaccagtcattaccgtcttactgaacatctcgatagtctcgattgtgtggttaaccgcgacacaaggaatgttcttaatagagaagtaaggagttacgatacggaagagagacttcagacttttcgcacgagtcatatctgcaacagatttctcgttcagtgcatcttcggtttcctttttagacgccatgttaccaatagagtcgataaacacgatgactttttcaccacgctcaatagcttcaagctggttaaccatatcgatttttaattgttcaaccgactgaaccggtgtatgaattacacggtcagggtcaacacccatagatttcagataagctggagtgataccaaattctgaatcatagaacaaacagactgcatcaggatacttattaagataagcactaaccattgtcagagacatgttagatttgaagtgtttagatggacctgcgaagatagtcaacccagactgcataccaccatccaacgctccactgattgcgatattaagcatcggaattttagttctaactacatctttctcgttaaagaattttgatttagtcagttctgctgtcattttagaagtggatgctttaatcaggcgagattttaagtcagacattcattatattccataagtctccattatatttttctcacaggttaaaggatagagtaattatattactttgttcttgaagctattaacagaagttccatttcttcttggtgttataaaccactgtttccatatctatttcatagtgtattttacatccaacgcacatgccatgccaccagcaatgcattccatctgagccagtagttccttcatgaacaaactcatcagatttacatacgaagcatctgaattcttcagccttgaatatattaccagctacatcagatttatcatagatgttcataagaggtccttggagggctttcgccctcacagatatggttctaccttaccaaactcatggaaggcctgagatttcactcgagtgttaatacacatacgaattgatttcagaggttcgttatcaccgaataacccacgtctttcgccgtctttagatttccaacgggcttgatttgggaaagcagcatgtagttgttcaagggctctattctgtcgagctgtatcacgctgtgtagaacaaccaccaggagactgcaccttaccagatttaacgaggtacttaaacagagccagatgaggatgacccatgttaattaattttagaaaagcataagcatcttcgttaaggtcaataactccgtaaccaatatcttctgcagtaagtttagtcaaatcgtagaaagtattagtaaacccaaagctgttctcgcgataatgaccccagcttgatgtgattttgaaaataggcaagcgagcatgaccgtgataataaccacaatccatagcagtctcgacatatttgaccatatcatcaaatacttcttggctcattgcctcgccgacaccaagcggaacacggcgatcgtcgcgttcacgaatttcagtcagatgaattgtcgtatcatcatcaagcatccaaattcgctgccctgcatacatttcagtaatcagacggcgagtaccagcgattccatcaacatcatcgggaatagtaacaattttagcagcatgaccatgccaggtttcgtatgcttctttttctgattcacgtactacaagatgtggaacataaccttcaggaaacatagtcagggcagtaactgccccggcgcgcttataacttggaattacaaactgaatcatttccattcacctttataatctttctttgcaatatgagtttcaccagtataagcatagttatctacaagatagaaatgacgctcatacacgtgcaaagacccgacattccaaataatgtcaccaactgaataatttttacctgatgcattcagaagtttggttaactgttccagaacatagagctgccacgcatagtcattacgatatccaaagactacatcgtttgagcgcatatttaccacggcgtgaactttgttgtcacgaataagatattgtacattgttagtacacatgaaatcgctcatgccatcacgctcaaaatcatactgcatttgaggtcgtgtataaatcataattccgcggcgagaatcaggattactgataagttcctttgcacagttagcaaactgcgaatagttttgtgatgaccaaactgcccagccatagttagaattaatctcaccatgtttggatgcaattgctttccaaatagctggggtttcacctggaatatctttaacgaataaactttgagatttataccactcaagttcccgagcaatatatccatcattaactgcgccaaaaattaggttttcatctgcaataaatgatgcacctatgatttcaatagtcttcacacccgtcttatcaatcacaaattctttgttgagcaaagcatcagcgaattcttgacggatatcttgtactgtcattggagttacaatcatgagacctcttatttaacttgctggataataattgtattctgctgtgcgttagaagcagaccaaatcagcgcaattaaccaaccgataatggaccaaccgaatactagatttgtgataaagattccaccccgtgatttatgcttacggctgcaagctacaaaagtaggcagaaaatagataaagataagaatgattaaaccaaatactgcttccatttcaagttcctcacttagacatgcatttgttgtagatatgattttgaagagatttcaactgctcagtgcgttgatgatattcattataacttaatccaccattagcaaaatcagttaaacgaatctgatcatttaccgctgctgcctgggaagcgcaggtacgttctttttgagttttacgtaaacgctcgatttcggccatttcatgcttattctgctcaatcatgtcgagttccatcgcagtcaactggcgatttggattagccttttctttagctaaattacgctcgaactcacgagatgaggcagagacctgattgtttgtacgatagtatcctacggtacctccaattgctcgtacttgtccaacagaagaagcagggacgatatcgccttgtggcatttgacaaccggtcagtgtaagagcaacgataatagcaagtaacgatttcatattaatctcctcagtaagtttgggtaaactataccacatccctgtgataagcatattagaagtcgaacatgtcgagaagagaagatttctcttcatagtccaacccggctgcttcggacatacctgtcagaggtttaacgaacgatttttggaacagaacactatggtcaagccataccagaacttcctgtcggatttcctgtggcagttcagtacccgacggccatgccatacatttctcaccatacgggttaccttcacgtaacggaatgaccatcaccttctcaccttccatgattggtgtaataccatcaaatcctgcagttgctcggttatatgccaaagcacctttaacgtgatatggagtacctttatctggatatcctgcgccatcatcatacttaccgatgttgttggcagtcttaacttctgcaattaccttatagtcaagttcgcgatattcagactcgaactgcttatagtactgttgtaaagattcttcaccttcttgcagcatacgacgaatagattcttccaatgcattctgaacagcagttggtgtagaactttgttgagtttccatacccatgattttcagatgcggttctgcatatcgagtaccttccatatcatacacgttcagagcatatcgtttcttcgctttccagaatccgccaatgccgtttgaacccaacggaggacaagaaatagcttcacggtccatgaacattaaatgttctttattgttcatgtattcacacatctcacgatatgattggtcaatccaaggttccattttcttcttgccgaattggttcaggaattcgaccaaatcgttagtttctttgaaacgctcaagacctaccttctcgataaccttatcaacacaaacgtaaattgagtcagtatcaccagctactacaaacgaatgtccttcggtgccacataccttgttgaggtattcattaactttacgttcaatccattgaattgccatttgaccaaacaatgtgattgctgatgcgttgcgcaaatcataataacggaagtaaatgttacccaatgcaccataaagtgagttgatcagaatcttacggtttaactggttagtgttacccaagatttcagcgtgtttacattcaaacatcagtttgtcaagacactcttcggtatatgtcagcagttctgctttcatatcatcagagaaatcttcatagacattaacttctgcgaatttatcgatagttccaaacttcttatcattcagaacctttttaatcagttcttgatttcgtttggcacccatcattttatttttccactctttacgctgataaaataccttcgcgatttcaactggaatgacaccatctacatctttacgatacatccaaccatttggtgaacatgaatattcgtcagacggacgaggagcagtcttgttaatgtactcacccaatggatgaagtttaaactgtccaacgatagtttctggtgaaatattgacttgtcgaatgattgacggatacagagatgtcaagtcaaacgacatgatataacgatatgcagcaggaactggttccttaacatacgcaccaggatatgactgtttaacatgagaacgactttgcggaataaccttgtcctgttctttcagactgttaaagatgattgcgtcccatgttttaattggactcattacaccttgatatggcatcttcgcataataagacatcgagatagccaggtcaataaatccacgaacagcatcaatcgcttgtactgattcaacgtcgatgatgttatacgaaatataccgttggtggttagtttcacgcaacttattgatcggaccgtcatatgctaatttacctttcttggtttcataataagcaatgaaatccaacttatacgtcggttggttcgtgaaactaaatttcttatacaaatccatgtaatcaagaatagtcacacccatgatagaataaatttctttatcaccatacatgtttgtgataatcttagatgaaactttattcagaggagagaaccgtttcatcgcacgctcaccaagaatctgtttcacacgattcatgatgtacggaatatcaaatccttcaatgttccatccagtaaagattgctgggcatttctgttcccaaagattgatgtactcaagcatcatttctttttctgaattgaacggcatatatactacgcggtcaagaatatgttgtggaacttcatcaccgccttcggaatctaaacgagcagcgagtttcttgtcccactcggaaacagaaccataaagagaatgcagtaaatcaaatacgtagaacttatcatcaaccgaatcgtaatgagtgatagcatcaatttcatattctgctttcatcgggtctgggaattgagatgcagtaacctcaatgtcacagtttgcgattcggatgaattttttattataaacgatttctgaaccgtaagtatcactgatatacgcgagtttgaaatcatccatacccattgcttccattcccatatcttccatacgacgcatccaatcgcgtgcatctttcatagttgggaatgtattcttcttgcaatacttgccatagatgtctttgtactttgtttcttccatgcaatgactaaacataacaggagaatacggaacacgacgcatgcgttcctcaccagtagaatcgatataacgttctacaatgtcattgcctagagattcaacgctaatataaaattctttcatgggtttcctttgtttatagaccgagttattagtctttaggtgggataattatactccgatttttataaagtaaaagggccgaagcccttttcttacgcaccgattgtgtacttagattttaaagtccattcatgcttctgtttgaatgtaattacccggaagttattctgcatctgggcaagagtttgaccacgattaatacttagtagaccccagtcagcgagcagttgtgcgattgagtctcgacgaatttcatcttccaaatcaatagtaacaggacgaccatcaagctttaacatctctttaaaatggacgatatagtaacgaccttgtttctgaagaatgtggcagctttgatatagtaccttatctttgttattagcaattcccatacgagtcagagtttctttaactttcaggaagtcttcaggctgtttcagtgtaatttcaatcatctttaccattccaatgctgttttcttaagagttttctgttctttcacgtttttcgtgattgtcttgaccaattcatcagtcacaagacctttcattttcttgagagcaggtttaagcttgtttttagcttccagggtctctctatacatcctagcatcaatcgcattgaccttgtaatatgtcattataacttgaagaatcaatgcatcctggatgttttctgttaacttagcccatttcccataccgacgacctctaggaacagaggccatcatatagttatagtgtgcttggtcagataacccttgaccaacaaggttcataacataaaccgaaggcatacagtcagggtgttgagaaagagcgttttcaaccatgaattttgaataatccatcgtcgagatattcaaatgctcttgcttttcgttaatagacccgataattgtgaagaattgattttctgctttttctttatatgaatcagataattcctggactttcgtccagtctttacctaaccacgctatttggtgctcgttatactgatcatcatcttcaaataaactcatcatttccactgcatctctacaacaagttgaataagcatataaaccaaatgtaattcaatcgaagctgctatgccatgatactggttattttcaccgatgatttcatacattcggataatgcttgggccagtaaccattgtatacagctcagaagaaagtttatctacaaaccaagtatagtctgctgcatatttcggagcaagagcacggagttctttgatgttcttagttttaatagcttcgatgacatcttcaattgaaccacggtcattcagaacgatagacaagatacctgcatcaatcacacccttagaagaataatgatcaagcatgttaatggtcttacggaattctggaaaattctttttgaccaaagcagctacaactttcttatcttcaactaccacgccttcattttcacaaattgcgagacaacgcttgagcatctcgatttgcattggcttaacatcagatggagatggtttaccaaaattaattacacggcaacgagactgaagaggtttaatgataccgtcaagattgtttgcagtaatgataatagtacagtttgtgctatacgcttccatgaatgaacgcagatgtcgttgagattctgcaagacctgcacggtcaaattcgtcaatcacgataattttctgcttgcctgcaatagaagcagaacttgcaaatgcagttaacggcccacgaacgaaatcaatcttacagtcagaaccattcacgaacatcatttcagcattaatgtcattacacaatgctttagctactgtggtcttaccagtaccaggagaagtgctatggagaattaaatgaggaatttttcctttagctactaaagccgaaaaaatttctttatcttcagcaggaagtacacactcagaaatagtacctggacgatatttctgttcccacatgaagtctgcttcgtttactgtcaatttcatttatatttcctcattcagattaaagatggggccgaagccccgaagttattactcaaaatcaaaggtactgtctgcttccattgctactacataagaggctgatgcaccttcaaatttcgctgcagtctgtttcttggagccattcatttttgcccacagcatcagtttataatcgccgatagtcatcttcatattgctcatgttgatgataaagttgaagttaccgtcaccttcataatcaccgagtgtcagagaatacttcggacgggtcagtgcagcatcttctactttgttataaccgcgcagaacaattttaccatcaacattggtgatagcaattgtgtcaatctgcatgccacgagatactcgcatcagctgctgcaggtcttcacctttaaaatcgataattacatttgccaccgggaatgggattggtttagtcgggaacacgattgtgctcgggtcagctgctggccagaagatagttgagcgagcatctttaattgccagattaccatcttcctgcatgataatatctgcatcatcaccaaccagagacagaatgctcaggaaactgttcaggtcataaattgctacatcagtatcgatggtatcagaaattgttgcttcagcataagtcgtaccattaacagcacgagtcatgataaaattgccaggtttcagcatgataccggagttgatggtggagaagtttttcagaatattcagagtttctttagagaatttcatttcaataccttttaattaagttcaggataattatatcaagctgcgaatgtagcagttaattcttctgcaacaatctgacctgccgcaacgagttgctcatcagcatctacacagtaatcattttctagacgttcgccaccgtgacgatcagtaacaattttggcaccagccttgattgattcattgtaatgcttacgcatcagttcaatccatttttctgcgacttcatcatcgatagatttatagaaagcaaagcgagcttcggaatctttaatcttatctttgatagcctgtttaatttcttcagttagagccagaacccaagacttacgaatacgattttggttattcgggttggaatctgcacgtacgtttttaacctggatatctttcacatcaacaaaattaatcattatatttaccttaatcgtaataatcttcaaccatccaaccggcattcctgttggacatgactctattatattcatttcccgtaaaagcatctcgtaacatttcttcagttacaagatggcgttcatcagaaaataaattaactaacacatagcgctttaattcaggaaaggccaacagatgttggcccgtagtaaactcattcattccatcaccgtgaatcgtccgaccttcttcatttgaaggtgttggccatatgcctgcgggtcgtggtcacggtgagaaataataaacacattggcatctaccatcttattaagaatagcagttattgccttaacaccttctgcgtcggtggccgaatcgtagacttcatcaaggaacagacagtttattttaacaccagaaactttttcagcaatatcacgccatgtgaatagtaatgctatatcaattctggctttttcaccttgactaaacgaggcataactaaattcttctcgtccgcgagatttaatcgtttcagagaactcttcgttcagtgtgaacgaataatcagcttccataatttttaggtagctgttaatttgcttattgaacatcgggatgtacttcttgatgatagctcctttaataccggagtctttcagcatttcagttaaaataccacgacgatatttttccataaccaaattagttttgacgaggataattttatctaattcttcttgtagcaatttaatcttgtctgagttatcaataaactcctgggatgctttatcaatagctgctttaatacgacgtgccttttccacagcagtgatagtcatttgctttaaactagacatttgagttttaatatctctggcacgtgaccggacagtgttatactcgcgagctagttcatccagttcactctggcgcgtctttaactcgccaagaatggtattacattcttcaacatgatgattaatcttagtgattagagtgtcattagaatgcaaatcctgcaagcacgttgggcaatgaccacctttatcatacaacccaagaacctttgagtatgattcaattttagaacgaatcttaaaggttttaccttgaacttcttggattgactctgctgggtcatcaccaatcacgagttcaagcagttcgctttgaagagtttctaattctgctttatatcctcgtgcctctttcacttgctcatcatacatcgcctgcaggcgagctacgttatcaccagaaagtttcttctgcttttctgcatactcatgatgagttttaatttcattagtcaatgcttcacgctgaacatcattaacctggatttgctgattgatttctcttatctgtgtcttgttcagtttgtccatatcagccaaaagagacacttcaagcaaatcttcaacgagctttcgtctattagcagttgataaccccatgaacggagtatatcctgccgttcctaatacgacaatttgcttaaatgatgtatatgacataccgatgagactttcaaagtaggattgaaaatcctttgaacttgcggcttcatcaagcttattgccatctcgtaaaatctcaaagacattcggtttttgtccacgtttaatgtagaaactatgaccgtcatactccatccacagttctactacagagtccttcttattgaatgagttaattaattggcctttcttaatatcacggaatggtttaccaaataaggcaaaagtaatagcttcgagcatagtacttttgccaccaccattcttacctgtgattaaggtcttttggcatttatcaagttgaatgtcaatggccgcttggccaactgacattatattcttatacttgacacgatttagtttaaaagtcttcactgattttgtgcctcaatgtataactgtttagacataacctttaaggctttgatatcatctgctgataggtcttcaagtgcttggatatattcttccattaaatccaataagcttttaacttctacttcttcgccatcttcagactcaaccgagttgtcaactttagaaacagttcttaattcatgtactaccttttcaagttctgattcaaacttaggaaggtcttcatcgaccgcagtgataataatgcgtactgcgagattacgaaactcttcaaagtcaatttttccagtaacaggataaatcagttttctgtgccaagtgatttcattagggacgaaatcaaaggttgataatttagtgtcttgaacccagaagccgcgtgggtcgttctcgtcacccgctgtaagcgtccaaggcgttccgatgtacttaacgtttgctgcgcttgatatggtgtggaagtgcccagaccatacttgtttgtactttttgaggaaatctggttccagcccatgagatttcattcctttataaaaataaaagccattaagctcccagtgaccaatacagtattcagcagacgattctttgatatgcttcatgatttctgatgtgttctcttcacacatccatggacacaagtcaatcaaagtcccatcaaaatccatagtcacgggcttttcaataacagtaatatgcttatacttaccaagaacttcggttgatgcattaggcgtcaacgtattcttgtagtgcatgtcatgatttccgacgatcgtaattaagttaattccttctttctcaagagactccgcaatttcacgagcgaattccattgtcttatgagtgatagctttacgaacgtcaaaaatatcaccgtattgaatgatagttttaattccatgctttttggcataatcaatatgctgcttaattccgtgtcgttgtacatcctgtacccacgggtcatctgcgcggacacctaaatgccaatcgcctgagtgaataattttcatataacctctctagtagagtttaattttatattattccatgaatagcaaaaagggcccgaaggcccattacttattttgtcattaactcaaattgttctttaaagcaatgctcagaatcttggtgttctaccaggaattcgtatgctttatttcgctctttatcatagagcttccggtcagatgacagatgtttcattcgttcaaagacttcatttttattttcatcattcaaccacagaatgccagaatcatgagaagtcaacggctttccatcaactcggaatttcaaagcatcaccggtggctttatggaacacgggaatagttccgcaagcacctagttctaagtgtgtgtattccagcgaacgctcaaggaatttatctggaagacgtgacagctgatagccaaatccagattgagacatacgctcaagcatttcagagttaacatatcggtcaagaacttgaggattcagacctggtccagttttaacctgatgataatgacggcaataatcaatttcatagcgttctttaatgttaataaacgcaggactgcgttctaacccttccaagatagtcgttttacctgcgggacgcagatgactttcatgaaagtcaaacatcaagaaatagcctttccacgtagtagtacgaccaatccaacgatggatatcaaagtcaatagcagagaagtctttccaatacttatcacgaattgctttgatgttcatagcaggttgaaagttataaactggaggagctgagtcagaatcatcaaagaaactcaacccgccacttggaaaatattcttccattaacacggtattaaaatcgccatttgagctatgactaaacagtacatcagcgcgtttaacggtttcttcaagaccagcatttctacgaagtgacaaggctctatggtcatgttgatatacgactacccgaacctcgggtttaatgttctctacgagcttcttatagttatcaatcgctgcttctggagcattgatagcaggtactgagttgatgataagaatgtcacatgcattaagcagagataaggtcttatcgtagtcatctgccagagacacaggaatagttacatctttatagctatgtgctctattacgagtaaacgctttatctttagcgtaaatgatatttacttcatggccatgttttactaaccactcacgatgctcgagactgaacttggttacgccgcatccctcaagtccgcgagccattaaaatattaatcttcatatattgacctttgttgttaattttggatattttaccattcccgtaataaagcaaaagggccgaagccctttaaattttcttgtatacaacataacccgccgcttcacatatacgcttagcttcttcaaagcgtctaagcatatctaccttggcattatgaattgcttcataatcgggagcaggtgcttctctcctagcggtatcacatttataacagaagtaactacgctttggtcctgtataacgttctgaacaattactgcaccggcacgtgtaatttccttccggccaatcatgtccaggattagaacccatcaaattcgtcatacatcccaattctcttcactagtaataaaatcagggtgttcatctaaatcaatgaatccccagttctcttcatttaccattcataccaccgtttaagttggaaggtgtcaacccagacaagagagttcttatctattagcttacatccttcggtagaacctaacacacgatattgattatctgctacttttactgccattgttccggtagcagtgttcaaagtaaatcccgcgtctttacgtatacgtttaaattttacttgtaccagcatttagaatgtcccaaacagttttacgagaggtattccagcaagtcagaataatctcatcattaaaaggttgttttaaaatagtacgcagtttttcaatagcatacttgtaagcagggaaattgttgtctaataccgcgtctccagcatgagctcgtaatcgctcaagttcacgacggtttttacgaacaactttgttggctcgagcaatagcttgttcttctgccgcttccattagtttctgctgcagttcgtcgcgctcttcctgggtaatattgttcatgttattcctttggatggtaatttatttcaaatgtgaattcagtatcagtccaattataactgtgttcaattatagcagaatctgacctgaaatcagcgtcatgtggatttttcgggtcaatgtgaatatcaaggtcaagcacctcccttaaatacatctttagcaaataagggatagcgtctaggtcttgcacatcttctaaaaacccgtcgaggttaatcttcagcctcatataaaaattccagattaggtccatcgcttgtaggttcgctctttttagcagaccctggcgccttataagcggtggattcatactgcgtcattttgtcgtagatgtcctgaataaaggtttcatctgctaacgcaaccatatcatcgtcccgtgaatcatacacgttgtggacaaaatagctgtatttctttgccatttctttacgttcttttttgatacgctgaacgaatgcattgaaacaagcttgggttatatacgcatgcgggttatcatacttagtttcatcgaagttgattaagcctttaattgcggcttcaatcccgtctgaaatcatttcttgcttccaggattgggtgtatcctgaaaagttgaaacgcttactcagaccttctgcgatcagcataatagcaaggccgatcgtatcgttctgttttactactcgaggaccgccagcagcttcagactcccggcacttctctttccacgcacagattgatttatacagttccttgttatttacataattactcatattgcctcttcgcttcaattaataatatctattataacaaatttgggaagcgagaggattaaagcattacttaatcaattcagcgcatgcaattaatttcatcatgatacgataaaaatcgttatacgtgaaatctggtggaacttcaattacgcattcaaaatcttcaaatacacgttccattccataaccagcgatatcatctgattcagcataccagtacgttccatcttgtgcaaaagttatttggctattttcaaggcagaacacgcctttaattttttcatgtgtaagagtcaattgaattttcatagttcacccttcataatacgatagcattggaacagctgttccatgatacgtttgaactcaaccaaactaagttcaaaccactcagattcatctacttcatgcatcatttccatgaatgaagagtataaactttcataatgagtttcatttaacatagaggcatgcgtttcccaatacataccctcttcattgtcaaaccaaacacccatataagaatctatagtaaatccgccaatgccttctactacaatcataatttggtttactttagccatgtcttcaccgagtcaatagcgtcttcaaatttagagaaagcatccacggatgtgtattcattctcaccagagcgttcataaatccaaaacgcgtcaaaatcttcttcaatgatgaattctccgttaggagtttcaatcgtgtttctgccatcaggcgttttagatataaaccatccaagaaaaccaacttctgcaatctgttcttcagtcatttaaaatttccaccaattgattatagtttaatgcttttccagaagaaatcataacattacaaaatctgtataatgcttcttttgatactttatacacataatcagaagttgttataatgtatgaaatacgtacaaatgttggggatttttctgccaattcatacgccagttttctagctctgccaatatcatcggcaaacttggtatcagcaagcaaaatactatcaaatacccaacggttagtaaaaatttctgtgtatagaataaccttacgcatcaagatactctcgcagttcctgctcgtttaacccttcttgccacatctctgacggagatggaagttggctgtctagagtggatgaatcaattggaaatactctgataattacgctagtatcttcatcccattgatttgcgagtatccgtttagcttgactaatgtcaggctcagaatgagcccggatatacttaatccttctatgccatacaccggtaggaatagatgcgcacacgatatatgaaatcattttgccgccttaaccgctttaacatcgcggaagcctttcttacgttgattcttcatcttacgaatagtgctttcagaaatttcaccgatacccggagtgattggttctacaccaaaggctttgatgccaaattcagacagaagataagcaaccactaattcacggatgcgggctttaccaattttttggccttcttctttcatcgtaccgtgaagctcaacttcccactgatcaagcaaagacggagttacacaacgtccttcttccagcattgcagatactttatcataagcaaaagagttcagtacgtttttgattgcttgggacatattaatttcctcagtaacgattgttttgacagaggagatttgatttaaaatctcctgtagcaaatcaatctttgtgagattttagctcttcgagcatatcatagtattctttactagcaaccggagctacagtgcagtggtagctattgaattcatggtatttcacgaagcgttctaggtgccacttaatcagattgttaattcggtgaagcagaaccccatctgaaccgacatagacaactacttcaaattgaagcccatcccaaattctggtacggacgatatcacctacagcaaaagttttcatgcgatgtaccaatgttcgttttgccaagactcacccttgtaccagcgagtcatatcatatccgttctcgtcacggatagcgccattacgcatatagaagtactcgtcatcagtaaaatactcatgctttactttacagcctttactcatagcttctagagcttcttgccaatttaaccaattcatattttcctctcgagttaaacggtatgctgttatccgttgatagagctatagtatcactcatcaactggcttgtaaacaactttgtgaaaggagtttagaataaaagagaggtcccataggaacctctaaatgaagggtatagaaatatacagaaggtggtcaagatgaccttagaaaggaactggttaatcttctatgatatctggatcgtatccagcagcaataagattggctttaaatgttggaatgtcatactgcttaacgttatccataaaaatgacaggataccgaatagcaagcgatggatagcacccgatgcgtttagcaagtgactcaatcaacggacggtcataaaccggctgaccgtcaacctcgttgattacattatagaactcatatggaagttgcagcttatcgagcaagtcacgaactgctttacatccagggcatctccaaacttcttcagggatgccatagatttctatcatagttcagccttaatctcagaaatcaatctttcaattaattcaagcttatcagctgtagtcataggataaattttgtcaacagtggcttcttcaagatagcaacggtcagcatcgttaagtatacaccactggtcaaaatcatcagcatctatgctaacgccgttgaaggtcttaactcgttcaacagacccgtcctgcgtcagagctgttaccaaaaatggtttaaacttaagcatgttgtagaattcaacatcctttgacgatgcgttatttaaccatttatcaacagagtcgtctttaaacttgtaccacttatcacaacaaaacaattctatcatttcatgacctgttgaagtttggcagtcagagtattaacacgcttctgaaattcttcattagacagtttttcatctttcttggtaggattaatccaatctgcgatgataataagaacaataaacggaattgctacgaaagcacctgccgttaatgcaaccaaagcgataacgttagaaataaatttacgaatagcattaatgaatttcataattttccttaaatagttaagatgaatgctgtcatagccagaaattctggtccaaacagttcagtagccatgtggttcagagtaaacataattttgtaagtcagcatatctatttcctcaatcgtgtgtccaggtagaaccatttcttacccagagtctttggttgtcagaaccacgccagtttttagtagttggcagtgatttctcgtatttcccatcaattataacatcgatgtgttgtagcaaatctaaatctttgatatcttcaaatttatatcctgtccacatccagatatctttctccggaaatcttgctttaacccaagaaactaaatttgaaatctcttcccggttctgtggataaagcgggtctccaccagttaaggtaagaccttggatatacgatttgcttaaatgggatgcaagttctttaacagtattcatagtgaataactggccgtttctagcattccaagtagatttattataacacccttcgcatttatgcaaacagccagtaacaaaaagaacagttctgcatcctggcccattcacaaagtcagaagggtagattctgtcgaaattcattgaatcttacctcattacgtgcttctacttctgcatcatatttccagggctcattagtttgaatagccccagccgatagtccactttcagggtcacgggttatagcaattcccaacggatgcagaacctctttgttgattttccaaatcaatccccactcgctaagttggttccaatcaacttgcttcattggtttctctaacatgttttaccctatgcataatttctttgttcttaccaagattaaacccacgctcagaaggattaccaagatagccacaagtcctacgaattgtattcattttctttggatcagtttcaccacaaattgaacatgtgaatccgttttcagtaggtgtcatctcatgggtagaaccacaagaaagacacttatctactggcatattaacaccaaaataatccaacttctcgatagcatagtcccataccgcttcaagaccttcaaggttgcgcttcatatcaggcagttcaacataagaaatatgaccacctttagcaatggaatgatatggtgcttcacggtcaattttttcaaaaggcgacaggttttcttctactgacacatggaaactattagtgtaccagcctttatcagttacgcccttaacatcaccaaacttggcttggtcaatcttacagaaacgatagcacagactttcagccggagttgagtacagactaaaggcatagccggtttcttccgtccacttgtttagcttagtgttgatgtacttcaggacgagtttaccgcttcctttaaaagtaagcatatcaaattcatggatgccaatgtatcctaatgaaattgaactacgtccatttttgaatagttcaagaatttcatcatcaggtttcatacgcacaccaaaagcaccttcctggtaaagaataggagcaaccgatgcagtaacaccttcaagggatttaattctagttaaaagggcttctttacaaatatcaaggcgttcatccagtagtttgaacagtttattactgtcatccgaacttttataatttgcatccagagctatcctagggaggttcagtgttactacccctaggttattacggccatcaagaacgggtttgccagaagagtctctccaagcaccaaggaaacttctacaccccatcggagatacaggagtttctgaacttgtaattgctctattgtttcgagcactgatgatatcaggatacatgcgtttagctgcacattctaatgcaagctgcttaatatcatagttagggtcttctttgcgtagattaatgccttcttctacaaacatcacaagctttggaaaaattggagtaattccatcacgtcctaatccacgaatacgattatcaagaatagctcgttgaattaatttttcttcccatgacgttcccataccaaatgtgatagtcacaaatggagtttggccatttgaactgaacaaagtattcacttcatattcatacgcctggaaagcatcaaacacgtctttttctgtttttgaaatagcataatcttttactaatgctacctgatatttgcgagcatcacgcacatgtttagcaaatgtcttctctacataaggagccagaactaaatcaacattagcaaaggtagttccaccatattggtgagatgctacttgtgcagtgatttgcgccatgatagcagtagctactccaatactcttaggagtttcaatttgagcgttaccaagtttaaagccattctgcaacatacccttcaaatctaccaaacagcagttggtgaaaggcaaagctggactgtagtccatatcatgaaaatggataacaccttctttgtgtgcttccattacagagaaaggaatgacctgattggcgatatgtttagatacgataccagccatcaggtcacgttgggtaggaaaaacacgagaatctttgttagcattctcgtttaaaaggtccttgttggttttattaataagtccctggatttctaattcgatattcattttaaactcttacgaagctgcttcttgtattttgaagcaagttgtgattttccatcactttcctcgtatgtaaacccatgcaattccatttcagcaatcatctcaggcttaccaagacgtgaaaagcgtttagccatgtcggcaacatattgcgggtgaatattactgtctttacgattctggcggagatagaccagcaaattctctaaccattcgaggtagtcaatatcttgaccttttaaaccagagcggttgaacttatgcttcatttggccttctgccgcattacacaggttacagagcaagcctctgacctttcctgcattgtcaccttctaacgcatggtcatggtcgaggtggttcttttgaatatcctcatctaaaggacgtttgcagcaaggacataatccgttctgtgcctgatatagtttttctttttcttctttatataacttaccggttaataacatactcttacctcagcgattagataagagtatttatagctaaattaacgagtaactaccatacatatttttagatgattctttaacgcagtacgaagtacagaatgcaaaaattccagtgatattatctgtatgataactatagacttcgttgctattcgcatctacaagtttgacgcttttccatgccattccatcaatttcatcttcataataaccatctgaaaattcaatgatatctccaactttaattccatggtctttaaagatgcttttaatctggcgatgcaactcagacaggtctaggagtttaaccttaattgatttagaaatgcaagtattagacatgattaactccaaggcgctgttcaagggcgacgatgtaatccgcggctttttgcattaaagcatactcttctgaatcacaattttcctgtccagcaaatgcgtaaagagctctggtaattggaacgattgcaccttggaaatgattaagtttaatttcagaaatcagaggaacatcttcaccttgaccaatttctttaatttggtgcatcgtatcttcactgtagaagcaccagaaccaggattcgccgaatggcgttgggtctttgactgtgatgattttatttgtcagtaaatcaataactgcagtgattcctaccagttcaaggtcgtcttcattaactacagaaatgacttggaacttaaatcccggaatgaacataggaaattgttcgctcagttcatcatcattctcaataacttcaaactgcttaccaataagtcccattcactttgtcctcataatcaagtagttcgtttatggtaggttcagaagtattataatcttcttcaggaatagcatcttcctctggctcgacagtttcccaacgagccgcataccagggttttagacctttgctactttgcatggtgttggttcagaatcattagcagaatcatgttcaatacgccattcaacttcagtacgagtaaccactttttcatggcgagaaacgatatctacttcaggaggactataataccaatcagtatgatatgaacctgaacgagattctgataccatgaaatgaacgccacgcgctggataataccaaatttgagtacggtcttgatacttgtgctcttgtgtccaatctccatcttctactaaaacaaagatttcttctgcatcatcgtctggtgcattaggcggatattcgaaatcgtagttgtcgtcccaaccaccagtgacgccagcgatatgcttgatttcttttactaattcagcgttagtcattttaacctcgcagcttctgtaagtcttcatcatcaatccagctttctaaaccggatggaagcgaacattcaatttcccacagcaattcttcaattgcttgcaggcggatgaactcttctgctgaaattgttaccatgcacggagcttttaaatcaccaatatcataactcatagttcttcctcatgctaatcataacttaaccatgcattcgccatatttccatttagacataactttagctccattagagtaagttacctctacctttgctcggtgattcttgatttgtttaatctcaccggtttctaatccgccatagccataataaagggctacaatatcaccctcccgaaggagggttccacgataatcatgcattgaatttgaatttacggagttcatcaaaaccgccgatatgtgtaccgtcaggagcaaaaatctgaggcatagttaatccaacctgtgattcacgacctaaacggcgaagcaaatcactgataactacttcatcaaatacacctttttctggcattacgttgatgaatgcatattcttgtttcttaacatcgagcagacgctttgcattatcgcaaaatacacacttatgaatgctgctgtcgtaaccaaaaaccgtgaacatcttcttctatttccttaaatacttgagcttgaacttggttccaactcgggtggttatacgctttatagacgttagtcattccaagacgcttagtgacttcgccatcaattgcagcttgggcaaaatttcttccacgggtcatagctcctttgagattggaactgttagcaatttgaccagtctcattataataaaccgaatacatgagtagcattactcgttcggcttcttccatatatcgtttacgagccatttccagccttagtagttataactaatgttttaccatctaacgcgtcgagaatatctttgatgcaattatctggcattggttgaacgctagctaattgcttggcaatatcatcaggaattcccatacgtggcacttttagtttgctgaaatcaattttatccattagcagttaccgggaagtgttctgccaatttagcagcaatggcagcgttaatttgatcagcgaaatttttattcattgcattaacaatgatttcttgaattcggagattagctctttcaatagacatcttaatacgaccttcagcttgcttaacagcgtcatcaatagtttgacgaaccatttcatcaatagcttctttagcactggcttgagcagcgtttcgcatcttctgagacatttcaggtttagcggatgtatcattccaaccacgcgaatggaataattcattgagttgcttacggacttctgctcgtacatcaggaacatcaatagcagcaatagcaatttcggattgtactgcttgcttcagcttgttctgggaatcttttaacaccatttctttaacgatgttattgattaccgattgctgcagttgagcacgggctgttgtaccttctgggaataactggcgtactgcataagtatctaatttaatgtcaatcattttacctttttcactccaggaatattagagatagtttcaaatacttcgtcaaagttatctttatcaacagtgactaccatagtgcgagcggtctgtttctttttccaacgtttaaagaaagttgcaagactcaaatcatgggaagtgaaaaaatcatcggttttgtaaacatatccgctttcaatttttactaccgcatcaggcgaagggtcttcatattcttctacttcaacatcatcaaagagtattaaagtgtcatcatgataatagccttcccagaaggcttcatcgttataaaattctttccaaagcgcgccagtggttttcatttaatcaccttcttccaagcttcgtgagcagcacacgctaatacttcatcatcagtcaaattgaacttgccttcattacgacgagcaatcatttcattgaattcagtatcagttctaagcatcatgttaagaactgtaaaatccattgtcgctcgaagatattctttaagctgcatagggtcgatgccactttcgtatgcgtcaagaatcatatctgcaatgatgttatcaaagtttttgtcttttatgaggttattagcatactcaacaaaaaacttagtattagcaccagtaatagttttagtaatcattttaattttctctcaaatttatgcttacaagtccgacatttcattttcagaatatcggttgtccaatcgacaagctgtacttgaatactaccacatttttcacaaggcacaacttgtttagctgcagcttctcgacggtctaccatttcaagacaggcatcccagtcaattttaaattcaggtacaggtggatactcaaactcaatttcaaggtcgttatcatcaacgaccatgtcttcttttaattgatttttcacagtaagctccgggcatactcgagagattcataccgctctttgtactcattaagcgatttaaccaaatctgccatagctaattcatgtttagccaattcagcttctttggtatcaataaaccgcttaaccgattccatttcggcagtaatactattcttagcagtttcaatatgatttactggtgttaacggaagaggcttaacaacattgagatacatatgtgctacatcttcatcaataactggggtggtgctcaatgttttgggaaaaatcttaaatgggtccaaatgcacttcaagaacagatgagttttcaccttgctgtttacagcatgattttttaactacatccatatgctctaatgcagtacgaacctgcgctaaaagcgcccgagccggatactttccgctggacaaatggctattaatatgaattcgtacagttacattgtcaagttcttcggcacgaataaatgaaacacccttaggatttctagaactagtagaagatacctggtatttcacacgctcatcgcctttaagtaagcaaattgaacgattaagaatacgacgcagatttgcattaaattcagagcagaagatttgagcagcgctaaggtcatgtctttcttcagttttaaacgcccctgccgcaaagctataacgctgaccgtaaattttagcattgccgatagcaaactttttgagctgtttctctgctgacattgcacctaaccagcgagaacgacgaatgttttctacaacaaaaccagcataattggcttcatgtgctgccatgctatttagcacacgccgagctacattaccagcaattgctacgttataagcagctggatttaaatcatgtaaagctgccaaaacctttacgtgcttctcacgttttgacaacccctttccattatgtttatcaaattcaccggctacaaacatctttaattcattcttattcattatcttttcctctattttggactgggctcaaagagtatctcaaaatctccctgaacccattatacaacaattattcctcaagcattataactttgcttgggcgcttatagaaagcatgagttttatcatctttagctaattcaaatgtagcagtaaactgtactttgcctctgtattcaaacggaatactttttggaagggatccgtaaaccgtagctccattctcaagtacaaccatcatcttacattgtacgccgtaatagtcttcataaacttttactgacgttacggtaccagagacagtcactcgtccttccggtgcatcccctttattcttattcagctcattgaatatattatcaaagacctcttttgaatgttcctggatagcctctaagatgctcttatgagctctaacttctgccataacaacatctgtgccatcttgcaatttccactctttatacggaatgcgtacttcaagaggataaccatactcccgaagttctttgtactcttcttgagttaagcggattttccaccagccgtggtcaccggtatactcaggcttatccagtgaatccaattctgtaacatacggcaagtaactgcctgcgtgataagcttcaacttcacctaattcattctcccaaagatagccatcaaagggagcatgaggacgatcgtctttgccccaagtaggagctaccactttatcaaagtattcacgaccgaagcgggtcttcgcccatccagcattcaactcctcggcgcgtttttcaactttcgctcggtgtgcttggcgggctacacgattttcttcaacaagtgcagagataatctcggttaaagttttcattttattctccagtttggttgacgagaccatcttatcaacagcctcgccgaaagtaaactactttgtgaaaaattttctccaaagcagaactgcgtctctacgagatacttctactgctcctagagcaactgcttgcttgcgacgaacatcgcgcaaatcatagtgtggaactcgcttatcctggaaccaagaacgtttcattccgatggcttctgccatagcgtgcaactcatcaaggttgtcgctaaacatatgacaattctttacttgatgacctctcattttccaaccatgattcatcaagacatctacgtataccgtcatttctgattctcgatgtaagtttcaatgatgaactgtgctaaacacagaagattatcttctgaaggagaatctactaaattctcaaccatttcagaaatagttccaaaagcttcttcagtattgaacatttcttgaagttcgttccaagtaggtgctttcatttcaatctcctcattagttaacgaagctatcttatcatggattttctaagatgtaaacaacaaaagggcccgaaggcccttaaaaagatcggaaatcactgttaaaccatggcgactggtgttgtcgccgcttaagcaatttcagttggtatttcctattgtcttctataatcatcttagaggcttttagctcttcagccaatgagacctgtttacggtccatcaagatgaggttctgggtcttctgggcaaacgtctgaatacctttgagacattccacagattcctccatccctcgtttatacttggttcgggcagcatttaactgcccttcgtaatacgcatgtatagacactatagtactaaacaccttttacctcaataacatctaagataatatcttcaacgtcttgctcagggaatgccacgccattggtctgcccatgctgaaatactgcttggtacgctgacggcgcagaaattcgggttgaacgttctttattgtcatagcatttgccatcaataaagcgtttaaatttaacttcataagtttttaacattattacaccttagcataattgacgatttgttcacgatcagcgggccaatttaaatcagaacgtttcttgtttgaccatgcaatattttcttcagcccaatgaagtttagccgatacgctcttttgtacgtctctgatggcttcttcaagataaatgcctaaatctctcgggttagttccttgagttttaaatgcattgagcaaaatatttcttacgacttctttaaattgattttcaacttccgggtgaataaattcacgataaccgttgcacggatatccaaaagcatctaccatacgagtagtactaaattctttgttcataatccgagcgcctcgcgttcatcaggatttaatttcgccaaagcggcttctttaattttttccaaccgtttacgcttagcttcaggtgtttcttcctggacggtgatagcagcctttttagggaatgtccatgattcgccattttcatcggtgaatgtaattagttccgttggcttacgattaactgtaccatctgagccccaccaagactgccccttaactgcttcttcggcaacgcaatatgaaccataataaccaaacaactcactacggcgatcgtctggtgaaacatacgctgcataggcttcactttctgtcattacccatttcattttagcacctcataacgaataagttcaatacgatttttaagctcttggtatgatttacgccaaggcttataataagcatttaaatcttggtgctgtttatgcatttcgtctaaatgctttactgcatcttgtacattcacaaggaaagtatcaaatactttattagcgtattctttcctgagttcaatgaatggaggagcacgaaatacgtttaccattacacgtagttcatgataagaagaatggacttcagctaatacatttttcttatcgccaaaattaaacttataaagtttttcacagattgcttcacaggctttctctgctttacccttgggtttacccgcaaagatatgaccaggcggatatactttaatatcgtttaaccaacattcaatgtctttaatagctgctaaactcattgtacccacgctccgttttcatcaatgtaattaatccactcgttaatagtccaggaagaggtatcacctttaggagtatcaacgatatacattccgcctttaaacaaaacacgttttacatcattagaaattaaagtagccattatattttcctcagttagggaggatttctcctcccgtttaaattatttcagcattgttacttcagcaatttcacgccagtttttacggtcagtcgcgacgaaatcaccaatataaagagcagtacggagagacacgttacgcagacgatttacgttatctttcataaattccaaaacttcaataacttcggaatttcttaacccacggttctgtaacatagaagtagtcattattacatcttgaactcggaccataatctcttcattagtgtgaacaccaaggtcaagataaaccgaacgtgataccaaggcttgaagatgtggagcaagtttagaaccgcgctctaattcacggtcaatatcaacgttagtgataaagaccacagtaccttcaaactcaaactcattaggaattcctttatcctccaagaaagaagatgcagtgctccagcatactttacgtttctcccctgaatccaaagcagctttcagaaggttaagaatgtccatatcagagaatacatctacatcatcaatgagcagaactgaatttgcttcacgtgattcccaaagacggcagtataaaccaattcctgagattttaccgttcactgatttgtaatcaatagcgttagtatcatgagcatgttgtaatgctttatccaaagagtaagtcttaccgatacctgctgctccggagataatcagagaacgaatgttcccgtggattaaaccgttagtcattaatcccatgacgttaaagcgtttcttgatacgctctttcatttcatcaacggattcaacaacttcaattttagcagctactccatcaattgtgatatcatctttgaatacccaaacaccacgctttttgccattcagttcaacaaagactttaccatcaccctggcgagaatcttcagcacttaagctatccgggaaccactcaccgagtaactcgtaagtacctgaaatctctttgccgaagtaaatccctttcttgatggtgatagttgacattttattctccgttactctgttttgttttgatggagctatagtatcaccagctcgcgagcttgtaaactacttttttcattcttttgaaacaaaaagaggagcccgaaggctcctcagttatgcatgcttattgatagcattttctgctatacgttttggaagtttacctgcccagcggaagaacatgataatcgctccggcaataaacgcagggaaccaaaagatgagataaaaccaatactctcctgctttctcgatggttccatttttgattagatgcttacagacagaccaacccacgacaaagtaaattattgcaacaacgattggcactactacgctccacagtaaaatcatatttcagcccagtaaagtgagaaccggagagtttctccggcccatgacataaaacgatgtacttgtttttgagtaggtcgagcagagaatttagcattctctctacgaccagtctctctacaaactgcttccaaataccaccgtctacctttatgaggtcttccgtaattcaagaagaccttcattgtatcatttgtagtaagaattgtggttttcaagataaaccttctcgacgaaatcgtcccagaacttcatgtctactttcttaggcattccattcttttcggcttgatgagcaagacgctctactgcatcaacggtcgtttccaaaatatcctgaacttctttgaacggtaactcgcccgctttgattttcttaatcaggggagcctgtgccagaggatatttaaggtcaccggcagaatagatttcctgcagctgaagaccaccacgaagggcatgactcagcgctttccaatctacgccttcgttagcttctgccttacgagcgcgttcaccatattcagcatcaagcttctcaagggagtacttcatttctttaaccgtgatagttgtctggaatttacgacccaacacattatagaaatactgctgacctgatttatggtctgtaaaggtggtccactcaaggaattcacctaccggaagacgatcggcgatatccttaactttccaacgctcgttaatgcctttctgcttgggacgatcgtcatatttccattcaggaacatctctgataacatccaggactttatgcaaatcggctaaacgagaacccttaacgccatacttacctgcttgcttacggacatatccaagataagccttcatgtcagtggtatagaaacgagctcggttgtcttgaataaatttccatacttcaggaaggtcagatgcaactaccaattccggcggagtatgcagcatatccaacgcgacagtttcaccgtcagcagcgagtttgaagaaatactttaagctgaacagctcatggtcaatgtcatctttggtatttttggttgcgctgttgttagtattacgattggtgtgattcatcgcctgacacattagaatatcacgcggatgaggaacaaagatttctttgaaatccacatctgattcaggagttgaagtaccgtatagatgcgaaccaaaataagattttacgattgttttcataagtaaatatgattccctttagcgaatttaactaatgcattagaacgtttgacggcttcttctgctcgagttttatcagtagttctttttgatgtacggtaaacattaccaattttttgactagtgtaataatacactacttcatgtgtatggtactcttgtccatcaggatgctgttcacgacaggtttcttcacgcagtgtggtttcatacataggaactaatgcccaatcaattcctgtgctaatgattgccacctgaatgtcaagtctgttccagcgaaatgcattgatatatcctaggacccgtgattccgggtccatcattgcgaatttaatgttttcggctgaagctagcggcatttgttttacaatactcatactaagttttttcttagtagttacgatttcaatttccataccccgccttcataatatatgtctaaatcaatattatctttgccgctgtacttgccagtcaaaggaataaatttaacagtaatcttttcgccgtcatcaaaagtaaattcagcaataggatatgtagaaattataccacgttcggttttagcacgaaagacggcccgaaggccgttcacgatataaacttgatcattcttcactaggttcacctactgtaatatctagcattgatttaacaagcgagatgtcatttgtactaaacacgtgagcttttcctttatcgttctggcaaaacatgcttccatctgctgcaattgctagtacttcatagcagttattagttgtagagaatttatcacccactacaagaggaacattaactttacacttctcataaacggtgtatttaaggctgctgagattaattaccgacttagaactacccggtaaaagtttgcagatataaaatccatcgtctgctgattcatttaggtaatcatcgatatacattccacggtagccgtcttttggatatactacagtagttgtttctcggctgctatggtcgtaatatactacgattttggtgtctttacttttaaagaaaatcgatactgtatgcgctgagctacatttgaacgtagaaataaattcaacttcaagctcaagccgattactttgattgtcaaagccaatttctactttatcacctacctttaacggcttttcaacaaggctttcttcaaatttcgtgcgaataaaacatttcatttatcaccttctacataatcaatcattgggcagactttccgcttacgagcttttaaatactggacgaataccgacggttcagcttctgccggaagaccagcttttacccgagcgagtttcttggtatactttttctggatacggtaatgtttaaatttttctaaaccaaaaataaatccaaaagctatagctgcaaacaaaagcacaaatgctgctataaccgctgcgccaactggtactgctacaacgtttaaccaaaacgcggataaactaatacctatccaagagagaattcctgtctctgccacaatcggccaaccgaacatccatgcaacagaaccgatgaacgtgataatcgccgaagaaaacacaacatgaagaactgtcgtccagaagtatccacatagagtttttggcattttccacatgttgtcagatttaaaccacaggttcattttgaaatgccaagagtttttattaatattcattatcagtccttcatagtcggaatcatagttacaagatattttacgagctgttcagcatcggatttatcaatcatcaagatagtaccgttgcgctcaatttcaataagtgtagaaccgtatagctctacggtagtcagatgcaaatcattaatgtatggactttcgtcctcaattactgcatcgcctttacgggattttccgtcccatactaatttactcgccatcttttgcctctatcaagaattgaattaatgaatcaatttgtttagtatcaagatgaattatatcattgccttgttttagcacgatacgactcaactttttagtgaaatatgaattcacaacctttacatgcacatcgctgtacggattatctaaattggtactatcaagaatactttccataattacctcaattgtgaatcttttgaaccacgacggttataagcagaagtcattactgtatcccactttccttggcattctacacaccgttgacagcctttaaccaacagacgacgagctactggaatttcctcatcacagtcaacacaaaactcttcggattcgcgctgttcttgaagctgtttctgaagacgagcccattcaatcccatctgctatagttgcttctcgagtggcgaatccgtcatcagacggaccccagccattcatttcaaactctccaaaatcatgtgtaccaaattatacgtgaacattggatactgatattgcaccatgatatagatgataagtaaaaggtttctcatttttagtcatcatcaaagtcgtagtaatcgtaatcgcaggaatcaagataagaatccgcaaattctttctgtcgacgaaaatcttcaataggagtcaatctgtctgcatacgcttggtcatctgggtcactgaacttgtcttcctgaagttctttaatgaactgttcagcttcttcacgcgtccaaaacccacgattaagattatgaaccgaacgcttttcacctggcttgaatacgcccatatcatgtgcagaccgctcagttgaatagctttcagtttggccagcatagttttcatattcacaaatcaccttgaagaaaggagattttcgcgaatacacaccacgaagaccaagttctacatcatacgtgcctgatgcaacaatgtaacgcgttatttcgccgcttttagtttctgtgcgattaacaccacacacgtgataaaagatttttccaggttgaagctcagtggttaacttaatcataatgtttttctcgtttggttgttgatatgtctatagtatcatgtaatgaagggaagtaaacaactttttgaaaagaaaatgcctccctaaggaggcggagggtattactgcaatgataacaaatacttagtcttgtagcatagacctgtaatgtcatccagaacactttggagggcggcaggaacggacttgtagataccatcggccttaaccagaatgaagtctagcatttcaatggtgtcctttggcagctctttctgcgatggtaaagccggtgtataactcttacctgagaatcctaaccactgctcaccaaaagcatctatcaaatctggaatctcgttaaagaaaacttcatacgctttatgcctggcatacgatttggtatcaaaatgcgctgaatgaaaatacgcttgagacaccataagtaaaccgatgaattcatcttgcggagtaagtttaccgtcctttacaaaatcattgaacttcattatcgagttgtatcctcatgcggttagcatattcttcacctgctgaacgtcctaaagaatcgcaatctttagaacaagactcactattccatttactttgtataaaagaatagaactgttcagactcttgcttactaggctctttaaatttagcataaacttgtagagctccctcaacatacgaattataatctgaaatgtcgtcgtgtgatgcagctgggaatgaaatcccgcagcccaacaccagggctaagcaaatgtgattaaaggccatacggcctcctattatttttgtccagtattacgtttgtgctgaagtacagccttaactgcatcgaggtatctttcgtgagaacgcatacgcttatagtccgcttcagaatcagtttctttataagaaatacgaagtgctgaaataatatgcccaacctcaagtcgaatttcgtctaattgagaaatggtcaaattacggagttgcttatgtgacaaatgcttcatatacacctcatcagttagtaatagtatttatataagtatgtgttacttaatcccaaagccattcgcagatgccttgctcaatagttctagcacctgcttcgtcccagttatattcttcatcatacttcaatgcacgtttaatttcggctttatgaaataaacgcggaaccggcattgcatagcgcgtccagcgcagagttttccagaatccatcacgctttgatttagcgatcagtttcttggcctctaacggtctttccttgttttgttccattttattatcataatattcttgagcattcttcatacttttgtatggctcaggaagataatgaattccaaaataaacgttattattctgatcattccatttggaagattttactacatgccagcctttacggcgaattgttctagacattattacctcgttaagttaaattacctcaacgatagtaaaatcctgatttgaaaaatttaatattcatgaatagatgaccttacatttacattttggacattcaggttctttggttttaagacgcttggtagccgtctttggagcagtgttgtaatcatatacatgaagacaacggtagcacatcacatattttttcatattaaaccaataacgaaagcaatattacgtatagtaagaatccaactacgaatcctagtactataccacccgctatagcaaataagctactcatgtttaatataacacccattcgtattagcaataaagtctttgccctgtgccaatactttacattcggaattaagacgattttgaagttcttctcgtctatcgctttgcacagacgctgctgcagcaatccaaatgaatagcatacctacgattagcatcaggatagtgttatacgttcttggcttcattataaacaccaattaattcaaaccaatgctttcgacaaagagaaacatacttatcttcaccaccaagctctactacttcaccgtctgtaatggcatttccgttttcatcaatacgagcaaccatagtagctttacggccgcaatggcaaacccccttaagctcgaccagtttatcagccacggccaaaagtgctttagagccttcgaataactctccacgaaaatcagtgcgaagaccatacgccattaccggaacatcgtacaggtcaacaattttgcacagctgaacaacatgctcggtagtcaagaattgggcttcatcaacgaaaacacaatgaatatcacgctgtgtttgtgcccacttgaaaaactcaaggatatcaatagattcgtctactgtattagcttcatgacgaagaccaatacgtgatgttacctcggtggcagaatctcgagtatcaatagcaggtttaagaatgagagttcccattcctcgctctttatagttatgagctgctgtaagaaggttagctgatttgcctgcgttcatactcgcgtaattgaaataaagctgagccattaaagggtctccataaaatcagaaatagctttcttagagcgaatgagttcatcgtattcttcgggtaggccatttccgtaaatggcactaatagctactacttgctcagcacctgcataatcgtcaatcaactgccacagtttagttttttgctcttcagtaatcatctatttacctctaacaagacggatttagcttttagcttcttcatattctaccaccataatgtcaatatcaggtgttgctaaattgattaatttctcaattagttcccaatcgccgccagcaataccagctccaatttttggaatgtatagaggacgattataaacaatacgaccagaatttagttcatggaatgcattaaaaattgcgccgtaatcaacatttggacctggagcatactgagtatacaaattatagcaatatgcagtgccattcttgtggatagctcgtgtatgagttccaagcttagctaaattgttgtcataataacggtcttcatcgatgtcaatatcgagaattggaggatatgctttagcaagctgccctgctacgccggcacccattgtagtaaagcaattacatccatgagcaatatcgcattcatgcttcatgaataactctacaatattacccttgatatatccagtaatcatttattcacctacggaattttataagttgcatattcattaagattattgtatactcttaaaaatatagcattgttacagttaaggatagggtttaacacgccttgttctttagggtgcattactccgtcaatagaaacgccatcgctctgcattccacatccacgagcattatattcgacaagtggaactatcacctggtcatctttatcttgataattataaaatgacattagcaattttctactgctaggaacaaatgctatttcaatgttattcttgaatgggccattactttctattttagtcccctgcgctgcaagcacagtttcaggatagcctgggagcttttcccaggcattaactgaaaatgcgcagcataataaaatagctgcttttttcattttgacgatagtcctgacatataacgagccattaattggtcacgatacattaaacatatattttcgttaggagcattgacacataaatctttcatgctcttagccttacgatttattagtgttgtccattgggccgggctacgtgaatcttttactccatcgctgaatgctgaatctaattcaagcgctaatatatcaacacattcagagttcgtattgcaaaatgttttagcgatacgaagtgaatctgtcattgaattttcagcattagcagagaatgccaataccaatccaagaagcgcggcgtactttaccattattccacctttgtatgtagcattttatgtttctttaagaaattagctttctctaggacatctgacgcataagagtttccccttttgacattccatcctgcattataactagcaagagcttttcgcatattgccgttatgtatatttaaccaatatgaaagctcaatatatgcccattccgcggaattctgtctagatttaagcatttttcttatttcagaatcactaaggtttttgccttctaatttagctctggctttaaccgtaggcaagtaattttgaaataccccataagaatgatgcccctttcctgcttttaaattggctcctgccgaagattctttccatgatatagcagccattatatatcctaagccgttattatcatatcggttatgcggagatttttcctttccggatttttgatattgttcaccaaaattatatgcgtaatgcaagttgtcaagttgaacattactgaaagttggctcagacccaaaggccgttgaacataaggccattagaccgataagcgcttttttcatgtttacctcaattaatgtgtataacttttgtgctgattttacctttcaaacgtttatcattaacgaatgccatacgacactttatactaggtccttttcccggtcttggaatatccatagtaaaccctagccacagatttccatccgtaatttctaaccgcattggcttatactcgatgttttcatcaatgtcttttgggtcaattggaagccaaggcattgctaagaattcattaatttctttaagatgattaggaattttggaaagaacagagaatacatactcttcatcaatttcacgttggatagcacggtccaacaaatgatcagagtacttagtgaagaaaggctctttgccctcagccttagctcgggcacgaactgataaattcaaagagcgaaatgcttcctcaaacttacggcgcagtttagttctgcgaatgaatacttctgggttagttgacatagttcattctcctttgtgtgtagggccatagtatcatggcccgtaaggaaagtaaactactttttaatatttttcttctggacagaacacggcacggcaagcccacatagaagcttccttcagtttctgttttgctgtacgaatctgggcaatacgctcgtatgcttcatcgagtacctgcttaggttcattgactgacacttggtaattaattaatgcctcttcttcaagagcagtaaagataagaccaagacgagtctcagcgtctttgatagcattaactttaccaattttttcattggtatgtggcttgtatcctttaatatcttcgattgacattatagtgcctctgtgaaagtacgagcgataacgtcgcgctgttgttccggcgtcagggagttgaagcgcaccgcgtagccagaaacacgaatggtcagctgcggatatttttccggatgttcaaccgcgtccagcagagtttcgcgacgcagcacgttaacgttcaggtgctgaccgccttcaatttttaccgttggctggtattcaatttctacttcacgcgccttgtagccataaaaagtttcagcatccgtaatagtatcttctttaagaacttttgaaacgattactcgtgcgtcatcaccatcttcgatgtaaatggtgcctttaagttcaccttcaagaatttgatatgctttcatatttcctcttaattagattctttattccaaccgcgcatgtatgcggtaattacgtccatagtattccactcagtagaatggaacttggatgcagcctgtaagtacgagattttaccttctggcattaattttacccgtgctaaacgttcagaaatagcagcgtctttccatgtagcaaaacccgttggtccttttaattcttctttaagacgaataacttctgcttctaattcagattctcgccataagcgttctctggcatcattagcataaagtatttcttcatcagtctctttatcatattcgacgatttcgataggttcgttcacaccataaccacgggtgccaatatacgtagtagcttcttcccatttctgtgtggtttcgttccaagttccattctgatgagcttcataaaaatcttgctcaccagaattactgaaccattcacagaagctctcaactaagtgtggaggacaccttataacaatttctgccattgcactgttttctcttgaatgcgttggtcatatgtgattaagcttgaactaatcacgcctttgagcttgccagatataaactcaattctaaaattaggatagcgattcatccacttcgtgttaggagcattagaaatgaattctgcgcctttaaacggaccagacagaaacttgtagcgcttgtactcaagcaggttgccagccgtaaccattgttattaattgcttcatatcggcaaaccctgtattttccattactgtaatcatatcaacaatttctgtctgtgtcatcattgcattcctatcacgaaaaataaaggtaaagtatcactaggcatagaccatctgatagcttcctggtacatatcatagaacttcatcatatcgggaactttcattggttcttcaatgataattaatgctcttccaaactttcttcctctaaacttataagaggaatcattggatagaaattccctgattgtcatcggaacaattgatttagctatctcgttagccggtaatttattaattaaatgcgatgaattatattctcgtagaataccttccatcaattcagatgattgtgtgtatcgagtagataagattataaccgaaccatcttcaagcaaccaatcggtagcgaattggcacaaggctgtggtctttccggtttgtcttccaccgtctagacgaagggtaccgtactctcgcataaggcaagacggttcataaaaactgtagttgggattattcaatcgtctgtctgcagcgtctctaaaagcatgcatcagggtcaaataaatgggagttaagtgtttcattttagattccagttaaagggccattccttggcgcgtgcttagtcctagtaatattcttaataggtatagacaataaggtctaaacgtattcacggcctcccttaagggtattcattcgtactttggcttgagggccgtcatggcttaaatcataagcacgcattacaccccaagactttttaattttagccaaagaacctttagatacagtaataataaaattatcactgcctttggtccattcaactgaatctacttgcacgccttccttacgaagatttgacacaatagcatcgacgaattctttatccaaatttccttgggtacagatctggaatacttttggtgcttttgcttcagtgataaattctttataagttttcattttaaatcctaagatagtaagtttaaatcaaatggggccattccttggcacatgtttaatccatcgacacactatgtaaaccccttaccgcacttgcgctcgaccttattacaggtagggaaagctacttcactcagaggactcgacgttcatgaggagaggtcgtgtttagctttattaggaattagttttaattacgggctgcattagcaacggcgtaagcgtattgaacattagcgtctttaaacgtacctttagtggtatctagatctgccttaaatccgcctttagccataacctcggcgaattctttacggaaagccattgcatcaagacctttccatgctgatttgtgcttggcgaattcaagaccagcgaagttgacagccttagccaatttattatcaataacccatttacctgctttaggtacaaataccgggcctttctgtttggagaacaattttaaattccaacggcgaaggtctgcatcggctttaacaaaagctgcgtctaagttactagcaacaacatcttgaatatgaccaaatttaagcccatcggcttcaatatttagatcgttacgccagcgaagtccttcccaggcgaagcttttaaagtcagaagcctttgtagctaaataccgctcaataggagccgttttagggtcaaagccgtttcctcggtaggtccactcatctttattaatgccttggacctttcctacagaagcttcggtgataaattctttataggttttcattttatatcctttaagctaatgcgtgtcatagtagccttcatttaataaggctactataccacattaacgtctcaatgtaaactacttaattgatttagcgtaacgaatagcgccgcgatcgtttacgaacgcaattttaccattacgcatgtacatggtaacagtacgctggtaaccgttagaagttttgccagactgataacctactaatgcaaagttatcttcaccaggtttgttctgcttagccttaatacgctcatgaccaaatgccattaaagagcgtgcatcgccagatgctactgctttgcgagaagactcatcttcaattgaagaggtgaaatcatcgaatgaatcaaacttggcatggctcttattatataacttgccgtctactacgtagttatatccaacaacgtccatttcaatttctgtaccatcttctaatgtggcggtcatcttctgaccttttttaaatttcagaagattacttccaacagattcagtcattacgccaactgttgctaaacgggattcatttaaaaattcttgataagttttcatttattttccttgataagcggcccaagttccggtccgcatagtttcaattacacgacgagcacgattaggtgtctgacgataccaacgtgaatttgccagttctttggcagcagcatcccattttttagcagctaagagcttcatggaagcagggaatccagcgacaccacctacacccatttggaataccatgttaattagagctgctctacgaacatcatctaatatattatataccgggcttaatgtagcattagcaacaatacctttaattgccttctcaacatctttggcaaaaattacttctgcctcagcctgagtaatttggccaccagtagaacgacctacaagcttgtccaggttagaaatagccaaagattttgacgggtctttagtcagtaagtggccaataccaatggtccaatacccttcggtatctttataaattttgctgtcatatccttcatcgatacgcaacatgccaaaaatatccataaggacctcctattaattataggagtatttatttggccctgcacttagctatgaataactcaaggctacacttctcgtatggcgtccatttacctttccaccacacataatctcttctatcgtcctctggaatttcattaaatcctggacataacttttctgccatgtaatacgacgattttgcatactcactatcactgaagacatatcgtgatttcattagtatacgcgacattttatctctaggatgaaatatgctaacccattttccatcgtgaataaatcgtagctcatgcttataaatgtgtggaatgcctaattcaacggcttcttccatagtaacctcactgagctgtgctatacatttgtgtcatgattttatacaaacttggtcccatcacatatttccattgagaaggtttaattaaagcaaatgcgtcgatttccgggaaaggaattccattttcatctttatggtaagctgtgcaacggcaatttcttaacatttctgggctcacagggagcatatatccaaacagatggatatccttattgctggcataatcatgtcgtccaaggtcatataagaggtcctggtcaaactcagtaaatccagtctcttccttgcattcgcgaatagcagcctcttttggtgtttcaccaggctcaacatgtcctttcggaatatcccatctagaacctcttccctgtacataggtatttgtcatacgacccatgaaaagccgtttgtcattggtaaagaataagattcctgcactgagctctttcattggcattcattccaactttcttcaagaatatcttccatggcagtatagaccatagactctaatacaccatcacagttatatgaaccttctaccgagaaatcacagataggtccattaataccaagcagttcttctttaagtgaaatctcgataccgctcagtgattcattatcgctgtaacacagaaggcgagtatcaccattttcaaattttacatgtactgcaacagccattatttcatctccttaatccaggataaagtttcattacgagaatcatctttagatttttctttctttactttgggcttatcaaatacaccccgctgtcgttgggaaacgaattgcaaccaccgagcaagcattgcaaaccaagttccaacgcctgacatccaacctaaataatacagcgcatttccaaatactggagagaacaagtaaaatccccaaaatactccaacaccaacaaaagtcgagaatgaaaaccaaataagcagaaataggaaaaaatacaagaaatcattatctttaatcattccacgatagcaagttttaatcattttctgcagctcctaatccaggtgttgaaatcttctttttctttccacttcttgtatttcatacggtaagctaaaaatgtgcagcaattaatcaacgcgataatcagcatccacatgaggctgaatgcgaaaacacctaaaaataaaagcataatcataaactctgagacgttcaatccaaagaatgtccctccaacaattacaaaagcacaatataaaatccatgtcacaattccaaaagctggcgccaggccgtcttggttccaaaacccgtcaggtttacattcattcattttcttctcacctctttaataaactcaaacgactttttgcggttccattcaagagttaaattcttgcactgttctttccattcagcctttcgttcacagttatgcttaacatactttacccaacgaaatagttcaattaatcctagaccaagtaaacctattaatccccacgtaagtaatagtacattcactaatgatgtactgctaatttcagccaaattcattacgtcgattatgataagcgttatcatagttccagcagcacagaccatccccggaattagaacataatcagtttggtcaaatttatagacataattataaacgggaggttcacttggcagatataaattactcatttctgcaccctctcacggcagtatttgataaattcatcaatgattaattgtttgcctaccatgttgttagagtcaaacatactcataacctttggtggcaattcattaatgcagtaatttaagtaattgatgtaatcatctttagatgtcacatatttaactaggttaatgccaagacgatagctatttttattatgaataatctcaataactatggtgtacgttgttgaaccagaggtagaatatccatcggcattagcacgggctgatgttagatttgatggagaatcgttaaaagaataaattccgtaccgaagtgcaaagatatctacaagcttaactccatcggaaatagacgaaatgctagaaattaagtttttcagcttggaatagtctttaagaacgatagctcgaggcaaaactgtagtgttatacccgttatagcgagttttccaattctcaggccgagtatcaagacaagcaaatttctcgagaatatcagtgatttctgttgggaatcctgctgcaattaattctttaatttgaggtgttgccattggaatatctccagcgcattcatataacattttattatccaagttaggggcccgaaggccccggtaaaattacttcagactttccagatattcctggacatcagcagtggtggtttcaataccaggctgagtaccgctgaaggtttcaactttcatcatgatgtcttgtacatctactttagcgagttcagcgatttcaatcacgtcatcagcagaggtaatacccagagcagaagcattacgggtctcacggatgtattcgagtttcactgccaaatcaagacgctggtcatcaagcttaactacagtttcttcaatttgggcccgcatttctttatattcggcagctttatcgcgtaaagctttagcagtacgacgatacagaagacccagtttagcgtgggtttctacattcataccttctgccatcaagcgacgaatttcgcgctctttggaagcacctgcctggtctttttcgtcagcaagtttcagcagacgcttttcttcatttactgatttaacatgcgtggtacgcagtttagtgatttcatcaataatacgatttgctgcagtggtgtactggtcttcaacagaagtgttctgtgcaacaaaggtaccgaatttagaacggatgaattcaacaagttttttcagaatagacattttatttcctttcaatagtagtggtgtttttattcgtacggattaatccaatcataaacatatggtttaatgattagaccttgttcgtttttgttgcgctcaaatatctcgatgtaatcagtaacgtatgactctaacccgagaataagaacagtttctttgccttcttctactgttgccttaattaggcgctcgatagctattttagcttcaagacgaatatcagcaagggtttttggaacttcatttgtatgcattaatgagttcctccattttgtccaaaactgcgatatcaacaagacgattaaccgccgggtcatcggcaaactcattgtaagttgaaatcaccaagttctcgatggttttcagcgcagccattcgttcttctccagacggaaagtttggtgtttcaccaaacagtctagcaaaagatttaaaataagtttgcgctactaatctcaacttatcctgatacatatcaatttcctcagtaggtggggagttcattataactccccaaaattattagcagttaattaccgcttcaattcgtttaaccaaagcaggaacagttttagcaaacttgatagccatttgaaccgtagcagcttcttcatggtaaactcgaacgtagtactcttcaacagcaggccaatctttgcgaacgtgtttaatcaaatctttcagttcacgggtttctactacgttgaacactgcattctcatgttcacctttaatccaaatcgcacgataacgatcaggagtaccgtaatgattgtaaccacgttcaatttggataaagttgaatttagacattttattctccgttactctgttttgtttcgatgtagctatagtaacctagttgactactgatgtaaacaactttgtgaacaaattttcaaataattttagggaacctggagggactttctggagggtagaatggatttatatagccgtggatatagaaatgcccagacgacctctagaaggtatctgggctataattgcggtattatcgtatactaaaaagccccgtccgaagacagggctctgagaatcgacagcatcacctactggcagatgacctgcgaaattcattcctttggactcggaggcatcagtctcatccaaagaagtatagcgtcaggaggttatgcttgcgacagggaacaaccgactagcggcaatggacgaaccattctcttctatctgacgactcaacgagggcatacgcaagtttcccttcgaatttggtgccgattgcaggagtcgaacccgcgacatcttcattacaagtgaagcgctctaccagctgagctaaatcggcataagacgggaaataaggattcgaaccttatatagttgcacagacgtatctgccgttgaattcctcactaagtttaagcaactattcccaggtcttaatttggtgcaccgagagggattcgaaccctcaatccttgcggcgtagcattttaagtgctatgtgtataccagttccaccatcgatgcgaaatggtcgaggcagaaggattcgaaccttcgacctgcggattagaagtccgctgctctatccagctgagctatgccccgagattgttcaggcaggactcgaacctgcacgactgattccgtcggcgatttaccaccgtcgccagcatatgatgcaatatgcgagctcaaaaggtgtccgtcaccatgtctaccgatttcaccactgaacaagataattatattactgattatttatagcatttctcaaacgataaagttgattacagaattcgcgttcagtcaaaatcgtttcagaaattttgtttttgcccatactgtgagtgagcgtagcattccgggtagcagccaaagcttttctgaatccttcatttttactaagtgcatcgtatgctcctgttagtaaattctgatacgcttctgaggcacggtgaataggaacacctttccaataaagcgtttgtgttggccaccaacgtttcttcttacctttaaacttagcggactttccgactagtgtacatacatgtgcttgcatttcaggcgaagaaaatttgagggattgcaagaatccctccattgatgcacattctacgccatcatagataaatttatgaggagcgaaattactcaaagcacatgatgggtatgaactacctgaaccgatatccattacttttccttcacgtatttcaaccaatcaacttttaatgggctttctttctgcttatacgtaattccaacatggaatgcaaccggagcatcaggaatacggatttcttctttaatatcgaagatttctactttctcaaatacccgcatgaaatcatagtcgtattcaattggattacctagccaagcctgaatagcatacataacttcatttgaacaagaataatgattatctaaataagcatcaaactcttcgtctgtgcaatcatatgcaggaacatcaacgccaaagaatttcttggaaaattcaggagttacatacttctgttcagtgtgaagtctttcaagaactgcttcatgattataatcagcatttcccatatacacaccacggcggccattagaagagaaccattcaagaacatgaattacttgattaatctcttctttttctaagccataaaccatttgggtagaataccgatcagcatcgttttcccaagtggtaattgccattgctaagcctttaggaataacttgtccaaatttaatatgcattttaatttcctcagttgataatttggtgaccctggcaaagactcgaacatgcaaccaatcccttatgaggggaacgctctaccaattgagctacagggcctttatagaaatcttatgacttttataaaagccctccgaagagggcgccttgtcgggcttatccacctgctaggcagaattactcacacataaaatcagctacttcccagaagtcatttttaactgctactttaaccaccggagaaatttcagatgttttaatagaaacaattacatcacctgcgacagtttctaccagaccaacgattttctcgctgcgagcaacaaatttactcaccggatgaaatttaccggtagcagcgaacatagcttcttggtcaacaatcagtgcgatacgtttcattctttttccttgtttgttttgatgtagtaataataacaggttattcttgtagcattaaatctcgaaaatcgttccgttttcccacattgttgcgaacataggagaaaccttaacgaatgatttgcttcgcattgcaacgtagtcgttatctactttagccaatcctgaagcaatatcagtaatacggccacacttcatagaaccgcgaccacctttattgtatgtgcgttctccgtagaaaacgatatcaccaacttgtacttctcgacctttagaatctttcatcatatttcgcctggcaaatttgtttaaaatctaatacaagttgctctacattagtatcagctgttaacggagtaacttgccgcagtttattaattttacacccagagtgataagcaataacctcttgaatatcacgctcactgaagtattcatatttaatcagtgaatcatatcggcatttaatccatacccacatacctttgcgttcatcaaatgcatatgcaaagtcagcgttaatcattaaatcccgtttagcacaagatgaaagccctaatgctaaattaaccggtccatccaaagacagcttcaccgtaatagcatttacgtcatttgatacaccaataaaaatattcattctatttccttcgcttgtttttggccttcttgtcgtgcacgagaacgtcctgctttatgcagtgattcgtaatatgctcgacgtctatcaatgttttctgtacgatatgctttcccgaaatgggatgttttgaagccgtaatatttcataatataattctcattggcaagtgattggacggtatgcccggcctcgaaccgagtcacattgactttgcagaatccatgtgtttaatatatcacccatactcgatagcatatctgaacgagactgcaatcccgctactcagcttacaccatcttgtattgtgtcataccgttaagttggtctccatagaatgactcgaacattcgacctctccatcccaaatggagcgctctaccaggctgagctatacggagtaatttggagcatccagggagaatcgaactcccatcttctgggtggaagccagacataatatccgctatacgatggatgcaaatttggcaggctctgaaggaatcgaaccctcatcactgggtttggagcccagcataatagccgttatactaagaacctgttatttggtgggagtaactggactcgaaccagtcaccgctcgattatcggtcgagagctctaccaaatgagctatactcccatggaaagctaatcatctaattgttgatgtaccactgctatgggcagcgtttaactttcataaatttggcggagagtaaaggagttgaaccctcaccgtttccgatggcccggatttcaagtccggtttgctaccactagcgctactctccaatatttggtgaaggaagtgccatatagacacaattcgcttagcgacagccacagcgttttgcgggccgtgtatttttccaccattccttcattgttggggtgaccgatgggagttgaacccatgactacgagaatcacaatctcgagttctaccaactgaactacggccacatcaatattcactccatccatcatgaggacttcatacgaaattaagagaagaatgatcagttcaacccctgtagacgcgttgaatgaatattaatttggctggactatctggattcgaaccagagataccggagtcaaaggccggtgacttaaccgcttgtctatagtccaattgttggaggcggaggcaggattcgaacctgcgcgtgtcgggatatgagcccaacattctaccaactgaagttactccgcatttatccgggttcttgaagtactaacaagtagcttgatgtagaacacgctaaagatataatcttacgaatatagagcttattccgtgggaacaaacagcttcgtcctcggcattatcttacaggactcaaactcatcttcaagaactgccacgttcttatttggcggacctaacggaattcgaatccgtgactctcgcgtgacaggcgagtattttaaccgctgaaactataggtccataattcgctttcagagatactctggcacgatgccgaagcaaaggggaacaggactctcatcaccttggtaccagatgaatcttgtttagcactctgttctaagatgtatccctgaaagcgaactttcaacgccgtaagaaattataacatgaacaagcattaagcaggatgaaatcatactccttaatacaaacgccatgccagggaattctgtgccgacgatttatcagaacgtcttctgacttcttcatttggcgggccgtgcaggtatcgaacctgcctagtcatttctgacacggattaacagtccgtcgcttaccctctcagccaacgacccgaatttggtgggacaccgaagactcgaacttcggacacccggattaaaagtccggtgctctaaccaactgagctagtatccctaaatttggtggggagtaatggagtcgaaccactcgagccttttgagcaacagatttacagtctgtcccgctacccctacggtctaactccccatttggtaattttatttatactgccctgaaattaatcagagcagttgatagattaataataacaaagaaaacctaaagcatattacacaatcggtgagctctttgatttaaccaggaataccctatgtggtgaatccatatgagagagcaatacccggtgctcaggaattggacttgtatggaaaggaaccacacgataacctttaggtgtaaatcctagcaaaataccaacgcttgctgcagaaagtgacccaccacagtagtatgatactaaatcaccaggctggatttcattgtcaagagaatcggttttggtatgcttaggcgtaactaaatcattaggaattggaacgccttgtgcatcatagtattcatgggcaagaagcttataattctcttgatagaaagtattaaatgcagctctgatattcataacaatttcctcacaattaatctttgtatgcttcagttgaacctttagcaacggtttcaaatcgggaattcagtatctcaaaatagtcctgatacgttccctggagggcttcatagcattcttctactgtagagtagacacctctgatttggtcagagccaggagcaggataataattagaccaagttaaaagtgcatacattacttacgtttccagctgtagtgagccaaaataagaagcactgcaatagcaagtagtgatgaatgcaatgctgccagtagtgcacctagtcctacacccaaagtaacataatcatacttagttacttcttcacggtgtaaatcatagtttttgatgaaccactgcttaatctttttcatgcgctattttatccattatgaaagaaatgatacccattagaaatgcaacacttaacactgatactgtttcaggaagagacataaaggctgcaccgataatgccaaaacctaatgctcccatgcagatagttgatgcaacatttctaattaattcacaacgtttcattttattctcctcaagttgatagggttatagtatcactactacaacccgttgtaaacaactttgtgaaataaatttctatttcaaatcttctgaccagtccagttttagtggctcttggtactctctgtcaagcactaccggcacttgaacttcaccctcgaagtgagctggacctacattgtagctgagagtaatgtgcggtgagtaatctgggaaatcatgagttgctcccaaagctcttgcatattggtgacggaattttaagtattctgaatctagcttaagaactagcgtacgtccgtcttgtgtgtcccatacttcaagtttacctgatgtagcaacttcaaaacttcctgaagcgcaaacgtatggaacatgaactcttgaatagcatatcgtcgtatgaatcttatgacgaggtacaggattaggaaccttcaactcacgctgaaggtcctcaatagcatcaagagttttctcagagaatttagcagctacatatagaccagtgctaaaatcgctgaagttcattaggcatcagcttcttcagtagtttcttctgcgaactgtgcttcgatttttgcaaccaggtcgtcaagtttaacctgaccatcttcactgatttcaacgccggatacagcaatcagtttctgcagtacttcttcatactgtgcacgcagagcagaaaggccttggatagtttcagacaggtcaaatacacgaactttcagagtatcgacttgggcttgcagttgttcagtagtcatttttgaattcctaatatagtgttgatttttgaataaagttcttctagagaaccgtcgttagttattacgatatcgccttcgcgaatcggaagtccacgctctgtgacgtgagtatcttttttagaaccttcttgctcaggacgaactacatgaataactgtagcacccatcgccctggctacatcaagttcatggtcttggcgggtatctgggacaatgaaataatcataatcaccaaaagtatcagccataaccaaagtgaatcgttttacccaatacatgcgatcgagcttatcacagacaatgtcagtcccaagggtctgcatgagacgacgaattgaccatggctcaacaggtttatttattacaacttgacggatgacttccatcgtatcgccgtcaagaattttacgcttgctatcataaaccacaccaggtaaaggcaaatcatgatgaacatattcaatcgcgttcgccatgatacgaatcacgtctttagtagacagatttaaatcctgctcacgatcgtaatcaataccttcaatcattgaccgagtaatgcgaggaaactgacgtgatgtatcgcgataccactcagtaagcattgcatcagccaacgcatctttaattggacctgctaactgatgttttgttgcgttatagttatccataatgtagtcagcagttgtatctttgccactacgttttttaccaatcaaaaataaaagcttcaaattattacctcatagaaggatgcattcccataactttctgttgatactgggattcgcgagtatcattgacagaaggtctaccagtaattattataccatctttttcaacttcaatgtatttgtactgcaaagttgctacacataccatagcagggtcagattcttcagttaaagaatactcaatttctgacaaatcacttacccacccaccgatgtagcggacagttaatactatatcatgtttatcgttatcaagaacatgcattaaaactgcaccaggaaatccttcaccgccattattccatccagactttcctcggtcaatgtaattctgacagcttaacatccatttgtacatttgtacccatgaatcaagattttcatctactaaaaatctaacaggaacagcgtcaaattcaaaagtagaaccaggcaatttagcacggtgcattccttgtggagaacccacagtatcagtagcaggaatatgaattccgggaactaccgccgtttgaaggttagccttaaaggcctgagtgaggcccccgtcggggacctctagtataaagttagttgtgttagtttgattaaacaagccagtagacattatgatttccatacagaagtagcagaataacgtttgcctttcgacataaactgctgagttggtagcatgactacatttgcccaatcagctggttttatctcgattaaagcaccctttatattaccaggaatatatgctttaatcattttatcagcaccagcaaatcctttaacttggctccagtttatctttaacctggtcttattagatatcactggcgtattagcatactgtttcagaagttcttctaaaaactgctgacgagcctttggcggaatgtagtgaaggtttaacccatacatcagtgtggttgtaccttgctttcctagaccgagataaactatcaaaggaaatttatcccagaatggaagagtgtctttatgtttagcatcatacatgtaagcatatagctttccaggttgaggcttggttacagaatgacctctgatgtttttcttcatggtttcagcaaaccattttgcagatttattgtttactgctgctccttcattacgaattttatctttgatagagcttcgaaatgaatttaccattacaagagcacgctcttgtttggtcattttgttagcaggttttttctcaatttctgctactttaattgccgttttaattcttgatgcatgacgagccatagctttactgaacgtagcaggatttattcctttactttcagcaaatgattttgatgtcatgccttttttacgagcagcagagtattcaactcctaatgctacccattgattttcactacgggatttagctttaggcgattctgcagcttcagtgataaattcaaatatagccatcagcctttccatcctaattttttaagtgaatcttcggtaattaacctaaattctatacccattttgttggcggtagcttgagctgctttccacttatccacgtttacagaccatgtgtaaatttcatcaatgtaccgtttcttcgctgatgtcgtcaactttgtgggtttgaccggaggtctagtttctttcttcggcttaacttcaaaaaagaactgttgaccattagaaaacttagcccagaaatccatgaaataccggcgtttctttccatctgcattactaaagtatggaatgactacctcttcgctgttccattgaactacatctggatgattgtcaagccatctcatcatgtactgttcccacgtagaacgataagtaatctttctgaagtcgcctttatatttgtggagattctgcggcatgaatttgccggaatatgccatagtggcctccttataaatactgttattaatatttataagaggataaactatgctcttctcattttttagtccgatagattattctgcaaagaccgtaaaaggtgctaaggcaaaagctatcccaaccgctgacatatttcgtaattatcgcaaatatttcgacactgtagcagaaaactatcttttacaaacatattacataagtggagctcctagaccagaagaattagcatacactctttatggaaatagccagctgtactggattcttttaatgtgcaataatgtatatgacccattcagagattggattaaaacccaagatgcatgctatcaatttgcgcagcaaaaatatgcggatgtaggtggagaccaaatactctatcacgtggatgcgtatggcaatcgctattacaatctcgagcaatatcctgaaaattcaggtgtttggtatgataaaggggactttaatcatcagtaccctcaatatactggtgctttggctggtgttgacatttacgaagattctattatagaaaatgaaaaactgcgccaaataaacattatcaatcctagcgatattgaggcatttctttctgatattatacgagaaatggaaaaagcacctgacagcgaatacgaatcaggccggtacaaatcccagactacaatcggagaagttttatgattgaaatgaatgattcattaaaatggtttactggtgttgttgaagacagacaagacccattaaagcaaggaagagtgcgagtacgtgtttatgggcttcatccgtttgaaaaggtacaaggagctataaccggtcttccaacagaagaccttccttggatgtcagtgattcagcctactaactcggctggaatttctggagttggctcatctataaccggaatggtggaaggaacatctgtatttggcttatggcttgatgaattcaaaacagcaggactagtaataggaacatattctgcgcatagaaaaacgaagccaaactatacagaaggattttctgaccctacaggtcaatatcctagacaggtcgggtcagataccaacccactagttcaaggcgatgaaactgggtatagtgctataccaaacatcatccaagatagaaacctggatattggcattaatcctgacgatgctgacctaagcgatattcctgaagacccaaatcctgcaattacaataacagatatgcttaatagggatgaaggtcttagattgaaagtctattgggatacagaaggatatcctacagtcggtattggacatcttatcatggcgcaaaaagtacgtgatatgtctgtcattaataaaactttatctaatcaggttggtcgtactgttacgggaaatcccggtatcattacaatggacgaagcagtcgcgttatttaaacaagaccgcgataaaatgctttctgatattaaaacgaattcacgggtaggacctgtatatgctaaagtcaacaagtcaaggcagatggctttagaaaatatgagctttcaaatgggtgtaggcggtttagcaaaatttggtaaaatgcttgatgccatgctcattggtgattggaaaaccgcttatacagaagcaagaaactctgtttggtttaatcagacaaaaggtcgtgcttctcgtgtttccatgattattctaacgggtaatatggaatcatatggagttcctgctccaa

SEQ ID NO: 10 - DNA, 50142 bp, Unknown
  bacteriophage strain capable of infecting bacteria of the genus Klebsiella
tgccgcaactcgaattcagccagcgcgaacctgcgcaaagcggcggcggcaatcagcaatcagggtggggccagcctcaacaacccaagccgcaacaagcgcctaaacctcaaaacagcggcgggaatacggggatggatttcgatgatgatatcccgttctaatttgacaactaaaggagccgaaaggctcctttttttatcggttcattgatgctattatctgcgttactcaaccaacataagaggcttttaaaatggcactatacagagaaggcaaagcggctatggccgcagacggaaccgttaccgggactggcacaaaatggcaatcttcgctttcgcttattcgccctggcgcgacgattatgtttttgtcgtctccgattcaaatggccgtcgtaaacaaggtggtcagtgacacggaaattaaagcaattaccacaaaaggcgctgtcgtagcgtctagcgattacgcgatcctgttaagtgactcgcttaccgttgacggtctggcgcaagatgttgcggaaaccctgcgctactatcagtcgcaagaaaccgtaattgcggatgcagtcgagttctttaagaactttgatttcgattccctgcaaaatcttgccaaccaaattaaggcagattccgaagctgcgggcgcaagcgctacggctgcggcggcgtctgaaagcgccgcaaaaacttcagagaccaatgcaaaagcgtccgaaactgcggcaaactccgcgaagaccgacgcgcaaactgcgaaggggcagactcaagatctttatgaccaggttgtaggtcttgttgctggcgttcaagctccagataagctgccgacttcgccaggcggctcgcgggcatggatgaatatcgctaaagttaaaaatactggaagtggtttcgcttttgttcagttcatcattggcggaggttctgattatggcgctgcaaacgtccctgttgatatcttctccttatctggaagaggtctaccagcatcaccgttgacaagcaataatattgacatttggtttacgcaacggtctttagttgctgcaaggccaaatgctccgcgtattaatcttggggtggtgaaaaacacagactcatcgtttgatgtttatcttcatgctcccggcggatacatccctgaaatgtggctaaatcgtttgaacgtacaaccaagagggagtgtgattacagggccaatcatcgatcgcgctggttattcgtggattaccacggagccagaaggcattgtatataataacccgccagattatttgctggctaacgatagcacgatcccgcgcaccaacgtagctaacacgttcagtcaaccacaagcgatcagcgttccgggcggaaacgctacgctgaccctgaacggtgccgtagtccgggccaataacaacaatgcgatcgtgtactcaatccctgaaagcggtcaggggatgtacttccgccctaatggcgatatgaataacgcaaagcaagttgtctttgatgcatcaaactttactgttaccggattgaatgccagctttagcaacgccgttacaatgtcaagcacgctacgcgttaacggatcttctaaccttcgcggcggcgtggatgttaccgcgtctcagggtttgccactgaaggagacaaccgcgacaaccgggattggtgttaactttatcggcagcaacacaacggagtgttctttcggtgttgagaatacggctggcggatctgctgtattccataactatgcacgcggcgcgtcaaatagtgccacaaagaacaaccagcttttaggcggttacggatctcgaccgtggttaggatcttactacacggagcacagtaacgcggccttgcacttcctgggggctggcgatgcatcggaaagcaacaatggtggctggattcgcctattggtcactccgcagggtaaaaacatcgggtggcgttctccggtcgtgcgaatttctgacaacggggatacgtggttagcccctgctggtagcatggtgtctccggatcttgatgaggtgcgtagctttgaaacgcttaacgcggcagttccgaaattcaacgctccaaccaatcaggatggtagaggattgaaaattgtggcggatggtgcgccggaaattaacatgattgcgcctcgtggttctaacgcttcatctccagctattcgtgcaatgtggtgcgatggtagcctggctaactctgataaatatatcggcgctacacaggcatggtctaatttcttctttggggcatctggccacgacggggaaaaattcgactcaatgcgaggagcggttaatattcaggctccaggcgggtgggggacaacgagtacgccaacgcgaattttgtttgaaacctgcgcaacaggctcaaccacgcgaacctctcgctggtgcattgaccacaacggtaacttcatccctatgggcgatggcggttatgatattggatggggtagcggtcgagtcaataacatctacgctaaaaatggggcaatcaacacctcagacggtcggatgaagaatgacgttcgagccatgagcgatcctgaaaccgaagcggccaaagccattgcgaaggagatcgggttctggacgtggaaagagcaagccgacatgaacgacgtgcgcgagcactgcggtttgaccgtacagcgtgctatggagatcatggaaagttttggtcttgagccgtttaaatatggcttcatctgttatgacaagtgggatgagcaaacggtggtttcagaatatgggccagcgaatgaagacgggtcggaaaacccgatctacaaaaccatcccggctggtgatcgctactcgttccgcattgatgagttaaacatgtttatcgcaaaaggatttgaagcgcggttatccgcacttgaggataaattagggatgtaaaaaaggggccgcatggcccctttctttttaatcataccttgcgcaatcaatagcgatgcaggtgtttttcatatcgacgtaggttagatcgctggcggcccctcctggtgcctgcgttagatatgcggtaagttgcgtgcttgagccgttaaagaatgccgctgcgccatagtcgccctgaaatggtcttgggtatggatcacgaataacaccaacgatcgcccccaactgaacaggactaaccgcccacttcccgccgttagtgacgtttagattaaaaccagtgccgtaggtctgtacgtctgaaagtgttctggtttcattggtcaaaatcagcgtgccgctttcatcccaaatagcaaggccgtaaccaggattggattgtgggaatacggcaaagaaataaacttcagcatatacgccttgtgaaccagcggaaaaaacaacactgcaagtgttcccgtcgtacctaatttttgtgaaagcgccgtttggtgatgagccatgaaagaccacgaacggcacgcatgggtgattcgtgtcgtaagttaccgatctcacctcatcggaattggttccacctctcagggtgatgctttgctttgatagcagtgccagcggtatgctttgaggagaaacccaaacattgccgctattattggtaagtaaaattccgtaatctgccataatctttaactcataatttgaacaacaataaaaccttgcgtcgccgggtagacacctgattccagcgcatcatctggcgcatctgaaacaacgatctgattaccgctaacggtaattcgcctcttcgatgtgccgtactggtcttgatttgcgacccaaaagaaacccaaccttaaaccaggtggaacgttgtaagaccatgttccgcttttctgtccttgcgccaaagcaatatatccagcaaccgaaacagggacgatcccatagttgttggggttcccgttcgcatcccaagattgaaagccataagccataaaatacctccattggttaagccgggatttctcccggcgttaattttaccatgcgccagtgattctacccaactggcaacgaacgcggccgctaccatctcgaaccgtgatgttctggttagtttgcttgatggaaccttcgccagatgttgaaccatagttgacaaatacgccgtttttatcaagcctccatcctgcaacattctcctgaaagttgttggactgaatgacgttaccgatcttcgcgttggtaatcgaaccgtcctgaataagcgcgttattcatgaacacctggtcattctgtacaacgaacggcaacgtgtaagatcccgacgctgcattacggatgatagcaaatctatcagcaatgaacagcacctgcgaaacaacgcttccaccccttgaggtaagctgtagggccatcccggaattgtattcctgtccgttgtacgtcaagcctaacttcatcgtgtacatggaaccgacgccattaacgtttgcccacgagtcgagtttctggtttagcgctgcggagttctgcccgattttggcatctagtgccgcctcggaacttgcccgcgcttcgctttcatttgcaatagcctgattaacctgcgtaaaaccagcgctcatggttgtttttacgccgtcaatatcagccgcaaaatctgcctgcaactgaccgatctgcgttgctctcgtctcgctttccgtcgccagggcttcgttaagggtcgtgatctgcgccgtgatatcgtcatcaatctgcgctttaagctgcgtaatttcagccgccctcgcttctgattcgttggcgatcaacaccgtagtatgtgcgatctcggccttccgcttgccgttctccttgcgcataaccctgacgtccgcatcattcgccaaagcgttttgaatgatgctgttcgcgtagtcattgagttttgccgcgctatcctgcgcactctcctgaagctccttcatcgcgtcgctgtccaggatttcatccaggatcgcatctgtgatgatgttaacgtcagtcgaagacatgccgcgagcgtaatcagtccattctgaaacgttgccgatccggtctacgcttctggctttgtagaagttcacgtagccagcaggcaaaattgaatgccagtattcagccgccgggtaaggaatcagtgtaagcaggcttgcgtcctgatcggttccgctttgcgactggtaaagctcaatgtatgccgtgtcttccgctccttctggcatggcccacttaacgcgaatgccaaagatctcattgtcagacgcaaaaaggttaatcgggccttttggcgctccgactttcccggtcagtgtagcggttgccaacgcagaccacggagacgctacattcccgccgctaatgcacctcacgcgtgcctgatactcgccagcatagatgccttcgatatcaacctgcgttgtcgcagtgcgaggaacgttgttccagttaccgccatctttgcgccattgcacctcgtacagttttgcatactgcacggcagaccagccgatcaccatcgtttcgacgctcatcccctgaacaatgcgggagaaagagctaatcgttaagtctttcggagcgcccattgaatccgggtcaacaaccgaagttggtcggtcgtcggtaattactccgttgtcgatcgcgtcatacttgttcgggttgtactgcgtagccgtgatggcaaaggtgaattcgtcgtcatcactacccttttcaatccgggttactacatactgttccgctgcaagctgatcgctctcgatcaggaatacactgtcaggcgcaacgtcaaagttatacccaacgtttagcgtgagggtcttaccgtcagccgaaacgctggcgattgtgcgtcgcacaggcttgccgtcgtcagtgttcaggatcagagtgtcgccagccttcgcgtcgcagcggaaagccaggaaaacctgcgttcccgttacttccataacgcggcctgatagcaccaggttaaaggccgattgccagtgcggatctgcaacgtaaattacatcgccgcaagaaggaatcataccttccagaccagtagaaaacgaaacggttgtggcgcttaggttcgtttgcagaatccaacgcccacggcggttcgcctccgtccttctggtgcatccgatcgctgtaatgctggtcgggttgtgtccgaaccgcatggctgcgtccgggttgaatactggttcaacatcctgctcatattggttttcttcgtcgtcgaacatgacgttgcacgacgtgtacatcgtcttttcgcttgggaacgtccgaacgaacacgccatcaacgacgttatcagccgtaaacaggtacaccggatcgcgcggcttgtcgacgataatcgaaaggctttcaccgttgtagaacgtcattccacggaacgcggaacaaatatcccttactaactggaatgcctcaacctgcgactgaacaattacatccatcaaatagcgaggctccatcccgccgcgattgtccggaacgagttcatcacagtattgcgccacctcatacagcgaccacttgtcaaccgggatgccaagttcgcgctggtctaaaccatagcgctgattcatgatcaggtcataaagcacccatgccgggttattgctccacgcccacttaaaaacaccgtcccacgtcccggagtatgtgcgattaatcggatcgtaattactcggaacctgaataattttccatttctttttgagtgagatggtgggaatctggttctggaacagatcgctatcgaactcaacgtaaagcatggccgttaacgggtagcggaattttgcgtcaataacttcagcgtaggattgaacctggaaggcatcgacaaccttcaccccgtcagagtctggcgttactcggctcacgcggataagaacctgcgacgtgaagttttgcggcaggttaacgcgaatgctccgatcgtaaccgccagtcgtgttcttgccgtcaattttgccagttaggtaggtctgataacttgcaccatctaccgccatctcgatcttgtactcaacaaccgatccgaccatatcgccgttatctttttgagtcagcacgcgcggccataacaggcgaaagcgaatagcagaaagatttttgttcgatacggtaagcgtataaggagtgttgtgagtgacttcacgagcaacctggatttcagcacttgactcgctgaagccctgaatgtagtcctgcgtttgcgtgccggggcggaactctgcaatcacgccctcatagttgaatgttccatcatcgttctgaaccgggacgccgccaaaatgcaactgcttcaggctgaagtcgttaaccacctcgccatccgaaacagcaagcaacaacttgatcttatcttttgagatcaggttatctggcatttctaccggggttcgcggcttgctggagccacccttacgggccttgatattattcatcgtttagcctcctgttaatagtctcgcaattgtacacgacaaaaagcccggaggctacgcccccaggctaaaaagcgaatggcttaattagttgttgtcttctgcgtaagatccagaaccgaacaatgcgccgccagccaatctgtaaccgtatggcaactggattggataccccgcagccgtggtgttaatcggcccgccgaacgcatacgatggtttattctcaggcgattcgctcgcccgcatgttgccgcccatctgcggggcgatcatctgcattacgccacccaaaaccattgagccaccagccataaaggccgccgatgcaaaagctcccatctcggccaatgctgctccaccagtgtagaacgctgctaccataatcgctgcgccgataacgatctgcaacaacccgccgttctttctggctcttgggatcgggatgattctaatctcctttgccacggagaaagtcgaaaagtcgtttgtgctgattggctttccgtctgcgatgataccaaagcgcatatttgaaccaactttgctctgcatgaacggcttaaacccttcaacctggtaagacagcgcccggatacattcagcgactgaatcaaccgcaagtttgtggaagacaccgaaccgacgacccagggagccagatagtttaatcgtctttgtatgtgatgccatgttttagctccttatgcctgcaaattaaaaccttgtgctgctcgtaccatccagaatagatatcccggcgagacagcttaccatatgcgtgatgaaggatgttgttatttccaacgtaaatcccagcgtgattccacttctccgcctgaagctgaaaaatgatcatatcgccaacttcaggctcgccagtgttttcaatgaatccgtcctcttgccagtagtcctggtaaagattctctttgtattccggcttccaccattcgaacggaacccgccgatcttttagcgtgacgccgtgtcgcttgtgaaaatccataataaggccatagcaatcataagcacccaaagcccagggtcgaccaatcagcgggcggcgcttcggctcaatgattcgcatatcgccttccgggatggagacgataacccacgacaagccagactcatcacagaagcataaatcagtggcgctcggaattgtggttgccccgtcgccagtgtgagaatgaacgaacgcgatcggctcgccatccattgctgccagcgcatactgcgtttcgtccggcattgattcgttctcaggatctggcgaaacgttgtcgagtcggtgatatttttgcacgcgtgatttttgcgtcaccagcccggcgcattcgtgcgggtagacttccttcgcgtgctgcatgatctgcattttaattttcggagtcaacatattagataccactcttcaaagttgctgtagcacaaccgccaaaactcaacggttcattgccaaaacgaagcctgcaagaagataccaggccaccgcaaacatcctgcgacggatcgtcaaccctgtttcctaacttgtcgaagtatccgttctgcccgttatagtcgcatcctttgccagacttgtaccacccacgctgcgcccaatagcaaacggtttgcgttaggcgtgccgggatcattaatccgtccatatcaaacacggatgttaattcgaaggttgccttttgcgggtcaaccttcttaggtcgctcgatgtagtagacaaatcgcctaaaatcgccctctttaacgctgccgtcgttttgtagcaattccttgaccaaaacccataccgtaactttggcttgcatgaggccgttgtaggcgcgaataagagcactcgcttgcgcatcgatattgctaaccgtcagcgttggcttttccactgtgccatcgctagacattgcgatcccgcccaggccgaacgggcgcgggccgtactgctcgccgcgaaatgtgatcatctttggctgaagcgtcccgccgttcaccgcagctaaaagctcctcggttgtataggcgacgttctcgttatggaatcggtagacctgcccgccgaactttgtggcgtcgatatcgatcagcgttaggatctcgccggggaaaagtttttgtaagcagttcgcaaactcttttgaaacattggctgtcatcgtaagccctcctctaattgactccagatcataggccaaaaaaaagcacccgtaaagggcgctttttgattatccggctgaagtgaagcgttcggcgaattcagccgttacctcaaacaccccgccaccctgcggcgcaaggttaacggagtcggcagttacgacgaatacgcccattcttccatccggtgccttccacacaaaaggctttgttacgtgctcctggcagaagtcataaacctcttgccagtccgacccaccataaacgatcgaaaccgtccggcgcttcgtgttaatgccgctcgacgccgtttggatatagccgtttccgaaactgatcgagcgaatgttattggaaacggcgacttttgccgcccctccttgaatctgcgtacaccatttaaaggaatccactactacctcctcgttttctcattgacgaacttcgcaatgcgcccgttttggctcaaagcctcggtgaacatatcattcacgatctgccttacgccctgctctaaccccttgctatcctgaccggaacccatcgtgatgttaatatcaccaatggtaaacaccatagccgccgacgccgcgacgttgccgccgttggtgattccagatccggaacttgcgttaccaccaaccaggccgccacttgcatagccgcgcattagtcggtataggttttccgggcctaacctttgcgtcgcctccttcgtgaatacgaattccccgccgtgaacaacgccttttggctcatacttcccgccgtcgccagtgtaaccaccgccggaaaatcccttactgaacatgttggcgaagctgaacgtgccgccaccaccaccaaacgcggcagaaagcgagttaaacagcgccatcttgataagcatgttggtaatgtcagtgatcacgctctttgcaaagtcgctaaagctggccttaccagtcataacaaaatcagtcagcacgctcgccatgccgttaaatgcgtttttagtaatatccccgatgttggtgtatacgtcattaacttcgtcgccaatgtcagcccatgcgtgagtaaacccggccttccagttcatcatttgcgcatcttgctgtgcgtagaatttatcgcttgcggcctgcatcgctttaaatccagggtcacttaaagatccgcctctgtttttccagtcagccgccatctgcgcattggcccggtatctctcctgctccttgctacccatttcggcggtatcctgtagcgctttggttttctccgccatctggttttgatacttggtcgacttgtcaagcaaggcgttcagtcgctgctgctgaacaatctgatctcccacaatggccttttgctccgccatgtacaggatattctttttgttcgccagcatctgctgttcgctttgggtcagttttcgcttctggcttgcctcttccaaaacctggaatttagcaaccgtctcgaagtagtccttgcgctgctggctgatcttgtcatcaagccctttgtgctgctgcaaaacctttaactgcgcctggagcgatagcagttcagcctgatactgctcatcaatttttactcccgcgtctgcctgctgcttccttgcgttgcggtttttcaggatatccttttcttcctgatttacgcgttccttcgttttgctgctgtacccaccagaaacatctttgttattggcggcgtcaatgtaccccatttctcctttggcgatccttgcttgctgctccgcgatggtttttgcaagctcggcggatttggctttcgagtccttgattaactgctcctgctgcgccagaaagtcattcccaaagtctcccatgcctggaattttctgtagttgtcggccagcgtcaacgataaactgcgcgatcatagcgtcgccgtcggcaatcaacttcctgatcgtgttgatgatcgcggaaaccgtatcaacgataaggtttagcgccccgaccgtgtgatttccaacccaatcccatgcgtcagaagaccacttcttgatatccatccacattttttcaagaggtgttgcgctatcagccacatctttcagtcgcttatccatcgtgtcagcaaacagctttgtcgccgcatctgctgctgccgtctcgcctttggttttacgcaaagattcgatgtaggttagctggccttcattcaggaagttaaacttgtcgttaagatcagcaagccccttaaccggatcttttaagatctggtcaaagtagcccttgatcttatcgctgctctctcccgtctgcgcttcccattccgccgtagtcttcgtgatggtcttaatctggccaatggtgtattttccagaagaggccaaagttgacgcgatatcctggattctccctgaagttgcgctcgaagtctcgctcaattcattggcaagatcgttaatctgccctgtggtagtggcagcataaccaccagtcagcaccagcgcattcgccagatccctttgtgacttccacgcatcgaaaccagcttttgcaatcgctgcgatagcaaccccaagagcaaccgcgccaatggttagcgggttaatgaatctgattagaccccccatcttctcgccagcctcggtggtattattaaagctctcagcaagatcgcttgcgctttcgctggtttcgtccagagattcattaatatcagcgctagtgccaaagattagatttttcagcgcctgaaatgtattaccgatgccgccaaagctatccttgatttgcccgccctgctgaattgccaccatccagattggcattcctgaagcgagggacgtaacaacgtcagtaatctgcgctggaagctggcgcattgccgcttgatactgcccagcagaaatgccagcgaggcccatcgcgctctgctgtttctttaacgcctgctcttgctgtttcagtgcattaatgaacggtgccgcttctgccgatacgcccaattgcgccgccttcatttccagcagttcggcacgtgttttcccgatggagtcagcctgctgtttcaggctggcgacaaaatcacgcccggcgtttgccgccttctgctttgcctccgcctctgcgattgctgcgcgaccttcttcggttagcgccgcctgctgccgccgtagcttgttggtcgtggattcaatgatggctcccaggcggaaaaattccttatctggaacaagccccaaagcccacgccttatcaagttcttctgtagctttgcgcaagttggccatttttgagatcgtgggatcgatggcgcttgcgatcctgctaaagctggtttttgatttatctgtctcttgcttctggcgctgcaacgcgcggttcatttcctctgtctgcgccgtggcccgcctttcagcgtccgcaagtgactgtaggccagcacccgtttgctggctttggtttttcagttcggcgagtgatcgtaccgctttatcaacctgcgaaacgtcaacgccaaacgtcaacccagctactttatcagccatgtttagcccccatatgaaaaaagcgcccgtaggcgcttattttgatttcttgtaaatctccttcaggtattcaccctccaggatctgcaagtcaagtaatgccgcttctcgattgtcgattttatacaattcgaacagcataggcaacgtattatagtcaagccccgtcgggccattcatcccgattcgccactgcgtttgcatggcctggaatagctgccagctttgggcggtctgttcatcaaaatagatcgtttcaagatctgcttcataatccgatcgccttaacccgtactcggcaagctggcgatcggttagctcaggctgaagcgtgagataaacagcccgccttaaacttttgcacggtgtcccgcaagcgcggccatgtaagtttgtggcagtgccatgacaaatgccgggaagtgagcgcaaagccaggaaatgttttcatcgctgaattcgtcatccagatcccaaccttcagccatgaagcggataaactcggcgttaccctttggcgctttatcttcgctctcataaaagtctttcatctcatcggttgaacgatgttttacggtcatggtgatggtcgcttctttgccatccgggcaagtgaaagttacgggcagtttgaaagaagggaggttgccgccgatttgaattttgaatttagccattttgttaactcctgattggtttgtgttattcgctattatgcacaaaaaaaggcgaggcacaagccccgccagttaattaagcgaccaccggaaggaagacgtgcgtacccttcagcgcgaccgcaagcgttaccgtctccatctcgttgacagccgtagtcggaatgtcatcgaatgatgcagcgccagaccaataacgaacctcggacgctcgcgggatatacatgtacatcgctttcgcctctttgctggtgtctgctgcacgcaacaccgggtagattgcgttatcgtactcgtgcgcaaacgtgtagttaagcgtcacagccgatttataggtaggctcggactgttcgcgctcatcactcaggcactggtagttataatactgctgctcgttgccgtctttgcccaaatcctgaatacaaggcaactcgatccagtcagtgactacgctcacgcttccggttgcagccgtaggatatttgttggtgtcggaggtatcgaactcttccagagttgccacaccagccgataccgacttgacgcgggccactttatctacaaagtcgctccaggtgcaatcggtaaagattacgatatcgttaacgtcgagcgcaccatctgccaccgtgatttttgggtttttcgcgtcgttggtcattgcggtaaacggaacctccgcaccgcgagccttctcaaagaagaccttagcaccgtttggtaaatgcatgttgaatactcctgttttgatgaaagtttaacaccgccattatgcctttatatttctatgctggcaagaaattataagaaccacgaatcgccatgcgtaacgccactgtctccatttcgtttaccgtcgttgacggaatgtcatcgaacgagacgttgccagaccaatagcgaagctcttttgctcgcggaattagcatgtaagcgcccattagggttttgcttttctcgcgagacttcatgatcgcatacgccggattttgtgggtcatgagccatagtatacgtcataaataaagctgatttagtcgtcttctgtcgctcctcccttccgctatgcaagcactggtaagtgtaccagttttgctcgttgccttccttgtcgattgactgaacgcaaggaagctcggcccaggccgtgatttttcggatcgcgccggggaatgaaatagaagatcctgcctctagctcgctcgctctgtcttcaggccaaagacggattcgaccgccaccaccaaccgaccaaacgcgataaattttaccctcaaggaatccgtacctatccgaacgcgtgatcataacgatatcgttgcttttataaagatcggtatctgtcggcattttgaacagcaaaacgaatgtgttggccggagtggtgttcccggctggcggagtcgtgtccgcgccaacgacctctgtttcgtgttcaaaactagactcaataaaaatcttgctcccattaggcaggtgcataaccgttttcctccatgctctcgcatcttactgtgaacctaaccggaaagaaccaccccgtttcgtgcttctgcacgccgtgtacttctgcccactcgctcacataaactttattaacagagtcaatgattttaccttcagggaaatattttgcaacgcgttgggcgataatcctcgcgcggtcggttccgatcccaggcttaaagataacgtcaatctgaaccatcgccagatagactcggcatttccttgacaggtcaaccgatctggaatccgcctctacgtaggagaacttgagataagtttcaccgtgttttggtggcttaaaatcaacgttatcacccgcgatctgtagtccgatatcggcggcatacttagccgctgccgccttgcattttaacgccatttcataatgcatttttagccctcgctcgcttgattgcctcagtaacataaacgcccaaccggatcgcaacaacccccataacgccattgggagcctgctttgaatggccgtattccagcgcgttcgcatagattagcatgttactgaaccagatcgaagtgatcccagccccttttgcgaatagtgcaatgttggcttcaccgttctggattgtcttctctcccgtttggtcgtatgcgttaatcgcgtaaagcggggcgcggttaaaggtgatttgccagttaccacggaagcgccctgtatccaccggagaacgcattacaaggtcgcggtgaatatcttcacacgtaaaccttacaacgtcctccagcgcgtcaccagcggccttacaccatgcatcaatagcccctgtgaactcccggatcgtataattagccataagtcgccaccctgcgtaaaactggacggtaggcaacaacggttcccgttggttttaccggacgcgcattaacaacgcggtaacgctcgccgtctacttcgatttcgtcaccctccatgattggcacatcgtgagtgaagaacccgcgcttgtcgccagcgaggatggtttcgccgttaatgtcacggtcatttacatccctgatcgcgcccttgattgtcgttaccacctcaccaggaatgatatcttccccggtttccggatcgattccgccgccagcgcctttcgtgtacttgttgaacacgccgtcagtgtcactgaaaaacttaatgcccgcgcttgcgcgtgcctggatttgtttgtagttcatagcgatcacctaccaattccgcagcggcgaacgttcccggcggtaagaaggccgaagccgccgccgcgcatcttgagcatacgccagtacattttgccccacggcgtagaaagcatttcgttgtcgcttgacgccgatacgcgatcgaatgtttgggaaaattccccggtcagggtgaacgatgccactcgctgcgtgtaagattccaggctttcgccttcttgcttcatcgcgccatccaaaaacattaggtgcatggtcatcaatgcgatcgccgtaacaatggaatctccgaacctggatttgcaaacgaactcttcggcaagcacaacccacgcagacagcagttcatctggaacttctttaagcggaggtgcaaggctgcgcattttatcgatcacatcttgaattgtgtaactcatggtcgatctcctgatatgaaaaaggacgccgaagcgccctttgttggtttttgttattccgcgcttttaggctgcacgatctctttcgctttcgccttcactactgcgatgtattcgcgcgtgcgtttcgggttgtcgtagaattcgacccggcctttgaagatttcgtggcggaagcggtcgatttcgttttccggcacttcaaaaacctgctcatagacgtaatttttgcctttatagcgaattgcacatgcaccaacgttttgtagttgaacaacctgcgacgcctgttcggcactggtggtttctacggtttcgatggtttctacggtttctacggtttcttttttactggccattgttaatgctccattggtttactttaggtttcaaattaaagcacatcgtatgattcaatgcaataaaaaagcgcccgaaggcgctttttgattaaatcccggtgagaatcgcaatagtcagcgggcggtaaacgatgagaccagtgcatttggaggtgcacggaactttgaaatgcaggtctttcggctgcatcggcagcatgttgaaccgctcagggatctcgatgctcatgttcattgggtctttttcgtatgccagcacgcctttggtgcctgcgccgtcaatatcttccagctccgccatcgccgtaatggtgatgttcgggtggttcttggtgaaccaggtcagataagagtcgccgctagtgtccggcatctttttcgtcagaagacgacgcttagacggaggaatcacgatgttggtcgcgtgatggcggcccagcgtagtttcttcgatcatgtttagcaggtcttccagatcttcgaatgccttttcagccgccgctgcgtcatcgccccaagccgcgctggcggtcatgcggttaatgttcggatggtcgaaaacgctaacgatgccgtgaggagcggagcctttgaacaccagatcattaacgagcgtctcatgaccttcgcgggccagagttgccttgcgatcgctcaggctggaacccagcgccgcgccagttttaatttcgtcgatggaaataaaccacgcgttacccaggcggaaaactttccctgacttctctttcgccatcgcttcaacggtcggcaggtcgtcggtgtaatcggcgataattttcgcagaagttacgccatcgaattctagccactcaaagcgtcgggcggtcggtgagatctcggtagttaccgggaaaagctcaagtgcgctggtctgcgggtatgcctgctcatactggcgattcagtaattgagtcatctgcttaacagtccagataccgtaagcatccagttttgcggcgtcgacgcccatgccctgcattgcgaccttaattgcactctgttcgaatgcatctaatttcatagtcatctgaaaaactcctgtttgtgtatttggcttaacgagatgaagaatatcacgaatcgttaagccgtcaaaggtttttttctggtgcaaaaatggggccgaagccccttactttatacgccagcgtcgccagccgcagccgccggagccaccgcgccctgaagcacctgaactttcaccagaacagtgccatctgcgtttttggtgtattcgccagtgtgtttgtagccagttttgataaccccggcatcacccttcgctacggtgccagttgcggtaaaggtaacgaaagaaccgaacgcgcaatctgcttctgtaacagtggcgtctgcgatcgcccaaatgcggccatgagtcataacgttaaccgcgctctcatcgtcataattgccttcaggcgagtaggcttgcgagaactgcgcgatacctacaataacgtcgctcgctgcggtcgctggcttaacgaccttgtggccgttggaaaccgcgccagtggaagccaccagtacgccagctttgatatcgccttcagcaacgcaagtgccatcgatattgtaaagtgacgtatcagcgatctgccccgctactgcaatatcacgcttgcgggaataagaagctggaatctgtgccattttgaatctcctgtttatttggtctggtagcggcccgaaggccgcaaattattagcggcggaattttgcctgcggatcgatgatttcggtgccgtcaagtttcggtaagccgcctttgtctttttgctcgccatcttcttttttgccgaagactttggagcgattgccagccatcttatcagagttggcgataaagtcaaaagaagcgtcgatgtacgaatcttctttgtcagacagatcacgaccgtctacctctttgatgtaagcaaccttcatcgccttaacatccaggccgtcgcacttgacgccagcggcagaaaccaccgcgataactttctgttttgcgtcttcgtcggctttgattttagcaacgcgggcggcaacttcatcttcaatgccatcaactttggcctgaagcgcgtcacgctctgcggtgatgctagttacctgactggttgccgatgcaacttgcgcgtctagtttggcaatgtaagcgcctacgttatcggccacttcaacatctacgccgtcaattttaatgatcattgttttagctcctttgtggtttgagtcgtcatcataggggaattcttgttcgctatcaagatttaatttcgcaatcccggcacgaccacggaaaacaagcgcgacgtgattcacgcgaatcttcgtttgcaccgcatcaaagcgaacccaatcagagacggaatcatttttcatctcttcgaagttttccggtaggtcttcgtcgaaataatattcgccagttgcgttgttgccccaacctttgcgatcgatatcgaccgaagtgtagcccacggataactcagccgctacgcgctttttggcttgctcgattgactcgccgtcgtaaatcatcaccggaacaagaacgccgatcccctcttctttgccagcgccggaacacgagccaacgaccaggccttttgcgttctgcgcgttcaccatcttatgacccaaagtgattggcttaccctggtatgaagccagcgattcagcatcaaacacttccgaacgcgggcggaactcgacgcgcggcccggttggcgtctggtacgtctgcgcaccgatacgcgccacgatcggagtatcaaccagaaagccgttctcatcgaatctggccttcatctttaccgtgtcgaacctttgaactcttttcatcatgatacctctacattgttaaaatctggaaccgcccaacaacggcaaccgtactcttcaccggggaaaatgccgtcaccattaacggggcgtcgcttaccttctagcttgatatggctctcgcgctcgcggtcgtccatcatcccgaaccaaaagtaatgcgatactttagcatcttttaggcgctgcatcatcaacatactgttaaaagttccgatgattccgcttgcccggttgcgcgaccaactaccataaatggcgtatcggccttcgatgatttcatcgatctgcttgcgagacttgccgatgttgttggcggttctaactttcgtcgtccagtcagcaacgatatcgcttgctaacttcctgatcgacgcttcggcggaatcctgccacctatttagcgattcctgataccagtcttcatacccaccagcgccgaattctttcaggcgcataactgattcgttgttccgcccgccagccgcgatcgcaattgcaagccactgcttagaattgaatctatagatggtcaacccaatggaggaaagcgccgcaattacgaccgaaaagaacgtaatggctgattcgctgatatcgtcttccgcctggctgatctcctctgccgtggcgtcaaatttcagacgatctaagcgatcccgcatttctaccacgagttctgtcaccgcgtcctgcattgagcgggataactcccgctcgcttgcttcaggataacgccagtttgggattctgccgttaactttcatcatccgcctccgtgttgtttaagatctccgcgctttgcgtgctgcctgaaccactggcgcgatccggaagttttttctgttccggcgcgtcgccttttagcttcagttctggaatcaacgccgacagagtatcacgcgcttcgttggcgtcaataacctggtcggtaacgaggccgcgagccgcatcggagttcttcttaaagatatccgccttctccgcatcggtaggtagcgacaacggttcgaactcgacgctgtattcctcctccgttacgatgaactgtaacaggaattctaacagcggcttgtaatcgtcattgcgcttgcggtcaaccagtttgtagaacgtctgtagcgccgtgttctggcttgcacttacgccaccagtgtttttgttttttagcacgatctcgtgaatgcctgacagggcgacaatccgatccattttcgcggaaaggaattccgggatgcctgaaatatcggagttgataacggtgtactcttcgtcgtccgcatcaatgccgatcgtgtttccgacgccggaattagcatcaacctgcgccatgcgcaaccgggcggcgtactcgccttccttgtcgtcgcagattagcgccaggcctttcgccttccaaacgccctgctgcttgcgcttcagtagctgcgttgccagatattccgaatagtcgtagtcaagaatcgcttcaatgatcgacttgttcagcaccgaaccaccagcgcccttgtttagctggcgcaccttattggttactcgctcgccgtcgatgtagtgcatacgggtataatgcaccttgaacggttgcccgccgtttagcggcttcacctcgtacattttaggctttccgaatcgtgggcttcgtgggctggtttcctcctctgcgacggaaacggaatcatggtcgtaaacaacgatagattcgagcggcttaccccgcttcgccgccgaagtcaacgcgcgaccatcgttaaccatcgccaggacgtaggagccaccatacagccgcgcccagcaaagagcatcggtgatttgcggctccagatttaacccgtcccattctgattgaaacttggtgttatctgaaatgccgtttagctggaatccaggagcgaccatctcttccgggatcacgtcaacgattttcttcgccatgccgttttcatgatagaactcttcaacctgcgacattgttccaaatctcgccgcgatagacgcgagggttgacgcatagccagcgccaccattaaagatttgattatagtcgtccatcttaatgttattcatatttcaaccttgtttaagtgtgggccgtcaggcccacattatgtattagcgacccagctttttcaatcccgcaaggcgtttcattcgctctaccggatcgtcgctcaggttcatttccaggtttgcggcgtcaaacacgttgtcgcaaatatcatcgtgtggatgagaatcgtcatatgtaaacgcgctcatctccgcctcaagctctgcaacgaatgggtgattgtccggcagcacgacacgcccacccttgatgattggttgtgcatccatagcgcgagtgaccttatctttatcgcgctgcaccgggacgatctcgcccatgccgtttacagccttcgttaaatcctggattagacccgtaccgctcgccttgtcttcgatgtagatccggcgaaggtttccgcactccttgttccgacgccagcactgcttgatgaatgcttcggactgaacgcggagatctggcgcttcccattttccgcgaattccgtcaatgaagtagacgcgatcccggtacttgccccaatagcacattacagagtagtcgtttagctccttgaccttctgcgcggtgtccgccgtgatgaacgtatattcgaacttgtccgggcgcggttcgtgcgccttgtcggaatcgccgtaatagcgccaccactccgacttgaacacgttaccacccagggcgattggctcctgctgatactgcgaaaggaacgtataaagatcggcttcgcgtagcgcaaccaggttctcgattgattcgttctcctcccaaaatgaccagtattccacgccgtcaatgaccaccgacgggccggaaagcacgtcgcgttcgaactcaggtcgcaaccagtcagggagtgattcgccatattcccgcgttaccatcgccggaataacaatgcgatcgaagtcgatggccatccctccgctcatcatgaaccaggtggcatcctgcgcgtgcaatcgctgctgcacagacaggatcggcgtttcgtcgcctttcttcttcttcgctcgacgtgatcgaatggtgttcttcagcagaacgtggtttttctcacgcttcaccttcgagaacatatcatccggcttgtcgatatcatccagcgcgataaggccgctaaaccctggcgtcatgtacccgccacgcttaccgacgatttgtccgccggacgaacgggagaccatttcaagccttacgcggtcgttatcgtccatgacctgaaattcatcgatctgcttgcgcccgaactttgatggccatagctcctgccactcgcttgatgagaagatcttaatcacgcgatccgagttaccttttgacagggcgtcaccctgcgagatctgaaggtttcgaaccttccggcatttaagatacgcatacggcgcgaggtggattgaaaacacctccgtcttcgtggagcctggcgcaacgttaacgatcgtgctcttgcgcttcccggcgataatttcatcaaccgtgtggcaaaagtaggagtgatgccagttccacattagcttttcgccctggatgatctggaaccagatcttcaggaatagcgaaaagttgcgcgtactcagtgccttaattgccagcttatcggctggcgacaagtcttcccaaatgatcatttcgttcatagttgacccttacagcttatcaagaatattggtcactgcctgctctaaccgctcttcggtgatctcgttcttatccccggcgatagcgtcgatgttcagcactggcggcttatcgatccccatctctttaccgacgaaagaagcgttaatcatgccgacggcagcaagctgaaatttctgctcataaatcacggagtcgatgaactccatgacgggagcatagttggggtcgtggcggtagcgtccaagcgttgactggttcacgccgcaaaacaggcttaaccctgtgatcgtgaaaatgcgaggcttgttcactccccactcgttaacgtcgccctgaaacgttgccgtttccgcagccttgattgcgttctcttcggcccactggaagtaacgctttgcgatatcaaaaaattgttccggcgtcatctctgccgtgcgccctagtaccacgccgaactccttttcatatagcgctttaaagttgccttcgaagtgcgatttcgttacgcgttttctacgttcttcagacattttataccctccttctatgttgatttgcgagtatatcagatcgcgggcataaaaaaacccgccgaagcgggttcttttatcatatcagtttgtttcgccgattcagcgtcttctggagttttacgaaaggctcgcagtcaacatacggaagcggcgaaaaagctattcgttttgcgacaccttccgggtcgccaactttttcccaacgtgctgttttcttgttgtagaacatggcagcaaaagtgccttcatgtacccgctttgaaagtcgctcgacaagatgagccgcgccaacgtgatagcctatgaaaagcattaacagtgcaataatcagagttaacattgattgacttcccttatgtagttgatgttgattttatgcgtatccagattgacgccggattgcttttttgctttctccaccgcgtcggcggtgtcgttcgcttcaatcgtcatgctaaactcttgaatgcatgacttgcaaaagccgcccatttttctggccgtgagtatgatattgtactgcatcacaaccccttttgtaaatgccccaaagcggggcgagacttgcggatgtttaccgcctcttgtgtctacgcctttaacgatacccggtcagcgtgaatgcgtcaataggtcactgaatcgtttggctgttttttattcatactcgccatccctgcgaccgaatcggccctccaggtagccagcaatccagatgaactggccgcgagtaaccagtgtgttgattttcgcccaatgtttatcgatcatcttcgcggcgacctgatcgtaggtcttcttgtccttcttgatggcgtcttttgtttctgcggccatctgctttgctatgcgcttcacggcgttgtactgcgcttcattcagtccgaacatttggccttctcccattccacccaggttccgcgagcaatgaacacttcaacacgcagcggactattgaaatttttgtagatgaagatgaatccttttctgctgtccgtctccacctgcgtaaccgggaacgccagcggcttgatggcgtcgtccgactcactcatgcggataccagtaatcgttgcgccaatcggcatatcttcgacttttgagtattcaggcatacaatcgcactccttaaatttgcgcccgccataatggcttacaggcgctttaaacggtattcgatttcgttaattttttacgtggtggcaaggctcgccatctttgacctcgccccacgcccggcgcttgttccgttccagcttttccgccaccgcttcagccaactgctcatcgctgaatccggcgcggcgggttgcatcccataccaacatgaggatatcggcgaactcgctaatgtcatccggagcttcggcggcctcgatcgcctctttcgccaggtgcttgagcggcccgactggcccaacgttgccgaactggcgatccgaccactccgcgtgctgcgcccgaatattggtgaacgggtcggccttcacttccggctccgcccgcaggcattgaaagtcgctccacgtcttctggttgtgctgcatctcacgcaggctcgctaaagctccgttgatatccataccttccggccagttcaccttgaacgcttcaggcttgcggatatactcgacaagatcaccaccaagaacggtttgctgcctaatcgcctgctctttggtgtcgcagatgaggcggcgcgatttgcgcccctcgttggttccaatggtgtaggtcagtacccaaatcttgttgctcattcttctacaacctcgcattcgtctttgctcacgctgatattgtcaccagcctggataaactcgctattgcgcggagcgatcacgcagtaggagccgtcattgaagtggccgtcgacctcaagaacttcgccgatttttaggccgcattcttccagggtaattgagccgtcgccgttaagagtgtcgattttggtaattttgattttcattgctgtaactccgtttcgtttcgatggggtaactataccagcttacccctgatcggttttagcaattcgtgctatttggcagacaatccatttttgcactcaagcgccatctcaccacttaaaattgcgggaaatgatcacgctaccaacggcggaaagtgtaatccagggccagcaaagcacagggtaaagatcttctttatcggtagaatccgccgatttcaggaaggcccgcatgaggaaacagccgcacgcatacagggccagaataagaaccaccagggcaataattgcgtaaatcatgatgtttttccttgtctttggtggggtcactatgcagcaaccccggttagtgtttgtggttcgtgctattgctggagctttgcgaaagcgtcggccatcatgcgcaaaactcgcgcgtgatcttcaacgtcatagccaggttcggtgcgcatgatttcccgaatcttctcgatcgtggcgatagccgcctgaagttcaccagtcaggaacgcaacctgcttttcaagttccgcgattcgtgagaacggttcacgcatgaatgattcgcacgaggcatcactaagcgcccaatcgatcccggcgcgaataacggcttttaacagcgggtcggcgtcgccattggcgatgttgtcggacgggatcaggtgtatgatttgtgtggtgttcatggttaggctccatctcttgttagtgtggggatagtatgcaccatccacggacgttcgttttagcaattcgtgctatcaaagggcgtctaattccgcctcaatgaattcgtaccactcgtggccgtttacgggatcgtgttctgtgccatgcagccagtccgtatgggtggaacagaattcgccggatttgttgaagtaaaagtcggcccatgaccgcgcccaatcgccgacgcccgcgaacgtgccgaacttgcggatgtatgcgtcggtgtatccgcgctgcttcgcaatgcgcttcagtgcgcgaaccagcaacttgcgctgcgacgccttcgatactttccgcaggtggaaaagtgcgttttccggctcgccaccaacgcggatggtcaaatcttcgtcggtgtccagcgggttgacgatgaattcgttcaggtatccgccctggattacgtgcactgtgcctagcggttcgtgcacctcgacggcatcgaatacgcagccgataaggtggcgctcacgttcgcgggcagcattgacaaccataagtttgacggtgttcattagcggatctccttcacctggtgaacttcgagaaggttggttacttcacggatgccgcagtcctcgaattcctcttcggcccctgccgccacccttaatctggtgaacccggcgtcatcgtcgattgcgacttcaataacctgctcgctcgaaagctcgatgtatgcacagccgtaggaattcagttcttccagcagtgcgattaaattgtcgttcattgcgttgctcctgattggattgttcacttcagtaacgccactttatcaaatgacgttacggcagttttaacaaaaagtgctattctttttcgccgctgaacgctgcccgatacccacggcggaacccgttaatctcagacaggcggcatacgccaataatcatgcaaatcatgccgatcgcctgccagcctacgtggtcatgcagtaccaggccgcccaggaagaaggcccaatacagcgcgagtttctttttgcttactttcatactttcacctcaaatagaacgttgttttcatatggtctgttaagaaacatcgctatcttttcgtccggcatacggcacgctaaccagttttctcccaactccgttgttttcttgtcgtcctgcaaaatccagacttcatcaaggccggggccgaatctggcttgatactccttacccaccgtgaacagcggaataagtggcccgtaacccgcatgggtgcaaatcaatgttactgtttccattagtagatcccattagtccaaacgtagccgcgttcgattatctcgcgcagcctaacccttttcggcgatgggttaaccccgtctccgccagtgtagaaccctgttccatatgcaaaatgaacctgctttgcgaacagtccgccgcgcgcctggatgtaaaggcggtttcgtctggcgaaacttattagcgttctgatttgctcaaacggctcgcccttaaccttcgagatcttgcacatcactggcttttcgccaaattgcccggttaagcagtggcgatcgaattctgataaacgtatcatgcagccacctcaaagctgatttgcgaagatatgccatacgtggcttttcggcgtgcgcttcatgagcttgtgcgccttgcgtgccatgcgcttatagtcgcgggcggtaagtttcgttgggtcggcaacgaacgattcgacaaccaacccctcgtgatggtattccggcagccattcccgatgggttcgccattcgttgaaagtggttagcggaaggacggaatgcaagttactgtgaaggtgctccccgcgctcgccataatggaaagctccgcgcattttgccgtcattgcctacgtgcaaaaggtgaatgcggcttttcttgccttcgaagttggttccgacgatggcgacgactgcgtttttgacgatctgtttcattgtgaatctccgttgcttggtgtatggctattatgcccgatctgctgaccgggcgtttagcaaaaagtgctattcagaaaccgagcgcctcacgctccaggctggccagcgatgggaagctgaattttgtaacgtggtacgagccgcccacatagccggaaatgctgatattgttgaactcaacctcaacactgataatcttcatgttcttgctgaaggcgtacattgcaagcgcacggtgcgcccgcgccaggaattcgaattggttcatttaaagatcgcccctttgattttgttccagaaagcgaaaggattgcgcttcggtttcagttccacgatagcataatcgtcgaatccgcgatgtttgccgcaaagaatcggctgcacaccatccgtcataagatcgccaatgaagaaccacttgccgccatccatgaagtaaaggccgtggcatacgcctggcgcggcatgagttgcggtatctggcaggctgtataccctgccgcgagatttgaattgctgcattatcctgtctccttgcataatttggtcgttaatcgacttcgtgataattatgctcgatcctctgaccgggcgtttagcaatgcgtgctatttcaggccgcgaaggtcaatcttcgattttgcccaatcagggaagcgagccatttcgcccacctgaaccattttgtttccgccaggccccttatccacccatgaatcaggcgagtagctcagtagtcgaacattttcaacggtcgactcataggcccaaatcgagccatcggcatcaatggcaaccgtgttggcccaaactggcacgtcaagcgactgcatatcgaacgtgccatggatgttaatctggaaggctacaacgtggcgctgcgtgatggtggccactacttgctcgccggatttaacttcgtgaatcattgcgttctccttacatgaacattccagccaggcgcaggcggttgatgatatcgtcacgcttgacgcggaggccgtcatagtagtcttcgagttgtggatcccatgacggcagttcaagcagtgctttcatctcatcgcaggctactttaagcgcgttgaagttctgctcgacggcgcgacggtgggctgctgcgttcagttcgttgttgtggttgccaatcatgtttttgctcctctgtttcgatggggtaataataccgcattaccccgatcgcgttttagcaaaaagtgctattcgtgcttcttgaactcgtgaacctggtttccgccggaatggtcttcgatatccacgcggtcgcaggtcacgtaaaagccgcgaatgacggtgaagcgccacttacctaaccagtggaaatatacgccgtgctcgcttccctggacggccttggttgatgagtatgggatcggcatcccggcgaaggtgcgaagtttggttgttgctgaaaatcgtggcatggccattcctcctggcttgagccgtgtttgtggtgggagtacagcgccaccgaagcggcgctattgcgattatttgccctggcgtgcaaggtagcgccctttgagtttctgccagtgccagcgcatgacgtgttcgttatggtagttgctggttgaatatggattcttcttgctcaccttcatctcccggttgcttacttgatacgaacttcaacttcaatgtcggactgcggcgcgaagagttgggccttgccattaacgcgaatagtgagaatgttcgccttgcgatctgctgcgagaactaggcgaaacttgccagcaaacttgaccatcatgcccggcttaacttcgctcatcttgataaccttatccatcttcatcacctcagttcgttgtcgatgggtaaataataccggatctcgccatcggcgttttagcaaaaagtgctatccttccacctcgtgcatatcgccgactgaaaggtaataagcgatatcaaggcggctcattgtggggtaaggccagccgcactcgtgccagataacatcgccctcgcctttagtccacatggtttcgccatcccagcgccaaaggcggttgttgaggcgcgatccgtagaccgcgccaggttttacatcgctcgccttaaaattcatagtcgacaaccccgaactcgttaacaatctgcgccttgtaaaagccaccgtttgccgccaggttgtagcacgccgccacggtctcgaactcgcgcacttctggcttgctgttttcgtgttcccaggtgatcagagtaatcatttcgttttcctcgattcgttgtcgatgaagagataatacccgatcgctctgaccgggttttaacaaaaagtgctacttgttgctcaggtggatgataaatgccgccaggagcaatccgcaattaacaccgatggaaaacaggataaaggcgctcattgtggataatccaggctaatgatgttgtcggcctcatcggccatcatggtcaggacgttcgacgcgccgatgaattccggtttcgtaacagcctcgcctgtctcggtgatatgctgaatgtaagattgagaatccggaagaaatgacattaaaagcatgtcggctgtcacgcattccagggcggttggattttcgtcgtccgatgccctggcgatggcgtcgataacttcctgttcgtcgattagcgtgctgcccaggcgcattggtgccgccgggtcgttttggtctggatatagtttcatggttattctcctgtgattttggctttaagtgccattgtgtaaccgttgtaaagcaggccttttggcatcacttcgtcaatgatggcaaggcatctttcccgctcagagatagcgccctgtcgcctgtatgcctcagcctccaggtttgagccagtcattgcgtcgaactcggtaaagacggagattaaccctgcccccaggctcactcgcaacacctcgcccggctccagaagtttcagcaacggcctgcggaaatggttgtcgaccggatgaacgccgaacttctccgcgaactcctccgccgtcatctggatacgccgcccgccatccaggaacatgcgccggatctcggaagagcggttgccagtgaatgtgcattcctgcttcgcggcttcctggctccgcccggctggcctggtggtgtcaccaaacgtgatggattgcagccattcatggtaagcggcttgcttttctgcgtcgtaccgcatccactcggacacgtcgacttcttcgaactcatagcctttgtattgcatttgtgtttcccccacacttacggcgtttggtaatgtttcggaaggtgataatacaggccgcaggccgcgccgtcaaagggtttcgtcgtgtttggtaagattcgctgtcatcccccatatatccatatatacattttttcgcggcggaacatctaaaaattatggcttgcgcaagaggaatccataacctccccgtagaaatcttaccaaacatatataaagataaagagtaataataataatattattatttatcatatacttactatctatatatgggcttatattggtcaatttttgcgcaaattttaggtaagattattcctcccccacactcccacacgacgtaaatgttggcgaaacacaactcgacgttttgctggcttcgaacggcaaattgcgtgcatggtgcatacatttatgcaattcgttgcacatcatgaaacaatgcatcaccacattgcacaaaatgaaacaatcaaaagcaatcatgattagtcaaaagtaatcaccaggtaatcaaatgcaatcacggactattccactattccgaatcggtggaataatcagcaatcgcaggaatagcactttttgtcaaaaccaaccagatcggctttgctatgatgacttcaacgaaacgaattgagccaaaggggctaaagctatgaaacttcaacgcgaatcaatcaacctgggcagcgagtataacggcaagtggaacttcgttatcatggatagcgacgcagacaagatcgaggcggttgaggaagcgttatgcgaaatggccactggcttctctgtcggcggcgaagagaaaacctggggcgactactgcgaccaatgcccttgctatgatgacgggtatggctccggcttctggattccggtcgaagatgttccggccttcaaagaggcatacaaggcagcgaagaaagcagtgaaataagcacgaattgctaaacgccgggccgctaggcctggtatagttaacccatcgaaaccagtcaggagaatcaacatgaaagcatttgcggatgtagtcgtcggggataaaattcaatatggcgcaagcgatctgttccgtaccgtaaccgatatcgagaagggtcgcggcgtcaatggatttactgtcttcgtggtgctcgacggcgttgcacgctttgcggttgacgctcgtgattgggttttctgcatcgagaagggccaggtatgaggaaacggcgggccggggaggtggtttgcacctgcgatgcttaccccttcccgcacagaatgttcggcggttcatgcaacgggatcgccattgtcattgccagtgttggcggtgcggagtgccagcattgccagctactgaataacgggtcgtgcgaggtgctcgcgggtatcgagaacccgatcgaatgccattacgtcgccgacttcatccaccaaaacgaggttaaaatataatgcgaacagttaccatttcgaacagcttttcctacatcatcggatcgcctgaagagcgtatcaaggccatccgcgacaaggcgaccaatgacgttaccgatgccttcagcgctgcggccaaagctgcgatcacgcattactacggtcgtggcccggaagagttcagtgcagacaatgcgcctttcctggtggtcaaaaaggaaggtggtaatgtatggcaaatcaacgacaagcagactggcgagtttattttcggatcggttccgtgccgggtaggaagcaacgatgttaccatccaggaactcggcgaaaaagaacctcgcgttcagcgcacgatctacattagccaggattacgcgacctgcgttccggcatagcacgttttgctaaaacaacatggcgggatagtggcatactatccccacaccaacaagcgaaggagctacacaatgaaccatccgaagactgattccattctcgccgtccttaacgcgcatggccgcgtcgttctccgcatgaaccgcgcctccggcttcactcagatcacgatcacgaagtcgaaaggccgctacatcatcgggacggttccgggcgctcgcctcgttcagtcctccctggctggcgtcacgctgacgctggaatcgaacagcatgttcattgaggcgtggaaagcatgaaagaaaaggttatttactgcatgttcgacggctcaggcatcatgggcctgccgtgggccattaagggatgcaaggtgtattgcttcaatgccgactccggcgaccacggagaatatagcattcgaatggttcaccccaatatccagtatgttaacatttggatcgacaaggattttgacgtgaagcgatcgattctcggcattcccgatcctgacttcattttcgctttcccgtcatgcacgctgttagcgcatagcggaatcaagcacgtaaggcaagataatgacgttctatcagccgcagatgatgcgaagatggtcgagcaattaggcaataagtatggttgcccctggatggtcgaaaacccggtcggaaaattgtcgtcactatggcgcaagcctgacttctattttcacccgcgcgacttcggcggctatgtttctccgaatgaacctgtgtggcatccaaaaatgccccactgtgacaattacacgaagaaaacgtgcatatggcacggaaacggttttgtcgaaccgaaacggctcccgccgccggacggagtagaaggcgtgaatttcttttgggcctggaagtttttgggcggaaggtcagaaaggactaaaatgctgcgctccattaccccgcgaggttttgcccgcgccgtgttccaggcgaattatcgagaatagcacgaattgctaaaactacccggcgaaagtcgggtagcattaccccatcgaaacgcaacggagtaaacggaaatgaaatttattatcttgatgatgttaactgttttgtgtatgtccgggcctggtggttttatctttgccgtcatgctgttagtcgttgccgggattattgatgttcgtcatcaccatgtaatgactgatttaaggcttaatcggctgattaatgatatcaaggccgcttgcgaaggcatggaaataaaggtggtgaagaaatgatatctcaaaaactcgccgaagtatgccgcgaagttctcaggatgaataatggcggcgcaaccctggctgcgatgcaaaataaaattgagtcgcatgttggctttaaattgagttgcagaaataaagctgactttctggatctggttaacctgtatatcgagatgggagaaagaaaataaatggcgaagtcaatcaagattaaatgcacgtcaagccgtgccgttaacatccatgaaaacaacctttattccgcccgcgtcgacgatgaaggcaacgtgtcaatgatggtatataacagcgtcgaactgaagaagaagcgcgttattttgtcggtgggcgttagcggcgagttgtttattgctggcgacggcggccaggtggttgcgacgttcatcgaactcaagaccaaaacgctaaaatgcgtcggccttgaccatagcaacccgatgaaaaaatccttcagcgtcggcaagcgctaccaggtagaaagcggtcgtgcgctcggtgcggttgctggatacatcttcgaccgtgacggatgccgctggacgctgtaccgcgaggaggttggcttcagtgtatcggacggaacgactttcgaggctaaatacctgtgacgggttcggggccatgcgccccgataatccaagcgcgtttttcaagcgtgtttagattatcactggatctcggatttaatacggcatatgattagccgaacgattaaccaatcaggagcaagggcatgtttttaaatgaccgcgtatcaccgcaagatattatcgccatcgcagaaagggaggggatcagtcccctgcgtgttgcgattcgtgcgaacgggtatcgtgactccgtttcattctggccaaagcccaaagatatcgacgtaaacgcggataagtacccaacaatctcgatcgccaatgattacgatgtggtcggcaaactggcgctcaatgccgcccgatctgttcagttcccggaatcatccgcttacatgcactttctcggaaccgtgtccgccgcgatgatgggtcgcttttgggttgagtaccacggcagcgagcaaccgacaacactttacgttatcacgtcgcagccgccttccgctggtaagtctgccattaactcgctggccatcgatccgatcgtcgccgaagtcgagcgcattaacgagtcgcgcaagaaggagcgtaagaaaatcatggcgaagctgtccgccaacaagcaggcgctaaaaggggagttatcgcaatctgatatggtgaaacttttcgaagaccgtgacgaactggaagagaaacttgaaaaattatgtgatctaactttcccggtatccgataccaccccggaaggcctggcgaagattaacaaccgccagggaaactttgccgttatttccgatgaggcgacggcggttaacagccttttggggatcacgtatggcaacgacggcggcaagaagacgaacagcgaactggtgctcaaagcatgggataaaggccacgtatcgatcgctcgtgccgacgttagcaataatatgtcattcgtggctttgggctgcatttgcgtaattgcccaggatgaaaccatcgacgccattatgcaggctggttctcgcgggatcggtgtctcggagcgtttccttttggttcgtgagcaaacccgtttgggtgagcgcgtgttcatcgacgaaaacgggaattcgacctatgagccgatcgaccagtcactgaaggcggattacttccggctgattcatgacattatgagcgaatcaaacgttaagttgcaggttactgacgcggcaatgcggagactgaacaaggcccgccaggagttagaaccggagttaggtgacggcggcaagtattcgcatacaatgcttcgcggtgcgatgggtaagtttgataagcaggttatgcgcctggcgtccgtgattcacacgatccggaactggcaacccggcgggaaacgctcgaagaagatcgacacggcgaccattgacgaagcgatcatcatgttccatgaattgagcaaaacgtatttgtcgtcggctgactcttccggctttgctggtgagggagcggaaattaaagcgctgtatgacgttatcgccagtcgttgcaaacaggcaaaaggtgttatgaccgtccagggcatttataacgcctgccgcaacctgaagatcttcaaaggccaggccggggtgagcaaaaagattaaggaacgcttattgccgaagatggaggaattaggctttatctgcgtgatggattccgaagtctttatcaacccgtcgttcatgaggtaattgatgttcattcttgacatttacaagttctgcgaatctcgccgggaattcacccggcaggattttgcgaagttcgtttacatgcaccgcgaagcgcctcgcctggcaaaagccgccaacgtgtcgcaacgcatgttcgcctcaatggtctctaaggagtttttagcgcgaagctatacgaatggataccttgacggaaaaaacggcgctgtgtggtgtacggggccggataacagggaaataggttttgatttccggtcgttcgaagggatggataaccgatatatgtgggagatgatgcaccttgaccaactcagtgatgaacagcttttcgggaaaccaggtggaagatctgataacggaggttcacaggcttgtttgtgtgaaacagatcacaccagaaaattacttgcgtgccgcgctcatcttgctctatcaaggaatggccgcaaccaacacggttgaacatggtcttaacgatgaagacggagtagcgctattgcacgttaagcggtacatatagaaaaaggggcattacgcccctttgttttttcgttcccgccaaaggccgaacaccccgatcgccagcattaccaccccaacaccaccaatcagccacggaatcaggcttccgctttcatcattccggatctcgatcttgtccgccgtaatctggttggcgtgaatgctggaggtcgtcaccgatttcttgttcgacgtgtcaaccttacccaccgccgactccttaaacgtggtctcctgcttgctcgacgtgtccgttttgttcgtcacgccaaccgcctgtttcacgttctccgcgccgacttgcgccgtcatatccggcttgctaccaaccagatcggaaaggattgggacgcttgacgcgcaaccggaaacgacggcagccgcccacacgataaagccgatggccagcgctcgttgaaagtttaatgtgctcatttcagatccttaatgcatagttgatattcctgaacccggcgattatacaagccttttgacttctccattttacccgttttcgggttgcggtagtacgtccagcgatatagctgctcgcacgcctcgcgcaatcggccctggttcgttaatttcagcatggtgctgccagaatatgcgccgccgccagcgttgaacgtgaagctgtacatcgacgccctgaaggtgtccggaacatcgactttgattttgctgtcaacggttcgcttcgccacctggatatgcttagttaaaagcgcgtcgcactctgaccgggtataggtttttcccttgataacgtccgggcctgtgatgccttcgcatacagttgggacgccagcgatatccgtataaaccttgtatttcgtgtcctccactttggggaggaacgcgaccgcgatcgccaccgccgccgcgaatgtaacccgcgttttaatccccatgttatttactcctgatcttcatcgccgttttgatatccccggcttccagcgcttcacgaagcgcctttgaatctcgccagcgcaaccacgcgccgaaggagccgaatagaatcatgaaaaataagccaatggcagcaatgattaattgcccggttgcagatcccgcgagggcaacgccaccgctgctattggttgccgcgttgatgaattcccgcatgatatgcaacctctgttagttaaatggtaaggtgatgatatatgcattaggccaaattaagaacaaaaaaaagggaacccatcaaggttcccaatcgttaaggtggtgataataaaggcattaactttataattttaatgcaacatctgacaccatatcaaggattttttgcgcgtcgtcttccggctcgccagtggtcatatcaaaatcaagctcgtgatacgtgtcgcaaataagatccgggcgtcgaatatgcttgcggctatcaccctcaaaggtcatgccgtcacgatgaaggcggacgacaaatacgttaagcgcctcatgcgctgcgacgtgttccacctcctcatcgaagccgccgtcgctgacgatgcagttaaacggcgaagttagcgccgaatcgcaaagcaacttaccgaactgatttttgcccagggtcggcttgacgaaattttcgctaatgtgaatcatgaattcacgcggagaacggtcgcccaaaaaatcgcatttcacttctttgtgcttgcggtcgtggtatcgggcagtaaagcgtgcaaaatcagccgatcccagcacagcgcgagcaatggcaaacatcggctgtttgaagctaaggttcttgtattgccacttccgcgagatgatttccgcgatagtgtcctttccgatgcccggcgctccgttgaggataattacatttttcatttgtctactccgtgtgattttaaatgatcgtgaagattgtcgccgtagtcgcagacctggtaagtcgtgatccccaggccgcgcaagtgcgcaataacattgggggaatcatcccacgctgcaacaatgcgatcaagtccgattttgcgtaactcctcctccttgattaccgtgtctttacggttatcgctggcgcggcgcatgattaggctgtcatatttcaccccgtagcggtcaagccaaatcattgtttcggtcttcacctcatcggatcggccagtcaggatgataacggtcattccggatcgataaagcgcatttgccacgtcaatagtgctttggattgggctgtctccaattgacgcgccattaaattcgctccaactttctgtaaggtggagatcttttttcggcagcaggtgcaagcggtgggttccgtcggaaagcgtgccatcgagatcgaaaatgcagatatttctattcatcggttttccttgttggcccctcgcggggccgttgtggttacatgttcgggcggtagataaagcggcctacttcgccatattctttgctgtacagaatcaccgcagcctgccgatatgatcgccatcctccgcgagcggcgtaggcatcttttgcgcccaactggccatgcacttcgtcaatgcctaacgagtgttccgttacagtctggtgatgccagtggccggaatgcgtgtaaatgtagtcgcactggccgaactccttacggaagtcggtagccatcgcagcaaggcgcgtttccggctttttcattgtgtggccatgcgtatagcccagcatggttttgccccacaaggtgcgatgcaggatcgccggactaacatcaacgaaaacgcgcggttcattctcatagaacgccgccagagctgcgcgtagccaaatcatcccggcctggtcgtggtttccttcgatcacctgcacttcaacttctgcgtgattgttaagcagtagcgacacggcgcgacgcagcgaacgaatggcaacataaacaagttttgcgtatcggctgtcctgatcgagaacgtgaccgcttgccggggttactgcgtccaggccgtcactgtgaaggaagtcaccgccgaccagcaaaacagctttttgggattgcggagccaccgacacggaataatcaaagaagcggtttagaaccttctcagccgtgctggtgtcatagttctcgccgcattcgtgcttgtgcgccatcgccccgatatgcaagtcgaagatcgggtacagggcaagctgatcttcaatgtagaacttcgattcatccagcggttgcggttcggctcgcggaaggtcttcgcagaaagccgcctgcgctgcctccataagcgcgaccatgcgatcgcggtctacttccgacttaacccaccgaacgacctcggagccatccgcgcgaatcatcgtcgacgtgcctttgatgccgaagccgtccgggatatgcttcgcaacgtgggcgtttccgtgtaggtgtccttgtcgcgccaggcgaacgccgcgacgttcaacacttcgaatgttcatgccgaactcttccgcgatctcgcggtaggtcttgccttcctcgcgggcggctaaaaattcttcgtctgtgattttaggtgacataatttatcccaattgaattgcatagttaatgattgcgatcgtaaacaggatcgccgtaaataagatcgcaatatatcgcattctgcacgctcccgctacttgtaatatttcttctgctgcttcgactcgtggatgaacatcttcagcgcgtccgcctccgctcgcgttgccactgctattcgcgtgcgcttcaccgggcgctcgtgtagataggtgagcttcccaccaaagataattgatatatctttgatatcgaaatactttgcgatcttcacgatatcatcacttattccagcctcttttgcgtgctgccatacggcagcgcgaccagtctcgacaatcatcattcgtcaccgtaaatgcaaaaaccttcggccatttgctcatacatggccacactttccaggccgtaacctgcgcgaaaataaatctcaccgactacaccatcaaggccattctctaaagggttcgccatgtagtcggccatgcacatgcgagaaaggttaaccaggtggcgagatacaacttgcgcttttgctggtacgatcttgatggtgtctgcaatggttttggttttcatggcgtttgctcctgattggttgatggtgtaataatacccgcacgcggcgggtattgtttagcaattagtgctgttttgcgaaatactccgcgccttcatgagatttaaactcaatcaattctcgttcaagaatttctggccagtcagcaaccgggattccgttgtccatgaactccatgtaggttccgtcgatggtgtcagcaaaggctaacttttcctcatccgtcccaatgaagccgtatttgtccagcaattcaaccacgatccgaagatactcggcgaaagattctatctgttccattttttagatcccacgtttgcgcatacgctttttagctaatgacgggcaaatctcgctaaccggaatataaagcgtcttttgctcttctcccggcttgagtttgcgcatgatgaaaataacgctgcccttattgttgttgtcgactggcttcccgcttaatccgttgatgaaggcgaggcgaccggaacggcttacttggttcccgtcttcatcctcttcaacatccgcaacaatccagataatttcggcggccatcttctgcgcgtcacggaaccaggctgtagaattgtcgccgggtagcagaatgtcgatctggttgtcgtgctccatttgctcaatggctttgagcacgaacggatctggaaacgagtaaggcggattaagccaaacgtgcttgttttttccccaccagcgtttaaggcaatccgttttttcgtcgtaaaacttcgcacaaactgcgttgctttggtctgctgctgcgtcaagatcgtaagggccataacgctcttccatgtatgcgatcaggctgcgatcggtcgcccacttatcgcgaacgatatccggcgttttgctcccggcgtatcggttgcccgtaacctgataaaacttgtcgggcctgacagcctgatagtgtccaccagtggcaagagcgttacctataaacgtctcgcgctccaactgctcaaatgtcgtgaatgcgtcatgagtatctttgtctgctatatctttcatttagaagcccttaaaatgaccagcaagagtaattacccaaaggccgaagccagtggccacaataccaaaaccgattgatgcgattacccacaagaagtttttcatgatgtttctccgttcttcgtttcgatggggtaataatacccggctttcgccgggcggttttaacaaaaagtgctatttgatggcatcgcagaaagcgatcttgaattgctcgaagccataggccacggcggcgaatccgccgcgacggcgaacggcagcaaggaattccctttgctccttgctcactggtgacgcctgcgccttgccctggcgctttagctcgatggccgcgaacgggtatttgccgccgaacccaatcaggatcagaatgtcgctaacgcccttcagcaaccccatttgatgatcgataaccgcgctcgccttgtgcttactcccttcgttaaccgtatgccagaacagataatcagggtattcgtgccgcagccacgaaacgctattcatctgatcgatcttctcaagcgggcaagcctttacaggcccgccgtagtattcgagataatcacctttatcagtaatcactattcgtctccaaaatctttgcgtgaaataatatcttccttcttaccgttaacgcgatgcgttacgcgcttcggtgctcggaagtagtgcgcattctcaaggatttttcgcgcattcttcatcccgcccagcttgccgcgcattaccgcgtcgctaacgtgctggaagactgccttttgccgccacaacttgccgcaaatctgattctctgattcagggaagaacttttcccttgcggtgaatcgctcgccgtcatggttcagtaacacgtaattgaagatgatcccggactgatttcgagtcaagccgatatcgaacccgacaacatcataccagtcattttgcgtatagtgcttcccggtgagattgtcattggggtctttaagctgcaccccgcagcatctgcactggcgagcaacaatatcgttttcagcgtaacacccttttactttaatcttccctgttcgcgggtctttctggtcttcgcagcgctgcgatataaaaaagtattcgcagcgattgccgttgctgtctttgtgaatgcatcggcgggcgtacccgctattttctcccttgcattccgggcaaattttcgggccgttcttgctgctcttgcgtctttggtattgtgcctgctcaagaatcggatcgaaatatagctggcccaaatcgtccatagtcccggcgaagtcccaaactaaatggtcttccttaacccacgagtaaggcggctgtttttgccagtcctttagaagtcgcattccacgccccaaaagctgaataagcaacgtaagcgacccgatcttgcgcaatatcaccgaaaaatcccaaaacggaacgttaacgccagtggttagggccatcacctggaagatgtatttaatctcaccgcgattcgccttatccagaatttcgccgcgtttctttgagttggtcttctcggtaatgatcgcgtatgtggcgtccggaggtagatagcttgccgcctccttgcaatgccgctggccagcgcaagtaataagaacgccgtttcgggttttcgcacgctccacgaccttttgcataatcagcttcgtcatctcgccggattcatggattttcttttccatcttgcgcaagtcttcagcgctaaaatcctgcgttccgtcctgactggagccgtggaattctgaaagatcataccccaacccatctgcctcggtatcgccgaaaatggtgggaacaaccgatccgaactcgacaagatagtttgtgttaatgtcggtgatctgctcgcgccagaaaccaggctggctcttgtcttcctgtaagatcggaatgacgccgcgaaactccgaacccgtatagccaacaatgcgaagctcgcgccccgtcttctgaaggcaacggcgcattaactcaatgattacgatggtgtattgagtgcgcccgccgccgaattccacgtcgtcgaatttttcgtcgtatgggtggtcggcatcgaccagttccccgttcacgcgatacggcttatccttcggtctgctcatgtactcgaacgattcattgttggcgatcgcttccgccaaatcttgccagtcaacctggtggcattcgtcaatggccagaactgaaggcacgtagtcgcccagcattttaaacaggccattaaccaccgtcccttcagatccgacgacgatcgggaagtaagcggccttcgtgcctaacccggcgcaataaacggagttcggaacgtcgaggttactgatctcctcggaatcctgcttcacgatctcggcctggcgagcaagaaccatcatgggtaagttcattgccttgcactgcgccgcgagcatggcgatcatgatggttttcccggcggaaaccgaagccttaatgtaaaaaggatgttcatattttgcgatccgcttcgcggtctcaatatacgcaaccgcctgataagggtaaggaacgatatttccgacggtgaaccgcttttgtattaacgggatcttgtctgcgtaggcttcaatttgttgttcaattgtgagcatgggcaatcctaatttgtcattcgcatagttgcgtgtataatacagggaacattttatcatgtttaacaaaaaatgctatgagggttaaattatggaacaaatggcaaaggtggataagcgaaccttgaacggcaataacggaacatctcgcgggaaggataagaagaaacgcaagcgaccgactggttactacgtgctgaaggatgaggttcgcgccgggttgactgcgcggatggagcttgttattgatgccttcggtggcatcgctggaacggcaaaagagttgggggttagcatccaggttgttcagcagtggcgtaagcgcggcatgatctcagccgatggcgcttatctcgtacacaagagctaccgacggaacaattgcaaaggtttccgcgcctcattctgccgaccagatttaaggtttgacagcaacggcaagccagttacgcgccgatgcgaccgccgggaaatgctccgcgtagtccgatagcacaatttgtctaaacactaaacgcctgccgggttatcattctcgtgtaggcgttttttatttggaggtaacgacgtggatttttacgatgaaaaagaggttttgccgtacatggctggcatgtggcgcgaagcgttgcagaacatttgcggcatccactctcgatacttcaacggcaagcatcaggactgcccgaactgcggcggcaaagaccgattccgctggactgacaagttagaaacgcgcggcgatggcggcgcatactgtggcggctgcggtgctgataaggggatcggctggttaatgaagttaagcggccagccgtatagcgagtgcatcaatattcttgggcgctatctcggcaaggttccgcaagaatacgtggtcaagagaaacaagcaggtagctcgtgataacgggtatgactacggcaagatggcagatcatgaaagagtgctggcagttttaaacagaacggaggccgtcgatagcacgcctgtaacgctttatgagggcatcgaaaacgaacatatcaaatcatatcaggtaggcataaaagcacacgagaacggcagacaggagctaattcacgcgctaccaatgcaactcgtgcatgaggatgggccggatgataagtattgcaacatgctgttcattgatgaggatgggcgcgagaagatgttagctggcgatctgaccttcggatcggtgatagtgaccaatcagagcgacgacggtaacgggccgatttaccttgctcgctcctggattgaggcgatgcacttcaatattgcgagttcattcaagtgtgatgtgtgggcctgcatcatcccttccaatgtcgagatcgtggcgtacaggtataaaggcaagggcggaaaaggtaagcgagaaatgcgggtagtttgccgtcgtggagatcggtatatgctggcggctgctgacgatcgggatcttaaagttatcgttccgaacggtgacaactttaagctcggatttgaacgtaagttgtacaaggcatcgtcgcttctctgattaaatattgaccagaaattaggtaagattgagaaaatcagtcttacctttttttatgcctgaaattcagtagcttgcaactgctagaaccactttaggtaagatttagtaagatgaatcttacgtaaatttcgcgcaaaatttaaccaattatccgcaatatatagatagtaagtatatgataaataataataatattattattgctctatctctctatacttatcttggtaagatttctccgtggtacgtgtcttttttcgctggatttcgcgccagatttttcatggatatttacctatagggatcttaccatcttaccgatttgcgttaactttatgaaatgtatggaaaaaaccacgtaagatgcatcttactaaatcttacgtaaatttcgctcattttttgaccaacaacggatagcactttttgacttgcgccgggaatcgtcatgcgtatacttaacgcaacgaaaccacaaatggagcaatatcaatggctgaagcaattttcagggcatacaccagcagtgaattgacaaacgagcaatatcacgatcctaactcctggtgcgcggagtacgttagcggctcaagcctcggcgagatttacgcaacatccccggcgcactggaaatacaaggtgcgtgaggaaaccgccgcgctggcgttcggaacctgttcgcatacctgtatgcttgagacggcaaaatttaatggcgagtacctgcgggcgacttctccgggcgaggttaaagatctgattacgtcgaagtcggcattgtctgcgaagctgaaagcgtgtggcctgattgggacgtccaacaaggattacccggaacttctggaaatggcatatcgcgccgggattgacgtaaatgtttggtgggcgattgaactttgcgacgaaagcgccgcgatgaactccgggcgcaagctggttaaggatgttgatttcgatgccgttgttcaaatgcgcagcgtgatgctggctaacccgcgacacgccgcatgtatcgaatcgcctactgcacagcgtgaattgtcaatcttcggtgagatcttcggcgtcaaggttaaggttcgactagaccatgttgacgttgtttccgatcccgaactaatcaaggagtgggggttcaacccggatgaggttttcgaggtcgtggtgattaccgactacaaaaccacgcaatcttccaagcctgacgatttcgggcggctcgctttcaaccttggttactatctcaagatggcattgcagcgcgatctattcgtgaagacttacaacgaaaaacgcccggtagttgtcagactgctaacgcaggagaaaaaatcaccgtttgctccgctggcgttcaccctgaccagccagcagatcgagatcggtcgcaagcagtatcaaagcgtgattcatcagtatgcggaatgcgtgaagcatgattcatggccatcatacgagtcaaacgcggcggaagtcgttttgcctactccgcagtttgtgaaatacatgttcccggacgtatacggcacaaatagctaaacactggtgcgcgcttgtgatatagtgcgcattaccaatcaggaaaaggaaactttatcatgcgtacatctgaaaaatttaccaccatcgcagccgcattaatcaaggcaaaatctggcttcgtggccgcaaagaaaagcggtaagaacaaccatcttgggaacacctatgcgaatcttggtgatatcctcgacgcgatttccccggcgctggagaagaataaaattatggtcattcaatccatgatggataccagcaccgaaaaggttatgcacctcgaaactatgtttttgcatgaaagcggcgagttcatggcgtttcagtacaatatgccgatcagtaaaaccgtcgaacaagcatacggttcaacaacatcttacgcccgccgttatgcgctggccgcagcgctcggtatcaagcaggcggatgatgatgcagaaattacgaaaatgacaccgaaagacttcaaaaaacgcattgacgcgtgcgaagatctcgaatcgcttcgtgagatctataagatggcgaaacaaacgttaacgcctgcggagtggaaaatgactgaagacgatatcaccaaacgccaggcggaactgaaagtcaccccggcgaacggctttaaccctggtaagccgcaagaggttgcgaagcgcgagccggaaaaggtagaatcaaaacctgaaccagaagcgcaagatatttcatctttcaactaatttaaccgggcgggaaaccgccccataggaatgacaatgcatgttgtaacaggtgtaatcagaaaagaaccgtacatcaaggaaggcagtaataataacgggccgtggaaaatgtacgccgtagacctgtcggagcggatgaagatccgcaatcgtgatggccaggacgaaacggtttacacgaactaccgcgccgttttctttgcaaaagaaaacatgattaagtggtacgacgaagcgctgcaaatggataaggtgatcagcgtcacctgccggacgcttcagatcgtgaaccgcgagcacaacggcacaatttacagccacaatgaaatgatcatgccgcaactcgaattcagccagcgcgaacctgcgcaaagcggcggcggcaatcagcaatcagggtggggccagcctcaacaacccaagccgcaacaagcgcctaaacctcaaaacagcggcgggaa

SEQ ID NO: 11 - DNA, 167014 bp, Unknown
  bacteriophage strain capable of infecting bacteria of the genus Klebsiella
cagacaaaatgaaaatcgctgagcaacgaatttcagaagttgctgacgttattgaacaggctaaaaatcctgcatctatggaaacaatgcgtaaaatcgttgaagtagctactcgtggatttgatatgcctccagctgacgatttcggagctttacgtcaataccaaaatcttgtcaattatatgatatccgcttatgtgtcaattgttggcgattctatatccaaagcaattgaatataaccgtgaaatgcattctcgtttaagcgaagaagaaagagatgcaatacatcattactgtggttctggatattcatttgttaataactatcttattggtatggaaagcttaggcgatccgattattgacaagaaaattcgtccgctcgattctgcctttgaaaaaggtttgcgtcttgaaccaggcactcttttgtatcgtggtcagcgaggaaaatatgaagactttaaagataacattgagtccaaaatgttttatttccagaactatgtttctacttcgttaagtccaattatctttggtgcttattcaaatgctggtgattcattaatgccagacgcacctagttctgatttagaaaacaaagaaacaactatcgatgcagtatcttctgttattggaacagacaacttggaaagagttgatagaggcgaggaagttgcctatggtgatgagtttaagtttgggttcattattcatggggctgataaagttaaggtagttatcccgggtgtcttatcaagttttagtgatgaggctgaagttattcttcctcgcgggttggcaatgaaagtcaacaaagtatggggaactccttttagaaatggagttggtgtagcgaataacaagacattcatggtagaaatgacggtagttccgccagagcaaatcgatgaatcggttcatctctatgatggtgacatcttgatggaacagggcaaagtggaacctcttgaagaaagcaagttcaaaggctttttaaatgagatttacttttcgccagaccgttctacagataaggttagctacacacgtaccatggagctactggctggtgctatcaacctggatggtatcccagaaaaacttgcataaagttgtttacttatcacaaggacgtgatactatagacttacacaaaccaatgaggaaattgatatgaaacacgtattccgctttaacggtattgaatggtctgctgatgttaaagatgcagagaagttcaatgaagaagttcttatcatgcttgaagggtttaacgaaggtactccgacggttcttattcaagatatcttccgtaagccaactgaaccatcgtttgttgaagcggttctaaacggtaaagcagaaggtattattccggtcaaagtagtttggactactaaagaaatgaaacttcttcgcactgagccagggtttattggctgcattgcataaaacaaaggggccttatggcccctaaattattctacttgtcgtagtagtgatattagaaattccaccacctgccccgcctaagcgagacaatcttgaagcagacgcactcaagccctgatttggattaatcgtctcaattttctgaatagctttatcttccaaccaatccatagcggcttgttttccaactgaaccggtttgcatgctacggtaagcaaacgtgacatcaaacactgctatcgtgttttctccatcatatgtaaattcgggagctccacatgctacaggcatagcccctgagaacaagcatacagtatgaggtaatccatttctagcatgaaggttaacttggatatcacattctacgtcttgtggcaatcctctcagaccagtcactgggtcttcaactgcatttacccaatcttgcattgctctatagttgcttgcttctgggtccatcctaaatgaaagaaccaacggctccatatctcttccagtgatttttatgttaggagcgttatggaacttatccatttcatatgacagtctattctctggtattttagcagaatacaccatcaagcctgctgtcggaaatgccatgttaaagaaatcaagcagataagtacctactgtgaattcacctaacaacgactgtacaacacgctgtgtcattgcgccaatcataaatgtattcacacctgatttgcgaacaacttgtcgagttccttgtgtcactatggttgttataccctgattgaattcacctggggtcaatccaagccaatttccatctaaacccatgttattatacagctctccaccaaagtcgtttagaagagcctgggttttactagagggcacagtagcgaatacaacagagaacatattagttctctggaaatcgatatcagccgcttgactcttaaattcttcgagagtaaacattattcaatacctccgatataaacgttccctctattaagagtaagtatttcacgcatagtaatttcaagcgtaaacgtgcttggaaggttaggagcgattgctaacccattaaaatgaccgttcggtgttttatcaaagcggatactctgaatttggcatggaccaaatatatcctctctaccatccattgatgtagaatatccaaaattacgaacagtccaaatcgttgggttagaaactacaataacattgcttaaaaacgatgttatttgctcaaacactgtgttttctactttagctccttctggtgctgccgatttaagtgttcctttataccattcatcaatagcagctttaacttcttttgcatatgatgaattccccgtcacaccgtaagaatagtagttaaaaatttcatagatgcgaataatttgtatgaggtcatctgcagacctaggagttaaatcccaagtaaacactttcgttctattgtcaggtccggcatacatactacgagcggtgttataaatctgttcaccattatcagccattaatccttgtgttaaagactctatcgacccaaatacagccgtagaagcgacgttgcttaatacaccagtagcagtaccgccgccgcgagtaacaagagaatcaccaacatcattaaatttatggctaaccgagtcaacgtctgacttagaccgcggtaatagaatattagctaccggcgcagtgcttgtagtagaacttgatgaattagccagtgctgacattggtgaatcgaatacagacgataacattacatctcgtctaaatgaacgcaaatcaggagtagttcttcctttaaaatcatacgctgtgaataataatccgttacgatacaagtcatgtactctcatatcttgtgcggaatcgtttccagctgagcgttcggccggaaactgcgccaccttagtggttggcgcattcgtcagtttagatttacctggggaaattcgggttcctgattttttgatgttttcaaggccatcggccagttcttcaaaaatcattatttttccttaagaggttttcatagcgccttgcattccaggagcagctgttgaagtctgtggaggcattctataaacgtgtgtgctattcttatttacagcggtattaacctgaataggttgcgactgtgtattagattcacgtgtacgagcagcttcacgactatccgcggcggctttaatagaagcagactgcttaacctcaggctgttctgtcgcaggtatagcttcggcagttggagcaggttctgatattttagaatcaagaagcttttgcaattggtctaattcaacctttaaatcttttgcaacttctggagataatttctccaattctttatatctggtggttgtgctttgtactgcatccttagcagagtctaatcgagtggaatcagatgcatcagttttttcaacatatgcttttgtacgcttgagttctgcctcagcattattacgagctgtgatgattttgaggcgttcgtcttctggcaagtctgcatacgctgactgctttttctctccgctcagcaatttattatattcatcgtcatcaatctgaccggtgaatttttggaacttggcagaaagctttcttttccattcaggctgttcgtcatattctctttcctgacggtcaacatattttgctctcattttagcatcttcttcatcgagttctgccccagtaacagtttgaaatctgtctaaagcagcgccttcaatgttatctgccgaatcgttaaatcctaatgcgcgtaacattccagcgagaagcttgctcattccgagcataatagtttctccgagcttgtcaattacatcgaccaagccagaaccaatggctttagctaatccgccccaatctcctttgacgaatgattttactatttcattcgacatctcgcttattgctgttaatagcggaccccattctttagcttgcttgttaaattcaacaaagttcttttcgaacaatttagtccaataattaaaatgaactttaattaaatctataagcattatcacgcccaaaaccatcgcggcagttttcgccatttgggccaaagcgctaacagtataactaaatagcatgctgctaattttatctgtcaatgaaatagtttttccaaaaccagatttaacgcttttaattaattctccaaattttaggtcaagaaactttttattcttatcctcagtttctttgttaggttcttttctttcctcttgctcttctgtgttaggaaagaaatccgcgtcaggacgtctatcatcctgtggaggaataagcctttcgagtaattcctctagcggctgctgaaccggagcatcaggtacttgttccgttattgtttctaacgatgttccagtgccagtcttttggacatcttgctgaacatcatgctttttagataacaagtcggcaagtttagtgagcttatcattaattaacgatgcggtatcatttagtttcgagacagcatctgttgtgcgttctgaagcttcagcagttaattcaacaccagctgaaacatcttctactgatttgataatttcgtttgatttagtttctattacatccgaaatcaaatcagtagacgcttgttggtcgtctaagcgacgaccaatatcttctagcgtattaatctgagcatcagcttgagactcagcctttttctgtggagccgagtcagcaataactcttctacgcattgaattcatttctgatttcttagtcattcaaatatttccattacgttaagcatgcctttgattggtccttcaggtccatcaatggctatagtgtttactaagtcatcagcccactttgtcacaaaagctggaagcttcataaagtttatatccattggttttccatctactgattcaagaaattcgctcaaaattgaatctactgaacctagtttggaataacgaggaggagctctgaatttgaattctttaccatctaaccgctgagttaatcgttggcaaatgtaaactttattcaaatcgtaggtaaaatcatctttaacaacagtttcctttattcggttgttaaatgctaacaagtgtagtacaacgatatcggattcggctgcagttaatcctggacaaattgaatctaaaagaagattcatgttttcgtctggtcccttaacacctttcatcagattatggtgctttaatccaagttttggaattgatatcgtcttttcgtttattactattttcttaataggaagaatcacgtttaagttcatttttcaccttaatcaaatccacaggttcaagggcagagccatttgtgaacatatataagttagttatagatgtgttatttgatatttcatggataacttcatctatataaaagtcagttctgaactggtcctttaaatcaacaaaattgattttcattccaggagttagttcaaaattaccgtagcatttagtttgagcatacccgtcatattgagccatcgtagaaatgcgtagtgcttcttcataaccattcctaaaaatcatgtcagaatatccgcctgacctattaatgaatacgctgttttggccttctccattaataattcgggtaacatctttgtccacaaatgagtgtgcataaaatgttgcgtttttcatgggatttctattatatctgtttgatttaacaagccattcaaaatcccatgccaatggatattttaatcctgctgcaaactgacctattgtttgaggagctccaaacatgaatacatttgggttctgggatatcattgattcataatccatcatgttaatcccagtgatatcttcccaggcaaaaataaattggtcgttatcagtagaaatgcctacgtttctaacatatcgtaagtaatctttgagagtactagtccatggaactcgtgggacgtaagcgttaattccgttgataggaggagcaatcaatggttggtcaacatacatcgcgcctatcatttcttttatagtttcatatgcagaactaaaaaacgctctactgaacttgagattcattatgtcatgcagcgttccaagctgaagggtgataatgctatcacctttatcatcaacaccgactgtaaagtgtttaattccgtaaattcgagtttgtgttcttgatgtgttactgtttgcaacagatatttgaactagttcatcaccgttcatacgcgtgtgcatatttttcgagtcataaaactgaagtaggccttcgttagtcccgcgtaatgaatctctcattgttaatgtaataaatgtagctgctaattcaacgaatctattagctagccacgcatcatatccagaatataattttatgcttatattaggatatcctaatctttgtgttgtcatgatttaaggtccttttcaataagcgataaggttatgccacgttcgataggcagcattttcattatagaattcaaatcgtatttaccttgagaaaccaatctatggttaatctgataaaatgtgaaaatctcgtcaggatgtagcaatagcttaaaaatatcgacaatgttatcatattttaatactgttgtggtgtcacagcatgacgtctttaactcaaaattaaagggcttcatttgtgataaaatcttttccaaggtttcaacatctatagcatcgataacggtcaatttattgctatcgctcaattcattccacgcgtattctccagatgaatccttcacagatataatgttgtctaaaatcattttacctgtatcgtcaattatttctataggttttttgaacttgagcgttaatccagcaacctctacttttggatttaccaatggaggttggttaagattaaaaagatactgcttatattttccgcattttgggcacttcattctgactggtattttggttttaccaatacttgaaagaaataccttaagaaatatataaggacgatactcagcaggatggtcatgaaaataatcatccattaattctgctataagctgtttttgttcttcttcagacttggtgttcatgtcgtttctaaccaataaaaggtctctataatcttctactgtaaatggcttaaaacgttggacaccatctggtaattcgcatctaactatattggccataaggtaatcctctttatactatttataaatatttgaataagaggagtggatatgaacatcacatacaaatttgaaacaagaataaatggcaagaatatccagtgccgagcttttactctagaagaatacgctaatttaattgcagcgaagaaaaacggcacaatcgatgaatgcattaaagcattgctcagagaatgcactaatgccaccggattaaacaaacaggagtcggaattacttatagttatactctgggcgcatagtataggcgaggttaatcacgaggtgacctggaattgcacctgtgggcgtaaaattcctgtgccattaaattatacacacgcgcaaatcgatcctccagaagacctctggtatgacttaaagggattcaagataaagttcaagtatcctaatctttttgacgattccgacattccaatgatgatatcaaaatgcatagattatatcgtggttggaaatgagcagatttactttaatgatttaaacgatgcagaaatcgacgatttatattctgctattacaaccgaagatgtagttaacatcaaaaatatgctattgaagccacaggttcaattagcagttcccattacttgtgaatgcggaatttctcacattcatgtaattaaggggcttaaagaattctttaagattatgtcatgagcaatattgataaactatattctgaccttgacccagaaatgcgacttgcttgggatagcgatgtgtcaaaaacagtaggagctcgatcggttaaaaatagccttcttggaataataaccaccagaaaggggtctcggccatttgacccagcgtttggttgtgatatcacaaacgaattatttgaaaacatgactccattaactggtgatacgataaagcgtaatatagtctctgctgtgcgtaattatgagcctaggattaatcgtctgtcggttgatgtgcttccgttatatgacgataatgctataattgtcactgtgcagttttctatagtagacgaccctgatacgctagagcgtatacgcatacagatgcgtagtaatgctaactctggcggcagagtataatgggactagtccttcccaagaaacagtagagtggagatagaatgagattagaagaattacaagatgaattagataatgatttgattatcgaccagaccaagttacagtatgaagcggctaataaccctgttctgtacggaaaatgggtgcgtaagcactcgacttgtcgaaaagaaatgttaagattagatgctcttaaaaagcaaaatcttaaagcacggttagattactacaccggtcgtggagatgtaggtggcgaagtatgcatggatgtgtatgaaaaatcagaaatgaaaactgttttaagcgctgataaagaaatcttgggcgtagatactaaattgcaatactggggaattctactggagttctgtagcgatgcgatggatgctattaagtcacggggttttagcattaagcacattattgaccttcgtcagtttgaagctggcgcgtaataaataaacttgtaaactaaggagacaatcatgtcgaatacggtatgtgtcgtctgtaaaggaccaatcgatgaagcattggttgtccaaacagacaaaggcccggttcatcccggagcttgctataattatgcgattgaattgcctgtcactgaagacacagaagagcaattacaagaaacgcagcttttaatttagtctagtgttgatgtagccaattggctttgccccttcctttcggttggggcttttttgtattagaagtcttcgtcatcttcatcttcagaatcggcttcaagagcctgtctacgccccgccaaagcatcccgcacaatgatgtcatcagaatcagcaagagtagtttctttagagcgcttatcgtaatacttctcgagttcttccagaccatctaaggtctggcaagcattaattttactcatgaagttatcgatagtagcctcacgaattgtggcttcgtaaatatcttcaaatttaatcatagatttaccgttttcattacgtagttaaatttttcatcagcatatcgttgaatacgctctaatgcatgttttaagcaatagtttaaatgtgtgtatttctttttagcattggctgacttcggctttacaccgaggtcgtcgatgatatcccagacagtagctaaagatttatctttatgcttacgaagaacacgaccaatagtttggagtacgataatcttcgatttaacgggatgagctaaaattacatgatgcaggttttttacagaaatacctgtagagaatacaccgtaacttgcgacgataataattccctttccgttttctgccatagcctttaaagcattacgtgtttcggtattaacttcacctgacacataatagacatgctcatgaccagtagctttaatcatctcgaatagctctttaccatgagctacatgtttaaacatcacaaaggcattttcgtcacgcgctgcaagtttagtagcaagattagcaatccaacgatttcttttcttaacattggtgatgaatttaatttcttcttgatacgtttttccttttaaagcgtttgcagctgcatccgggtatcttaagaagattgtattaattttaagctcagttacttgtccgtcttccattaacttagaagttgatactggacggaagatttcaccaaacataccaacatattgcataatattagctttgccatctttaagagaaccagacagtccgtacttaaacatgcaatttgtaagacctgcaatgattgttgaaattgattttcctgttgcaagatggcattcatcattcatcatcatgccgaattgagaaaaccattctttaggctgcttaacagcggtctgccatgtagatacataaactaatgcgttggaatcacgagcagtaccacctcgaatacccagcatagcattacgaggaaataaacgataatcgcaaaaatcatcaatcatctgatcgactaacgctgtggtaggaacgatgataagaattttgccttcgtaattttctacataataacgagcaagtaatgcctggataagagacttaccagcagacgttggaagattaagaattctacgtcgattaactagaccttcatatacagcatctttctgataccagtgtggctcaatcttagttaatcctgaataaatttctttcgtcgataaccaattgtcaaaatcctcccgcgaaagagtttcttgctcgaatatagctggatcgaaataaaccttgtatccgaattggtcagcgaattttctgatttggccaacaagaccaaacggtaagagacgattataatctagcagacgaattcgtccatcccaatgtccatagcggtatttcgggttgaatctgtatccatcggcttcgaagctaaaatagtctctgagttcatagaaaatcgagtcatcacactcaatatgaacatgactaaaatctttaaatttgacttggatgtcgtgcactgtactatcctcagttataaatacaaacatatttatacatcacacgaggcacaactaatgctagataaagactatatcaaagaaattcaggcactcgataaaaaagaagctaaagacaagctcgacgagtatgcccaaactttcggtattaaactgaaaaagacccgttcatttgacaatatggttgctgacttagaaaaagaactggctaaattggccgatgagcctatgccagaagataatgatgggctgtcaattgctgatttaatccaagcagatgatgaaattgaaggtaaagcagtatttaaagatgaagcatctgatgaggcaaaactactgtttgatgctccagtaagtgcaagtgttaaaattcatgatattgacccagatttttataaagaaacacctaaagtaaatgacccggggtttgaagtaaaaacgccttctatcaatgacaaaggattttatgctgaagctcctattggagacagcgttattcatatagatgatgaaggacaagttaccaatattccggttagtatcacggaccctgaagaattctccaaagcaatggacaaagtagttaaaattattaaaaccgatgaaatcattgaacttcctgaaaactttagtccaaacatgcaattgctaggtaagaacccaggatatatcacccttccatggtggatttaccaatggattaaagataccccagattggaaatctcggccaacgtcgtttgaacacccatcagcacaccagacactgtttagtttaatttattacatcaaaagaaacgggtctgttatgattcgtgaaacacgtaattcttcatttgtaactttaaaataaggaacacctatggcttatagcgtatctattgctcctttggctgcttcggcagtcattggagcaacaactaattttactgcaacaacttctggcgccgcagttgaaggcacagaaacgtttgtgtggactgtaaatggagtaccacaatcttctgttaccgcagctatgaattatgttgctgcaggacctgcaggtagtaagactgttaaagtagttgctactgttaccccagcagatggtgaggcagaaactgctgaggcagaaacaactctgactgttcagaacaaaactatgcctgcaattactttaactttgagcccgacttctgtttctaaagaaattggtcaatcccaagtagtcacggctgatgttactggcgcgccgtcaggagcaagtattgcttatgtttggaaacgcggctcttctgttatttccggtcaaactggtaaaacaattaccttaactgaatcaacagaaactagctacacattgaattgtgaagtgacggtttctgctccagactataataatggaactgcaactaaaggtattgctgtcgcttttactaaaaggactatgagcggagtttctgttgctctgacgcctagttcaattaccgctgaaaaaggagcagaagcatcttttaaagccgatgttactggagcgccagcgggagcatctgtagcttactcatggaccaaagacggttctcctgtagaaggctcaacaagtacgctagaaattgacacatctactatcgggtcgcaggtaattgaggtttcggctgttgtttctgctccagattataaacctgtcacagttactaaaaccggtaatgtaacgattaccaaaaagaccatgagcggggtttctgtttctctgactcctgagtctattacgaccgagcagggttctgaggcgtcttttaaagccaacgttatcggtgctccggaaggtgcaactggggtttattcttggactaaagacggttctcctgtagaaggttctactagcactttagtgattgacacgtctgatatagggtcccaagtgattggggtttctgttgaagtttccgcagaagattacactccggttacagtcactaaaactggtaatgtaaccattactaaaagggtagctcctacccctgatggagagcttccgtatgttcatcctctaccgttccgtggaacagcttatatctggtgcggttggtgggtaatggatgaaatccagcgaatgactgttgagggcaaagattggaaactcgacgaccctgacagtgattattacctgcaccggtatactctggctaaaatgctagatgattatccagaagtcgatgtacaagaatctagaaatggatacattgttcatcgtactgcgctagacgcaggtattatctatccttaatattcgggagccttcgggctccctttttgctattcacagactggtttaatatgtcttcatcacatagatgaggttattatgaaagcactacaagctcacttaatgcatgaaagtggtaaagatttccaagaaattgcgaaagcattagatatcactccagcagaagctgctaaattgtgggtctcagttgagaaagcacacgaacggtttaagcaaaaagaaaaagttgtttatcggaaacgcttaacaaacattggtataaaatctcgtcataagaaacttgttaaacacatgaggactttatgatgtctaaagtagataaaagagtagtagagaaatttgagatgttcctagagcgtaagtttgctcctgctgcaagcagtattaatgattggcgctctgcttcgagatttgttgataacatgatggctcgaatatttgatagcacttattataaaaatggcgctcgcaaaatctctgatttgattaaagaacggtatggaaaaattgattggatgctaatggatgtaaacgttccattagtattagaagttggccctaaaaaccagtttgaaatcatgcgaaataaacatgacaaattaatgtatcgctttgttccaagcggatattaattgctttaaaaatcgatgtggtataatgggctcaggggaaatcctctgataccattacccttgtccaaaatagatggactcctggttttattttatttattgagagaaaaattatgaaccttgccgatagaatggctaatactgctattaacgtagccacagaagaattatcagcagcaaaagaagaagtattaactcagattgagaaaaccgctttagcgggtaagcgtgagctaattatgtatccgagcagtctagttaagaaacacattacaagtgttcttaattatttgcatgatgaaggatttgttacaaattataccagttcccagcgtaacggtgatactgactttatgaaaatcacattctaaggaaattataatgtttgcaaaatattctagtcttgagaatcattacaacggtaagttcatcgagaagattcgtggtgctggttttgatatgcatactgttgagtgggtggctcgtgagaagattcatggcactaacttcagtgtgattattactcctaccgaaatcgttccggctaagcgtactggacctattttagaaagtgaaagtttctttggtcatgatattatcatgaagaaatataaggattctttcgttaagatgcagaacatgctgaacgccatggatttagtatctgttcaaatcttcggcgaatttgccggtggcggtattcagaaaggcgtagactatggtgagaaagatttctacgtgtttgatattctgtcggattccggtaacgaaaaagtttattgggacgattatgtagtagaatcgtttgctactggtcttggtcttaaattggctccacttcttggtcgaggttcatttgctgagctatctcagtatgtaaatgactttaaatctattgtcaattactataatgaacttgttaacacgactgaccttgaacatgcaaataaacatgtgttcggtccgcaggcttcttctgaaactggcgtagctgaaggctatgttcttaagccggttcatcctaagttcttcaataatggtactcgtgttgctattaagtgtaagaactctaagttcagtgagaaggctaaatccgataagcctattaaagcgaaggttgaactcaccgagaatgataagcgtgttctggaaatcttttccgaatatgtaacctggaaccgtgtaagtaacgttctgtctcatattggtactgtaactgctaaagatttcggtcgtgttatgggtctgactatgaaagatatcattaacgaagcagcacgtgaaggtcatgacatgctattcgctgataatccttctgctgttaagaaagaaatcactactttaattcaaaacactattcgtagtaaatggcatgaggttttagaataatgagattggcgcttattggttcacgagaagcgccacgtagagttctgagtctaatgactacaataggtcaacgcctctcggaagaggggcatttttcatattcaggtggagctccgggttcagatgaagcgtggttggcgaaatacgataggtcaaattcttgtaggattattccttattctggcttttgtggccatgttcctggtacaggtgttgttgtatggtctgaattatcaaacgaagccaaaatcaaaagcatcattaaggcgagagaagttacatcgtactgggatgaatgctcgaagatagtgcagactttattcgcacggaattctatgcaggtattgggcctagaatgcactgagcctgtagataaggtattatattgggcgcctgagaaaagatgcgggagtgtatctggagggacgagagtagctgttgatatagctcgcaggcacgggatagaatgtgttaatctatacgataagaaagtgtttaaatccctcgaggaggaatactctccgaagtttgacatatttagtttatagcaaaaagggagcccgaaggctcccataaattagtccgcaatcagcttaggtaacttaacaccgagcataacagacatctgacttcttcctgccatcttatccatatccgcagcattaatcacacgagcttcgtcctcgtccaatcctacagtatatgggttaaccgacagcgcgtaacgaaccagtaaagctacagaaggctgcaagctggctgggtcaacaataactttaaatgcaccaacatgctcagggtcgtctaaatcaagaccttcggtatacggcgcatagaataatgaacctacagtttccttcccaccaaattctgccttaacaccaacaataacgtaatcaatcggactgttagtatcacaatacagtggaaggccgttattcagaatgccatatgcgttttctggaatagtcccatcgttcttctgcattaaccaaccagaagctgccagcaccgctgcgcaacgagtagatgctactgcataggtaccagaataagaagtattacgttgaactgctgaattcatttcacaaatgaaacgatacagagtacgaccttgttccggagcagaatcctgcttagttaaatctaatacacctttatcggatacaccagttactttaaaccgagaagaaaccgtaatcaatgattgcaggatgtctttattaatgtcttctgccatttcagtagcaagtaaatcatcaataagctctggagcatcgaacccgttagcttctaagtcttgagctaattctacagttaaatccgttttaagcttacgcgatttaacagctgtttgccatttatcaattttaaaactggcttcggtgattgggtctgaatcaggtccttcgaatttttcagtgactgcagcatctgacaccatacgaatattattagctgctactgcttcagatacaattccaaattcgtcggtttcagctgtaccagtaaacggcccgtctttaagcactttaaagactacgttctggtacttaaacatgtcatctttattaaaagaatctttattcgccatagtgagttcttcaattgactcacgttccggggcaccgatttgacctgcataggttgcacctgttgcaaatgtcaaatcaccatttgggttaagatatttaataccatacagtgctgctacaggctgtttagtacgctgtgtagcaacgaggtcagtatagattaatttagtggttgcgcgcgttaatgcaacgagattagggcgaccaattaagttgctactcgttgtagttgactcgcgcagaagttcgttgattttagccattgcgctttcctctgtggatttataagtttatttatatccattaaaacaactaaagggagcccgaaggctcccttattggtattagatacctttaacccatacacgacggaagtaagcattcttaccaacagagttgacgatagaaggcataccagaggtaatacgacctttcggctgttgagcagcagaatcggcgaacgggttaataccgataccataacgggttttgaaccccatgaccggttggaagttcttcggatcggaaccacgcagcggggtcagtgcaacatacggagcatagtagataccagcatccatttcgttagcacctttataaccgatggtgaagtaatcctgacgagcatactggtcgatgtatacacggtagcgaccacccagaacaccagcaaatactgctttagtggtgtcggtattataaccacgacccagaccctgagctgccggagatacgttggtatcaacagctgccagtacgttaactacgttacgggaagcgataatgaagttaccttcaccgcgaccggtctgacgagcgatttcagctgattctttgtcaatctggaacagcagagctttaaagctttcacctgcccaacgagcaccgcggatatcaatcgggtcttggaagtcgaatacaccggctttagaaccaatagtctgggtcataccagatttaccaacctgagcggagtagttaatccaatcaacaacttcacggttgatttccagcataatttcagtagccaggattgaactcagttcagcatcagcgtccataccgtgaacagcgcggaggtcctgagccagttcgattgaatactgtgctttcagctgacgagatttcgcttcgatagtttgtttatcgatacggaagcccatttcattccacgggttatctttagaaccgttaaatgcttcttgcagttcagcaacggaagtagccataccttcggcgatttcaactacttcgccagcttccagacgcttagtgacttcagcatccagtttagcagcatcagtagcagcagcatcaactgtaaaggctgttacaacctgcaggtgagcacgaccagtctgtgcgaaatcatgaactacgatatcaccaacatccagagaagcaccagctttaactgcttcaaatttctcggttgcaccctgaccagagaacattgcatccggagcgtacatcggatggaaagcttctttagcaccagcagccagcgggtctttgccgtaaacagcgcggagagcgaatacctgaccggttgggttagacatcggctgtacaccacagatatcgaaagcaatcaggttagggatagcacgacgaaccatacccataactgctggtccaatctgggttacagcaccagaggtttgaccagctgcgatgttctgtgcatcataaccgtggtcaccgccaatttctgcttcagacaggaaagaaccaaatgcttcagcgattttttcatcgcggtattccggagcctgattaatatcagcttcctggttttcaaaaatcttagcgatcagagcttttttgctagcgccaacaatttccggcagagcttcgttctcaagcagcggctgccatttttcgataagtttattctttttcatgtgttgtataaccttttaaattaagaaagacgagccgcttgggctacataagcatccataacggatggggttttagtcgcaggagtttcttcgactgcttcagttgtgaagtttaaaccgtctgcttctttgtcgatagtatttatatcggcagattccgttacagactgctctacagaaccctgcaccatttcaacaatagctttcagcttagttgaaaacgagtcagaataatccataccctctgtcagagaaactactttctctttttgagtatcagtcaattcacgggttgcttcttgaatagcatactcgcgttgggcgtaattgatataagcatcacgcttagaaacttcttcaaataaacgagcagtttcttctttttgctcagcaagttcttcttccatttcagcgactacgtctactgattcttcaggaattacaacattgtgctcaacaaacagttctttcataccgctaaacatggattcaaacagttcagccttaataccgcggtcaaccgccagctgattttccgccatccattcggcagcgatatggtcaaagtatttagaagcagcttctttcagctcttcgcgagcttcttctttagctttttctttttcttcttcaactttttcttctgctttctcagcaatcttttcaatatgagattctgccagagctacggcgtgttttttgactgttgcttcgaatacagtgctgaagttagctttagcttccggagaaagctgaactgattcgaaaatactgtcaagagcgacggaagcatcgatagttttagcttcggtcattaaaagttctttaagcatttttgatgtcctgtgttaagttacataattatttataacgcttttaacttctctgcgagagccataaaagcatcatcagcactattggcaacttgtgccgaggtattttccgaaatttgtttcggttgtacccatgcatccggagcactaggaccccaaactgcgtctacaccaacagtcaggcgaaagccttcttgtacgatgttatatccttttcctgagtctttcaaagaaccaagtccacgacttgatacaccaggaatccaaccagcacgaatgttagcggctaatttatcacctggaccgtggtctccttcgatgattcttgctcgcccataaacatcgttgcctttccaccacatatcttcaataatgattgcggcttgcatcgggtcaacatttgcacgaggtggatggtttaattctcctagagcctgacgagtagcaacctgttccttaatataacggcttaccgcagtctcaagaatgcgttttggataaagacgtttattacggtttactacttctgcctgcataaaaacaccttcgatatacagaccaggttttaagccagattcattttcgccttcaacgataatagattccagcatgggtttaccatcaattacatcgcccggttgaccccaatgctcaattaaaagttgttcattgaggttttccattaacttagccccagagcctgacggcgtttaagtgctttcttacgtttacgtaatccacgagtttgagccgatggattagcacgttttgattttactgctttacgcgcgatttggcggcgtttagctttagaaagtccggttgtttgaaacgcgttacgctcacgtgttttacgatctttggtacgggtaatagtacctttagaatcaacgtgcttaacgataaattcatttaattgtatagattcgttaattgaacctaaagcaattgctaaatcaggctcagaagtaaccatgttctctacaattttatttatatcatctttagaaagcgctgcggacaacttatcaaaacgtgcctgtgcttcaggaagaaaagcttcgacagcgtcgataactaattcatgattttcaggcagtataagcattactcgtcctcttcgtcgtcgtctttctcagacttatcttcatcttcatcttcgtcgtcttcatcgtcaacgggctcttcaccctcaatcatgacagacgctgcgataaattttttgcgctcttcaattaaaccagatgtccgttcagccataattgcaccaaaagcttttttggctgctacgaggtctctggattcaattgcggaaatataattttccattagaaatcctcttcattttcttggtcttggaagcgagcctctttagactctaattcaatttgcttggcttcttgttcaatttcttcatcagacatctgaaggaaatctttcattgctgtcttgtgagaaatatacttgccgataaacggctcagccattgtgagcatattgattctacgctccataacttcagcatctttcaactcggtgaaatatgagtctttatggaacacaatcttaatattatttatttcgtcttcccactcatctttagacaaaacttttttaagaattagattagtgcgaagtggatcaagcataatctcttcaaatttatgctgtaatctacgaataaatttggcaaaatcaagttcatcacgtgtgattgacgtaccagcatcaaactgcacaccgccttgattatttgcatccggcatgcgtgaaagaggaactcgcaatgccatgtataatgctgttctaaagtaacggacatcatccatatcactcataccggacataccaggaagagtatctacttcagtaaccgctttaccatctctacgctgcaaccaatagtcttctgtcattgacatattatgctgttggtttttaatcttaccagttgacgcatcatatacaacacggtttttcatcgtgttcataatatgctgcatgtgtgctgccgctttacgagaaggcatattaccagtgtcgatgtaaaacacacgacggtcaggagcacgagtaatacgataaattaccaacgcatcttctaatagctttaactggttggcaggtttaacggctcggtgtaaataaccgatgatgttttgacctgagcaatcaactagcccagaatgtgcatatactatagcatcgcgtggaattttaattttcgttccggcggaatataatctaccatctgcgtaataactttctttgccagtatcgtaaatgaaatactctttgtaccccttaacgattttagtaccagcgtcatcagcagtaacgatttcgcgaatgaattgtaagttgcgcgggtcaagacgtctcagttcctgaattccgtctttcattttcttggtgttgacgattttatggaagaatattcttgagtcaacataccaacggcggaaatggtcagcgccctttctctcgaaattaaggcatgttaaaactgtattaaattcttcaagaatacggtctttaattgcttgactgaagtcagtagaatctaaatcaagagaaactactgggtgaccgtcttcgtacacaaccgcatcagaaactatttcttcaacagcgttgtcaacctcgtagttattcattaaactacgataagtgttgattaaatcagcggttgttttcattccaggttcattggaaccaaacatcatttggttgaatgaattatactggatttcgttttcgtttgattcaacttcacgagctccatcatcaaattttggagcagtgattgactctaggtcattgttgatttgttgcttatattcagcttcgtcgcgtttttcccacggagcgaataagtccaaaatatgaaaggccattggagtctccgaaattatctataagtatatttatatcgaagttttgtcagatatttaagcaaataactcacagaacttcgatacggggccgaagccccataacattattcccaccagtcaatagcaaaggtagtttcgaacgtttctacctcattattcgaatcccagtccatctgtacttcaccaacgttagttggccacagaccagtaatggtgtgttcatttgtgatagttttgccatcacgactaaactggcgtaccgtagcaacctttttgtaatcggctggagtcataccagagatatcattgccttgggcgtgggcctgagcctgccaagcaataattgccttacgtacttcatgtttatcatcgttatagatggtaacagtccagtcgtcataagtacggtcaccggcgacgttaatcttacggttcatgtacccgactggaactttttctacgatacctgccggcatcggtgctgctttacatttgaaactgaagttacgacccagataaggaatttctacctcaaacaggttaggacgtgcaaagtcaccagattcaaacgcacgagtgatgtctgttaattccatcgttgtttcctatagatatttatatagcctctcgattgactacatcatcgtagaggctattaaagtgtgcggtaatataatttatcatctaaaggttagatgaccccagaatgtcctggggttcatattactgtggtccgattaactcatcgaagtctgcaccagttgccgtagcaacgaagttcagagtgatgtagttaattgaacgcgccggcttgatgtagaagctcgctacaaactcgttgcggtcgataacagcaggggtgttgttcgtggtatcacatacaactcggaagtcatatacaccacccagagctttaatacccgccaagtattggcttgtttccatacggaaagaagaacgggtaaagttatcgtttaactcgaacagctgccacttagaagaatcaccgatgttgttcttcagcatgttaaacagacgacgaacgttaattcggtcaaacggcgttggaacagtagttgcagtcttatcaccaaacagaatgaaaccatcaccggtaccttgacccgttaccgggttaatacctgcttgatacatacggtcacgatgtgcttgacgaggttcaatcgcaagtttaatgcagttcagaatctgaccacgacgataaccagccggtgacatccaaggttgagcaacatcatctgtacgagcacacaggcctgcaatatcagcagctaacggaacccaacggtttacgtcgttatatttatcatactgatatttatagttgccatcaattgctgcgtacgtagtattgatgttcatgtttgcagagtcgtagcttccttcaccttgacgccaatcaattaaattatcaacagcacgggtcagaggaatatttacaatcgttgaccttggtggtgaaatgagtgctaaacaatcttgacgttcatctgcaatagacgacacatgcttttgcactgtacttgcgatttcatccgtttcaccagcgcaagcaccagcaatcagaaggtttacccgcagtgcttcacggtcaccaaataaatcccagccttgaattaaatcgccagccgtaactgattcattagctgaaaccccaccacccagacgaataacgccagcaaagccttcaggccatccttgcgcagtggcaaatatatagcgtgaagaacccttggagaaataatcgtccataaagatgttatttccgtagatatctttgtcttgacggcttgtcgataatactgcggattcgactaccgcaccatctctacgaacaatgatagcatattgggtatcggtctgaggaccatatccaaatacagcttttgcagtcgaagcgcgttttccaccagccggataaatcgtcagctgttcacctttatcaaatgcagcttttgatacgatttcaatttctaactgatttccgagctcgccaggatacgcagctacaattccaggcattttatacttagcaagagcagtctggaattcggttttggtcatttcttcatgagcagtttcaggttcagttaacagaactgttgaatcagaaataattttgcccagagtaataacagcggaaacaccagaactctgcgaagtaatagtagttgtccacgaagaccctaaatcaggatattgattaatgctttttgcatatgcaataatcttcgatgtcggaatgaacaccgacttaatttttccgtcactatctacttcagtaactgaaccggtttcatctacgacttggtctgcatacttaacagtaattttgtcgccaacttcatagttactaccagcagttgtgatttcccactcaatattatcaaccagtggagatgcgtttttagcagcttcacgattaactacacggactgtgcgcagatcattaccatattgcagaaagttcattgctgacataaagtaatcagcagtttggttattaggaccaccaaacatatcaaccagttcaacttcgttagtgatttgggtaacttgatatgcaggaccccattggaacttcccgacaattgcggcacgacctgtagcgttaagtactaccgtgctctgtacgctcgtttctttgagctcaattccaggagagactaaaggcatgatatatcctcaatgttgtttgctttttattatttatacaaatgaaagaccatgttcttgaggcgcatattctgcgctattcacggcgtcaacgaacactacaggagcgtaatcgtcgttcatatcttctaattcgcgtttaaaaacttcagatgctaatcgcatttcatctttatccacgaaatcagcaaatttttgctgtgttgttaaccatgcgaaaattacgagtgacataattaaatcgtcatgatatccatcttctgccgcccaggatactcctttctcagagaaagtacgaaattcttgaacagtagcacgatgatgaataatgagtttatctttttcaataaggtcttttagtgcagaacatccgacggcctttgaccttttcgtctgcttcattcctaagtcaactattgaatcacaaatgacattctcatattctaaatccatataaagactcttcgccacagaaacacctgtagagttgagttctatatagatcggagcttcgttgtactccattagatatttaataactatatctgggaggattaagtgagaaattgtattagaatgcaatactccaacttgttcccactcagatgtggttacgtcaataatatttagtgcatggtaatcctgccctcgtccttcagcagagtcaagggttgcaatatacttgtggtccgcttcagcttctttaaatttataaaatccgtgtgagtcaggagtaacttcaatccaatccatattagcaagtttcataccggaaataagagtaccggatgtgccatggaattcagcgcagtgctcttgcttgaactgttcaagagaagaagcactgatagtttgaagtgaccattgccacccatcatcaaacatatcttcgtcgttatataggcgttcttttactgagttccaaattgcagtataaggagtaaagccggatttaccttcaaccgccgcagtccaaatatcataaaagtggtttaatccactcggtgtagtcgtgataataattttagaacgacgacctgatgaaataactggttgaatagcaagccatgcatcgatgaagtttggaataaacgcacattcgtcaatgtaaatcattgcaaatgagttaccacgaacggcgtcaggacttgaagcatacgctccaatagatgaaccattatctaattcgattgagcctttgttccattcaacaatgccaggttgaagaaagtcgggaagcaattcaattgcttgcttagtacggtcgagaacttccgcagacattgagcctttatgcgcaagaatacctaccgctttatccttgttaaaacagacaaagtgcgcaagaaatattgctactacagtggttttaccaagctgacgactaaggttacaacaagtcatacgtttagccgccatgatttccagcatgtccctctggtaatcacggagctggactttgatagtaccatagtcaatgtgagtaattgcacagtaggtctctgcgaagtacacaatatcgtctcggcatttcttccattctgcaactatttcacgggttagttgcattttaatgtttgctcgtttaaggttaggcaatcccatataacgagtgcgcttattatttttatccttaaacgtttgaaaatgcgctgggtcttcaccttgcaggcgaattttaactatcccatgcagcttaagatagtcttcaaatttctcaggataccacttatcatcccattgtgatttaaagaaacgaactccattttcaattttcgtttccatttcagacgggtggcgaataaccacttgtttaccgtcatttaaaggatgtgcatcactcagaacgttaaacggttgagtctgttccatttactattttctctcgagcttcttgtgcttcataggcgtctccaaactcatccatcatatcggcagtagaacctacaaagactgttgcgttttgaatattcattccttgttgaggattagctccttttccagtactaacctgctcagaagtaatgtctttcatttctttatgaagcttaagaatttctttgttagttgtggtcatctgacccataagagttgcaaatacttccatatgtctaggagaatcagcgttctttgcagtttccaaaaatattttagctgcgtccattaacatctgttgttggaagtgcatattcttacgaacgacagaatagtcgtcttcaaggtcaggtttacgatcatttggattagatttaacttcgactaattctaatttttcataaaccggaatttcttgcccttctattccgggaattccttcgatgtctagtaatttagccatatctaattgtaagtcactcatttttcacctctcggtccaggagcctccggatttaccggaataggaatatcgtgagaatacgtctgtttgctagaaccatcccagttttcttgctggacatcacgtggagtaacttcgctatccacagattcaaaatttccttctggtgttaattctttactattagcgaagaaatccaaataaatggttctaatttcgccgtcaacctcggcaacaggaggatatagccatccgttgacttcaaacatcaatgaccattctaatctacgacgagtaatattatctccgtcaacagcttcatccggagaaaatgattgtaatacaattctaacatcacggttaaagctcgtgtctttgtcgtaaagttcagttatagtcgtgttaaaatgcggctgaaaataaggaacgatttgctcgatgatttgatacatatcatcttggttccgtgtataaatccccaactcaaaaatcatcttaatcggagtaggattatactgagatgtaatttttgaaggggttttatatgatttggttctattcaactgtgatgttttatacatcgcgttgtattgcatatcaaccaagtgtaaattcattcttggcaaaacagtttctatctttgctttattctcggtagactgaacagcagtccatttcccaagttgagaaaggaatttttcctttgaagcatacgtgataggcactttaatatattttagtccagtgtcttcacgccagcgagcaatttgtatatgagaaaataaatctcccagcaatacaatgtatcggcgcaaggacgaattataccaatgtccaaacatgatttctcctaagggacccaaaggtcccatctttattttatttattcaaaaaatccgtcatcaaacgaatctgctttaggaggagactcaagtcctcttccgttattaacataatacggatgaacatattcagaggcttctttattaattgcctcgctttctgcgtattgcacgtcagaaatatcagcaagagaatcaatgtttttgattggttctaaatcaagttcagagaactcaggaatgataattccttcattgcgctgcaattctggttgaagctgctcaccggaataaatgtatttctgcgcagtaatcttacgttgaacattttggcctaactgataaaatggatcatatggctgaacccaattaatttcaaacagcgaattatccatagggaaataaatcaggtcacctgcttttggttctgaattattggtttgatgcttgaacaaattaggattaatagtcaaattaacttcatcattaaccatcataccaaatttactaaagaatgtgttatcgccagaatatccttcaaatgaatctaaataagcagcaaatttccaagccttggtgaatttacttgatgggtcttctccgaaaagcaaatccggattgttatattcgcgaggaaggaaataaaactcaattcctctcatttgaatagcctcagctgataaaacatctgctaacgtttggctatttctgtgattataaaaattcacataaggattgagaatttctgtctcattagttttattatatcctcggtaatcctcaaggcgagcgaataaactagaattaaatgtagtcatcttttaccccaacagaataggacaacccgggtcaagtaaatcaagttcctctcggagcctctcgatttcttcttgggcctctactttaagtgtttggccatcaactgtaacgccgccggctaattgtagcccttggtgtttaaacagaatttcaccccacaattttttagtcagtgctgtagcataatcttttacccaacgattattataagcaccttctctgtttgtgttaccttctccggcatattgaccattattacgaaggtcaggattctgatatctatctcctaatccccaatggtcagcagtttgcggcccagcaaatccgtatcctgctgtattgcctaccatcgcatctgtattcataaatgatttggtccaacactcacagacaatgatgtcgcccttcatgaagttgcccattactttaagcatttcattatcagagttataccaataatccgggagaggagcaagtaaatcttgcatcattgaccaataagtcattaattgagtaaaatagcccaggtcagcaccgaaagcgtttggtccataactcttattacagcttgaccccattccgccgttaattccggccattcccattaaaaagtcagtaaaccacggataggtagcattaccatccattgaagttaatgaacctacatttgttctaacgatttgagtgacagcaaatacattacgaccacgcaaatcaaacacaccatttaaaaatcttgcgttgtcagcttcatcttttccaatataaaaaacttgatagcctttattcaatccgttaaagtggtattcaccatacaactctaatgctcgttgaatacaatcataaatttggtcttcagttacttcgacattgattaccggcgctcctagacgtcgaagtatagcgtctttaagcgtttttgggttgtatgtgttgtatgacatataagctcctctttatattctatttatacgaaaaagggacccgaaggtccctttcattatactgctggatgaatagtaatatccaatgatttaatactaacaggaactttcgattcttctgaagcagctctatacacaattttgattgcatcgccagacgaaaactcaataagtttcttggttttcaacagttgctcgccggttactgctttaacacctaggctataagtaaacacctcaatgttattgacgagaataacaatttggacggctttatctgaatcagaagcttcgataactgtatcagtttctacacaaaatacgccatcgtcatcaacaataatatcatcaacaatacgaatgccagcattaaatgaagcagcgaccaatgagttaggatttaccaatgcatcagaacttaaatcaacagtgaaatcttctttactgaattcacctattgatgaaggcttcttaaaccattcgccccgtttacggaggtatgctccatcttgttctacgtcagtaactgcagtcacgaatttatcttgcaattctactacagtggcatacacgccatcccgttgaaccggattttctgacgaaaagtcaccattcatttgagtctgtaacgtaaatacagaaccttttaacccttcgctgttattgccaagttctacttgaatgtcctggatagcagattgttgggagttttgcatcccttcaacatttgccattctcgctaaaattgaaccaggaggaacttgctgtccactaggaacaataccaacctgctgatttatccatgctacttggccctgaagtcctgatgaagtatcacgtcctacaacatcagaaatgtatctttggtcagttgaaagagaactaatctttccttcaatactatcaggcttatcagaagaccctaaacgagtatcaatattattgacacgaggaactaacccggtttctgcagagttaagggttgcgtcaattatacgataatcattttccaatctagtagtacgagctccaatttttactggattggtaaaatcgatagcctggttaatagcaaagatttcattattagctgcggaaatagcatcagcgttattcacgagccttgcataaattgaagctgaagtggctccggatttaggaccaacttctttacgcaggtcatttacttcaatagtcaatgaaccaacatccgaatcattatatgcgtcctctaacgcttgaatacgctcatcatgttttactatagctgacgcattgttgatgattcggtatttcataccagaacccggagagtcttgcttcggctgtccgttaatatcttgcccaggatacgcaccaatttcgcgtttaacccaaactatattatcacgaactgttctgtaatagtcatctttactagaatcataaacacctacatcctcttcgagaaaatcgaggtcagttcgaagtttttcggtgtcttcttctaatttaagaatgttctcactatgggcttcaatattctttttgttgatatagacctgctcaatggcatcagaagaacctgtaatttctaacgattttttgatttggtctacatctacttgaatattttctacagcagttccaacgttgttcaaatcgttatgtacctgaaccacatttttctgaatctgcacagaagctctattcagttctccatcatttccatagcgggttgaagccccattaagaggctctgtattttttatccagttaattctctgttgaaaatcgcctggaattccgtctacaaacggaagcgaatctactagtttggtcatattattccttacggtctatttgtacagaatgtaagcatgcagtcataaaatataatacgactgtcttctgttggtcttatttgaacagtggcatttggaggaatgtcgtagaagaaaaagttgctagatgcgtaagcttcaaatctccatgaatgaccatttcgtccgcctttagtattttcaatgttaagagtaagttcacctccccattgggagccattaactattaaaacacatttgaaaatacgattgtcatatccgtcgttgttacgctcaaattttacattaacatttaaagctaatttactaggagcttcccatggtgaattacatgtaaacgttgtacctcggctaatccaagattgtccttcaacccaagtaacattacctactctggttccagctggcatgtaacgcccgtcagattcttgtcttgtataacaattaatatcattgttagtaatcgttatgtcattgtcaagagtttttccgtttattctacgggttttaaaaacagcatctgttgccgcagctgccagtgaagcatcagtagttggagaacctgataatctggttaatccatatttatccttggtggattttagcgcttgaagactttttggagtaacagccaaattgttagaagtagctgaagccacatctgagtctttagcaaattttactataccaaatacactgtcagacgcttttgatgccatgaaggtttttggagttactgcgtatccatcgtgaacagcacctgctgctacctgagcttgggttgcgacacgaactaatcccaagttgctttctgtcgcagaggtataactaggaggactgacactgaactttccaatcatttctacaacacgcttaggagttactgcggtagtttcgtcagttcctgcttgcgcttgagccgcagtagttaacctaacagttccatctacgttttcttgtgctttcacagttttaaacacatgaccgagagccgctgcggtaatagttctatttcctgcggttaatgctgcggcttcagtattagtagcataccgtgttaagccaagaactgctgtagttgcttcaggacgggtaactgtggattttaatgtagctggggtaacagcagcattacctacagttccagcatcaacttcagcctgtgttgctgtgcgaattacaccggctactgtaggagatgctacaggtaatccggtatcagttcttgcccagctgccaatcaacgctaacgctgattggacgtcttttgtagcaactggccattgcgtatttgctgggtcaaatatcgtatacttggccaaatcactgtagtgattatagttattctgggccattatcccatccttctaaaatagtggaaagtaaatgtgtttgcaccgaaggttttagtttcgttaccaatagcgtcccattgtccataacccgctttagctggtgaagtaatagtaaattcaacagttaaaccatactttttatatgtttcaaaattatggttctgataatctaaatgaataatatcaacatactggggtgttgccggcgattgagtaacctgttgaacaacctttccaacagcttctaattcttttactttatcataccaacgtgttgctactgctgcaaagtcatcaccgtttgcaattctaattggtaagccaagaatatgaattattactgggtcaccgacagagccgtcttcttttggctctaacgcaacgacgcctgaaaaagtagcacgcgtaatttgctgtgcgggctgtggagatattccagtgtcattgcaaataatagttccaatttctgctgactgtaatgacatcaaatcattaatagcagcttcagtatttggataccaaactcctaaatccatttgttcaaaggttaggctccctataggagccgtatttcctaccgcaatattttgcgggtcaacgcgatattctgaaaaagcagctaatcttgaattaactttagctccttcacgagttttagtttcaatcgtcattttaacctaccctaatccaacgataaacggtgattgttggctgaattttagtgatgtcatttggaactacaccgttgtttaccgcaacagtgtcttcacggtatttagaataacctggtccctgcgcgtctgggtctaattgacatccaccgataactacgcttccatgttcagggtctgaaattagaactttatctcttgacattagttcaggaatgtgttcttttcctaacgtaaatgtcaaatctccaaccgttccacctgctgttaatgatggctgaccattttcgtttaagttattgttgttacgcgaaaaataaggatcagatgaatcattattccaaccagcagtaacacggccttgtgaataaagcttccacaccccaaatcccatatagtcagcagggtttgcgtggttgtgagcgttttcataaatcgtgccaatcggataaattacgtcaaagaatgctgcaatgttattgactttaatcataacatcatcagcgacaggacgcatatttttctgattaggttcatcataatttgtgtattcaatgcgattttttagagttactaattgctcagcattcatatacacttggtcggtttctgccatgatatcgtcaatatccatagtagtaccgatgttattattgaaccaacggacggtaagaaggtctttatcttcaaacgcctcaccaaaaataatagcttcgacgttagtaccagttgagtcaaattctaatctgtaatcttggttagaatttacccattgaccaccattgtttatacagtcttctgcgtatccaccttccgcgccttcacaataaaataaaggaagaccagcagttccagcttcgagtaattcctttccgttcaatgaaatttcaagcgagttaggatttacccctacgcctggaagtacacccatgtcatccagagtgattctgcggagagtagcaaggttatctactataattgacccaggaatcgtctgggatgcagtctgggctgaatctcgtatctggatagccaacttgttgtatgaagaccgataaacaccaattccatctaggaaggtttcaaatgttattacttccccttcaacacatggaacttttaaacgaatgtctttaccgtttaattctaccaactgacctgctactgttccaggagaaccgtaatcagcattggctttatccataacgctggtttcaccgtaatataaaatattaccacgacgatatacattaagcgagtcttcgttatattctacgccgtcaaaaatgttaagaaagtcagtctgacccgcagtagcaataattgattttttcgctacagtacttaagttaccgttagttagcttatctaccgttttattttcaatatattcccagcggccaggtgcgcaataaactaattccaaatcttggaagttagtattgaaaattttaggagaagctgaaccctttaatgtatcgccttgagcaggaataactgtgattgggcttaatcgccaggttgaccaaacatcacgaagtttaataactttgttatagtcgttggctgtcccctttggaagctgaacgttaactcttgctgcctgggtattaatagcaaaggcctgaccaaacttagcatttaaagtagttccagtagggctagctttaaaagttttccatgcacctgccgcgaatggaactgaaccatcacctaactctgaatataaatcatcaaagttgttattaattttaagaccacctttacggaggtaatcaccagacccatcatctactgattggcctactatcaaattttgtttcattattgagatacccctacggtctgtgtagcaataactttaactgccaaacgtgcgtttccataagatgttgaagctgtgcatattaaatctttctgcgcgttaatggagtatgaaatagaatacatcttttcattttcagatgattcaccgcttcttaacactgcatattcagtgtcaaatactcttccgtttggcgctgatgaagtaatagtcgggtcaatcataagcatgacttcagatgattgccttttgatggtttgaccacctggatttgcgctgaagcttaataacaatttaacagtagagtaatcatcgttatatccaagccgaatattaataggagaactcgttaaattatatgtagcttctaacggcgaatatgtgctgccaaacatacttgaaatcgaataatcccaaactgcagcaccgttagctttgacttcaacacaccacaattcaattctacatcttggcgtgttgataatcaattctcgcgatccatctttaaatgcatcagctacgccttcaccgtttgttgttatttttatgggtctagcttttgatgctgatccattactatttacgatgaatacagcttctcccgctttaccttttgaaagacgaatctgaactgccccttctgaacaatctgcgtctaagcatgctcccattggaaccgtccctgccgagttagcatcaccaaattttaccttttgataataactcgttgcatgaattttttgacttccttctccagatcctgcagcaaatagccgctggtctccaaatgcgttataaatggcgtcatagttttgatttattttaacaccgccagcatacaaaatgtcgcccgtagaagcgttacctacttcaccgacgtcaataacctgtttaccttcatctacatacatagtagtaacctcttatcaaagtatagtcctatttatataaaaatggggagcctttggctccccataattaaaactcgaaaattaagtttaattcttccgtttggtccattgaacgaataataggttgccgattttccatgtaaatcatttcacctgactgtctttcaagaccagaagcactataccaacctttttcagccttaacgttaggagaatttggcattggcttagcttcaagcggattagttataattgacaactgcctaaacccagtatttcctggaagactaaattctgggaaataaattgcgtcaagatatgctttaaatctaattgtattgcacttcatgcgataaattaggttaaagtcgttttgctgccaagttaagttattttgaaatccccaacgagctggagattcttcaatctcttctggccaaggaactacgatatattcatttgtacatctgttaattgatacgtcggctggaatttcatatagatattcccaaagatatccatcacccaaatcgacggtaccatttgcatcaccacgcccacgaggagctgaacctgaaatagctgatggtgtccatttacctccaagcttaatacattcatctttgcttgtaagatttccaattgaacacattccgtcttttggaacatcaatacatctatataccatccatccaaatccagcgtcagttctgttatatggtgcagagttagcaacaacaatgtcgccaatcaaaaatgtacgcgggttaggatatctagtatcaccccagtctcttcttggaacaacgcaatcaagcatggatgattcaattttgaccgcgcccatcatatttgtccaaacatcaactaccccatctccattatcagcgggatatggaggtgcaaatccaggttcagattcgttatctgaccacggagtgcttttaccaaatgaaacatacagtgtgttttggtccgttcccggaccaatcgatttataaaatgtgtacatcttttcagttctaaacttagatgtaatgatagcacgataaatcgtgctacgcgttgaacttgctcttgttgaattactcatcaatttttacctgtgtcggattttcaggatcgcgaggattacctgcatcgtctttaagacgttggttaactaaatcgcgataattagcaaacgttactgctgattggtcaaacgtaggacttaacggtttacgtcgttgtccagggttttgtccagcgataacactattgttattttcttgattatagttagcaggtaacgggaaaggttcaccagcttgagcacgtgaagaatacctaggctcattggttattgggtctctttctattgtatcatctgaagcgataatagcaactctatcaggataaactgatggcagtcctgcatcccatttatagttcttgagtttatttatgatagtctcaacatgcttcatatttaagccactattgataaacattgtcagcaatgttataccaatgaaaccgaaacctaccggatgaacaaaccttaatacatcgtcgcggaaacgagaagtaggaagctgagacttaattttcataacatagtaagaacggctgcggtttatatagtcaatgttattacttaacatatcctttccgcgaacaccttgaactataataccctcaaagtccgtacgctctgatttaatttcctggccttcaatgaaccgtcctgataagttatgaatagtaatacgccataacagacgaccatcccggtattctctctcgatataagtcacattactacgaccggaagcagtataaatcgtacgaccaactaaatcatcagaaatatttgtgctttcaacaataatgtcatattcggtagtgttctttgactcaatatcgatttcgacgtcttcgttataaagaagtttaaacaggaacttatatgagtcttcaattcctttagtagcatagaaatcattcttgcgtgcttcaaagaaacggacgacagcgtcacgagcgtctttactcagataaatgttgcgtttataaacttctgaccacagatattcccatgcattttcttcgcgaggatatttgttcttaacaagattaacgagactgttgtaatgtgttccatttccatccgaaaggaattggagatagtacttacaaaagtgctcaaaattactatcttgtagcaagtaactatccggcatcattttagtaagatacggacgcaaatctgggtcacgtaagcctggagtatgttcaggtgtccagtcttcttcccgtgtttggttctgcagaaacgccttaaacattacatcagttggtttccagttaagcgttacctggtcacgaacacggtagtcaaatgcgtaatagcctatcagttttccgtctggttcgtgaaacatgatgccagaagcatactgcaaaaatccattaaatgaaaccggagggcaataaaacgttgcgtcacctttatcccacacttccgaaagaacacgctcggtagttccctgtgcagccatatctattcttttctgataaagaatatcattataaatgacaaccgcatggtcagctgtacttatccagcatctgttgccttcacgagccatccagacaaaccaaggttcagcataaaacctcataggtccaggaacaaatgtttcccatcttgaaaattcatctgctctgaaactcatcatgtgataatgcttatcagagtgatactgaattggattaacatttttaactgcggtagaaattagttctggatatttcgtctcaagctcaatatcctgagcgtactctgttgtcttaaaattagctgatgaaaagaatatttcctttccgtcagttgacatagaagtccataaatgctctatacgacgtttttcttcatctgtattaccgaatacacgtttccatgtatttgtgtcttcttgataaacatagatgcctttagtagcagaatccacaacattccgtgggtctgttgggtctaatcctaaggttttaacttccccggtaataagggcaaagattttgcctccaacggaatccattttaaagcatacagatttaggattgcctgttatatgagatgcttctttttcaaataccttttcaccaaatgtcgggcttaaagggtcagtatctattggagcatcttttaatttaactttacggacagtgtcttttgcaacaacatacaaatagtcgtcattgcaggtaaacgcttcagcatatttggtaacgtcagcaggcaatgatgcatacgttccgaataactctacttcaaagccaagctttaactggtctcccaatttagcaaatgtaacttcgttatcgctgaacttaacctcgtttgatgaccagcgcacgtcagatgatttccttccgtaaaagattttatcatatcctaaaacataagaagtagttttagattgataaatgactactcgtgaaaccggatttccgacacggtcattaaataactgaacgtattgccaattctgtcctttatcatttgatactttaaccatatgttggaatctttcaaacagatacaaaattccgtctatttctcccaacatagttctatttttatcaacgcacactgcttcaataggtccctgaatttcatgatatccagattcacctactacgaaattttcaatagctgacaaatgagaatattcaggactaaattgaaaagactcagtcatcaaagacgccatcatggcagatgtgttgaagttaacatacgacatgttgtttaaagaaaacttctgtttaatgaattctttcactaaactgaattcttgcatatgctcaaatgtgtatgcgttttcttcgaaagtttggaactcttctgtttcaacccattcagacggctcaaaccctgctgacgtagtttgaacacgcattttataataagtaagcggttcaatacgattttgttcgaaccaatcattatccgcggtataacccagtgaagaccaactcaagttatcagcggggataacttcccccgcttgatctcgagtttcggccagttctacaaaatagtagaagtttgcaccaacgtcatcccaacgaatattgacctgattcgcagatagcttatgaattcgtaagctggtgacgaacggtgcaattgtcattgagtaataggctccaatttaatagttgtgtattgaggacgaaggtcattctcaaatacgataagtgttccatcgcgggcgaagacgatatcctgggtaggagtagaataaagctcaatactctggtcttcaaactgaagaggatcggctccaatagctccaaggctccagtaaatattatcaccataataatctacttcaccgattttgtaccaacgagttctttctccattagtagttctatcaaaatcgtcttcagtatatggctgaatatgagtattctctttaatatcacctggtttaaatggtccaatgaccatatttcctttaccatttttatctgggtcagttccaacgatattaactggatatgaatctgcagttggagtgacagtaaagaccaaatcaccagaacgtaacgtccgcggagtaatagtattatagtatttaatacctgcgctaggaagagtgaaatagttgacaatttcacgaaccatctgaatatcaacagaagaaccgatgattgaatggtcagtatcatcaatataggtcaataatttagatttactgaaatttttgttaaacatttcaacttcatcaacgtaatatctattaattgagtctataatttttgactgtaaccactgctcagattcttgtaacttattcagcgcgtaagaggctttaatattgtgacggatgaacaagtagtctggactcaataccgaaggggtaatgggagcaagacagaatggacgaagataatcttggatgtcttctctttgaacagcggttaactgcagtccagattttggcttaattgcaataaacgcataccctggcttatcttggtcggtaaagcactgtactgcctgcacaatagaaccaaatcgtgagctaacgaatgactcatagtcagttttagacacgcaacgcatttgagattcacgcttaatttgtgctaattcgcgaatacgttcaatgtcttcaggttccccaccaccatcagctccaacgtagtcaggagaatccgaccagttttcaatgattctatttactacgatatattgcagagtatcggcataagtaaattcagttgcgccattcgcagcttcaccatcggtgcgaatgtattcaataactacctgcgcgcctttagtaggttttaatccaccaatgaaattactttcaagaactcctcctgctacagaggcttctgccacgccttcaccaaagaagaattcggtatttccgtcgacagtttcacgcatataataaatcgttgaaatggatgaagcatgaaccattgacttgtctgtccagttagtccattcagcgccatcaacccacagcttaaccagcttacggtcaatcgactgatcacgaataacaataggtttcttcgggtcatatgacaattgagtacgaataatacgtccttgtgccaaattaacaatgggccaatatttctggtcgttatcacgaatagcaacaacgttttcagtaacaacaaagttatatgggttggctttatcggatttcgagtatgctaaaaatttagtccctcgcggaattacaactctcagtgtgctgcttgggttcatgtgagttacctcaagcataatagacgcagtggctgctgatttggaacttggcaaatacccgttctgttgggctgcttgaacaacagaacttctcaagttagctgttccaataaagctttcgtataaagcagtattactaaattgctgtatgtaaagcgtgttatatgctaataaatctaatagcacatttaagcgcgaacccgcaaaatcaaaatcttggaactctttttgaccactaagccagttaataagctgatttttaatttcgtcgaatgttgctccagtaaatgcgtctgggatagcgtttgcagtacgcgttaactgataatttaaaggttctttaatagccattagtgtatgaatacctttgagcttgattgcgcgacagtgtcgccgcaagaaattggatcggccatttgaacagcttttttgcctgttacaaataccttggatgtgcgaggttgaacaacccctccatgcgtatcatgagggtcaaccgtcttggtgtgcggtgtaattgagtcaccatcaactaataccgctattccaccagtgaatactttgctttgtgtagcatttacttctgtcggaggatacgcactatgcccggcagttacgcatttatcatatgaaagaccagccatttaattccccgcatatacgtaagcacgaagttggtcgccccatctgctccagttacctttaacggtttgagagtaaaccttttgctttttatattctgttacgattggagcgctagaacctccggatgaacctccagacgattcttctgtcactgtatatattatctcaactgtataggtaaatgtcttctctagtgttctgggggctttccacaggtataaatcagcagttttgggattaggtaaatcctcccacgctgaagcggacttcagctcatcgccttcacggtatttaagcacatcgtttccaaaagtaaaaactgagttataattacctttataataggtttcagacacagagatatcagatactggttgatagtcgataatatttattgattttaatgtttcgttggtagataattgagcagtaaagtactgctcaacgtattcaccttctattacttcgcgtaacgtggtattaataggaagtatatcagccatgattaacctacatcaattcgtgaaccatcaacagtgtattgaccttgggcgattgagctcatagaagccattgtctcagtccaagccccaccaacattccaattcacagtacctgctacttgccaagttaagttaccaccgacggttacgtcgtggttgccatctactttagtagtggcatcaccgttgacttggatatcagcatttccttcaacgactatcttaatgttacccttgacaaaaatagtaccatcgccttcaatagttttggtttcatttccacgtacataaagcgtgttatcgccatcaatttgctgtcgacgattatacatgttataataggtctcgttccctccaacgttaaccttcttatccccagagattaaaatatttccatcgccctgagtcatgtcatataaatcagctacagtttttctggtacggcgtccatcgggagctacttcttcgtatgaacctgttggatgaacaatacgatagcgttcatagccaggtgtatcatcaaactcttggatatggcctgattctgtttccattgtgtgaacatatggatactgaccattatatgaagactcaggttctttgaaaagaattctcgaatcctctggggtccatgggtcttcaggattacctccagactttggttctacgtaagcagcagacaggttttttccttctggctttggagcaggaactccatatgattccatattacctgttagaataatcatggaaacacgagaagcacgaccttttgtctgattaaaccaaacagagtttcttgcttctgtataagcggttttccaatcaccaatgaacatggcatcaagcattttaccaaattttgctaaaccgcctacacccatttgaaagctcatattttctaaagccatctgccttgacttgttgactttagcatatacaggtcctacccgtgaatttgttttaatgtcagaaagcattttatcacggtctttcttaaatagtgcaactgcttcgtccattgtaatgataccaggatttcctgtaacggtacgaccaacctgattggatagggttttattgatgacagacatatcacgtactttttgcgccatgataagatgcccaatacctatggtaggatatccttctgtgtcccagtagaccttcaatctaagaccttcatccctattaagcatatctgttattgtaattgcaggatttgggtcttcaggaatatcacttaagtcagcgtcatcaggattaatgccaatgtctaaatttctgtcctggatgatatttggtacagcactatacccagtttcatcgccttgaactagtgggttggtatctgacccgacctgtctaggatattgacctgtagggtcagaaaatccttctgtatagtttggcttcgtttttctatgcgcagaatatgttcctattactagtcctgctgttttgaattcatcaagccataacccaaacaccgatgttccttctaccattccggttatagatgagccaactccagaaatcccagctgagttggtaggctgaatcactgacatccagggaaggtcttcagtaggaagacctgttatagctccttgcaccttttcaaatggatgaagcccataaacacgtactcgcactcttccttgtttcaacgggtcttgtctgtcttcaacaacaccagtaaaccattttaatgaatcgttcatttcaatcataaaacttctccgatggtagtctgggatttgtaccggcctgattcgtattcactgtcaggtgctttttccatttctcgtataatatcagaaagaaatgcttcaatatcactaggattgataatgtttatttggcgcagtttttcattttctataatagagtcttcataaatgtcaacaccagctaaagccccagtatattgagggtactgatgattaaagtcgcctttatcataccaaatgcctgaattttcaggatattgctcgaggttataataacgattgccgtttgcatccacgtgatagagtatttggtctccacctacatctgcatatttttgttgtgcaaattgatagcatgcatcctgggttttaatccaatctctaaacgggtcatatacgttattacacattaaaagaatccagtacagctgactatttccataaagaatatatgctaattcttctggtctaggagctccacttatgtaatatgtttgtaaaagatagttttctgctacagtgtcgaaatatttgcgataattacgaaatatgtcagcggttgggatagcttttgccttagcaccttttacggtctttgcagaataatctatcggactaaaaaatgagaagagcatagtttatcctcttataaatattaataacagtatttataaggaggccactatggcatattctggcaaattcatgccgcagaatctccacaaatataaaggtgactttagaaagattacttatcgttctacatgggaacagtacatgatgcgttggcttgacaatcatccagatgtagtccaatggaatagcgaagaagtagtcattccatactttagtaatgcagatggaaagaaacgccggtatttcatggatttctgggctaagttttctaatggtcaacagttcttttttgaagttaagccgaagaaagaaactagacctccggtcaaacccacaaagttgacgacatcagcgaagaaacggtacattgatgaaatttacacatggtctgtaaacgtggataagtggaaagcagctcaagctaccgccaacaaaatgggtatagaatttaggttaattactgaagattcacttaaaaaattaggatggaaaggctgatggctatatttgaatttatcactgaagccgcagaatcacctaaagctaaatcccgtagtgaaaatcaatgggtagcattaggagttgaatactctgctgctcgtaaaaaaggcatgacgtcaaaatcatttgctgaaagcaaaggaataaatcctgctacgttcagtaaagctatggctcgtcatgcgtcaagaattaaaacggcaattaaagtagcagaaattgagaaaaaacctgctaataaaatgaccaagcaagagcgcgctcttgtgatggtaaattcatttcgtagttctatcaaagataaaattcgcaatgaaggtgcagcagtaaacaacaaatctgctaaatggtttgcagaaaccatgaagaaaaacatcagaggtcattctgtaaccaagcctcaacctggaaagctatatgcttacatgtatgatgctaaacacaaagacactcttccattctgggataaatttcctttgatagtttatcttggtctaggaaagcaaggtacaaccacattgatgtatgggttaaaccttcactacattccgccaaaggctcgtcagcagtttttagaagaacttctgaaacagtatgctaatactccagtgatatctaataagaccaggttaaagataaactggagccaagttaaaggattcgctggtgctgataaaatgattaaagcatatattcctggtaatataaagggtgctttaatcgagataaaaccagctgattgggcaaatgtagtcatgctaccaactcagcagtttatgtcgaaaggcaaacgctactctgctacttctgtatggaaatcataatgtctactggactgtttaatcaaactaacacaactaactttatattagaggtccctgatgggggcctcacccaagcgtttaaagctaatcttcaaacagccgtagttcctggaattcatattcctgctactgatactgtaggttcgcctcaaggcatgcatcgtgctaaattgcctgggtctacttttgagtttgacgctgttcctgttagatttttagtagatgaaaatcttgattcatgggtacaaatgtacaaatggatgttaagctgtcaaaactacattgaccgagacaagtctggatggaataacggcggtgaaggatttcctggcgcagttttaatgcatgttcttgataacgataaacatgatatagtattaactgtccgctacatcggaggttgggtgagtgatttatctgaaattgagtattctttaaccgaagaatccgacccagcaatggtatgtgtagcaactttgcagtacaaatacattgaagttgaaaaagatggtataataattactggtagaccttctgtcaatgatactcgcgaatcccagtatcaacagaaagttatgggaatgcatccttctatgaggtaataatttgaagcttttatttttgattggtaaaaaacgtagtggcaaagatacaactgctgactacattatggataactataacgcaacaaagcatcagttagcaggtccaattaaagatgcgttggctgatgcaatgcttactgagtggtatcgcgatacatcacgtcagtttcctcgcattactcggtcaatgattgaaggtattgattacgatcgtgagcaggatttaaatctgtctactaaagacgtgattcgtattatggcgaatgccattgaatatgtccatcatgatttgcctttacctggggtggtttatgatagcaagcgtaaaattcttgacggcgatacgatggaagtcatccgtcaagttgtaataaataaacctgttgagccatggtcaattcgtcgtctcatgcagacccttgggactgacattgtctgtgataagctcgatcgcatgtattgggtgaaacgattcactttggttatggctgatacttttggtgattatgattatttcattgtcccagatacccgccaagaccatgaacttgatgtagccagggcgatgggtgctacagttattcatgtagttcgtcctgagcaagaaggttctaaaaaagatactcacgtcacagagcgtggacttccgattcgcgaaggcgatatcgtaataactaacgacggttctctagaagaactttattcaaaaatcaacactatattaggaattcaaaaatgactactgaacaactgcaagcccaagtcgatactctgaaagttcgtgtatttgacctgtctgaaaccatccaaggtctgtccgctctgcgtgcacagtatgaagaagtactacagaaactgattgctgtgtccggcgttgaaatcagtgaagacggtcaggttaaacttgatgacctggttgcaaaaatcgaagcacagttcgcagaagaaactactgaagaagctgatgcctaatgaacttcagtgattttagcactggtctatatgtagctgctaaattctctgagaaaactcttgatgctattgaggaccttcagcgtgagttgaaggtccctaatcctgtacctcgtcataagattcatacgacgatatgctattcaagagttcatgttccatacgtttgcgcttcaggaagttttgaagttgctacatcaggtaaacttgaagtatgggacacgcaagacggacgtacactagttcttaaactagattcagaatacttaaaattccgtcaccaatatgcaagagctctgggagcaactcacgatttcccagattactcaccgcacattactctcagctacaatgtcggtccagctcacttcgagggtgaagttcaagtacctgtagtgcttgatagagagtaccaagagccactaaaactgaactggtcagaagatttgaaatagaaatttatttcacaaagttgtttacaaccggttctagtggtgatactatagctccatcaaaacaaactaaccaaatggaagcaacatgaaaacgtaccaagaatttattacagaagctaaaagacaggatgatgaactgccgattgttacaaaaaccgttgacgggacattagccgattttaaaaaagttcctagtgataaactttctaaattgactggcagcatcggtgaaaaagatggtaaggtaactttttcagcccgaggttctgctaatcttaaaaagcttttaaaagccgctggcgctgaataaagttgtttacaacgggttgtagtagtgatactataaccctatcaacttgaggagaataaaatgaaacgttgtgaattaattagaaatgttgcatcaacaatctgcatgggagcattaggttttggcattatcggtgcagcctttatgtctcttcctgaaacagtatcagtattaagcgttgcatttctaatgggtatcatttctttcataatggataaaatagcgcatgaaaaagattaagcagtggttcatcaaaaactatgatttaaaccgtgaagaagtaactaagtatgattatgttactttgggtgtaggactaggtgcactactggcagcactgcattcatcactacttgctattgcagtgcttcttattttggctcactatagctggaaacgtaagtaatgtatgcacttttaacttggtctaattattatcctgctcctggctctgaccaaatcagaggtgtctacactacggtagaagaatgctatgaagccctccagggaacgtatcaagactattttgagatactgaattcccgatttgagactgttgctaaaggttcaactgaagcatacaaagattaattgtgaggaaattgtgatgaatatcagagctgcatttaatactttctatcaagagaattataagcttcttgcccatgaatactatgatgcacaaggcgttccaattcctaatgatttagttacgcctaagcataccaaaaccgattctcttgacaatgaaatccagcctggtgatttagtatcatactactgtggtgggtcactttctgcagcaagcgttggtattttgctaggatttactcctaaaggttatcgtgtggttcctttccatacaagtccaatttctgagcaccgggtattgctctctcatatggattcaccacatcgggtattcctggttaaatcaaagagctcaccgattgtgtaatatgctttaggttttctttgttattattaatctatcaactgctctgattaattttagggcagtataaataaaattacccactggggagttagaccgtaggggtagcgggacagactgtaaatctgttgctcaaaaggctcgagtggttcgactccattactccccaccaaatttagggatactagctcagttggttagagcaccggacttttaatccgggtgtccgaagttcgagtcttcggtgtcccaccaaattcgggtcgttggctgagagggtaagcgacggactgttaatccgtgtcagaaatgactaggcaggttcgatacctgcacggcccgccaaatgaagaagtcagaagacgttctgataaatcgtcggcatagaattccctggcatggcgtttgtattaaggagtatgatttcatcctgcttaatgcttgttcatgttataatttcttacggcgttgaaagttcgctttcagggatacatcttagaacagagtgctaaacaagattcatctggtaccaaggtgatgagagtcctgttcccctttgcttcggcatcgtgccagagtatctctgaaagcgaattatggacctatagtttcagcggttaaaatactcgcctgtcacgcgagagtcacggattcgaattccgttaggtccgccaaataagaacgtggcagttcttgaagatgagtttgagtcctgtaagataatgccgaggacgaagctgtttgttcccacggaataagctctatattcgtaagattatatctttagcgtgttctacatcaagctacttgttagtacttcaagaacccggataaatgcggggtaacttcagttggtagaatgttgggctcatatcccgacacgcgcaggttcgagtcctgcctccgcctccaacaattggactatagacaagcggttaagtcaccggcctttgactccggtatctctggttcgaatccagatagtccagccaaattaatattcattcaacgcgtctacaggggttgaactgatcattcttctcttaatttcgtatgaagtcctcatgatggatggagtgaatattgatgtggccgtagttcagttggtagaactcgagattgtgattctcgtagtcatgggttcaactcccatcggtcaccccaacaatgaaggaatggtggaaaaatacacggcccgcaaacgctgtggctgtcgctaagcgaattgtgtctatatggcacttccttcaccaattaatggagagtagcgctagtggtagcaaaccggacttgaaattcgggccatcggaaacggtgagggttcaactcctttactctccgccaaatttatgaaagttaaacgctgcccatagcagtggtacatcaacaattagatgattagctttccacgggagtatagctcatttggtagagctctcgaccgataatcgagcggtgactggttcgagtccagttactcccaccaaataacaggttcttagtataacggctattatgctgggctccaaacccagtgatgagggttcgattccttcagggcctgccaaatttgcatccatcgtatagcggatattatgtctggcttccacccagaagataggagttcgattctccttggatgctccaaattactccgtatagctcagtctggtagagcgctccatttgggatggagaggtcgaatgttcgagtcattctatggagaccaaattatcggtatgacacaatacaagatggcgtaagctgagtagcgggattgcagtctcgttcagatatgctatcgagtatgggtgatatattaaacacatggattctgcaaagtccatgtgactcggttcgaggccgggcataccgtccaatcacttgccattgagaattatattatgaaatattacggcttcaaaacatcccatttcgggaaagcatatcgtacagaaaacattgatagacgtcgagcatattacgaatcactgcataaagcaggacgttctcgtgcacgacaagaaggccaaaaacaagcgaaggaaatagaatgaacatttttattggtgtatcaaatgacgtaaatgctattacggtgaagctgtctttggatggaccggttaatttagcattagggctttcatcttgtgctaaacgggatttaatgattaacgctgactttgcatatgcatttgatgaacgcaaaggtatgtgggtttggattaaatatcgatacgacacattactcaaatatgagtactttagtgaacgtgatattcaagaaattattgcttatcactctgggtgtaaaattaataaactgcggcaagttactccgttaaccgctgatactaatgtagagcaacttgtattagattttaaacaaatttgccaggcgaaatatgatgaaagattctaaaggtcgagaagtacaagttggtgatatcgttttctacggagaacgcacatacaataaaggtggtcgcggttctatgaagtgtggccgtattactgatattgcttcaggattggctaaagtagataacgactacgttgcaatgcgaagcaaatcattcgttaaggtttctcctatgttcgcaacaatgtgggaaaacggaacgattttcgagatttaatgctacaagaataacctgttattattactacatcaaaacaaacaaggaaaaagaatgaaacgtatcgcactgattgttgaccaagaagctatgttcgctgctaccggtaaatttcatccggtgagtaaatttgttgctcgcagcgagaaaatcgttggtctggtagaaactgtcgcaggtgatgtaattgtttctattaaaacatctgaaatttctccggtggttaaagtagcagttaaaaatgacttctgggaagtagctgattttatgtgtgagtaattctgcctagcaggtggataagcccgacaaggcgccctcttcggagggcttttataaaagtcataagatttctataaaggccctgtagctcaattggtagagcgttcccctcataagggattggttgcatgttcgagtctttgccagggtcaccaaattatcaacagaggaaattgaaatgcatattaaatttggacaagttattcctaaaggcttagcaatggcaattaccacttgggaaaacgatgctgatcggtattctacccaaatggtttatggcttagaaaaagaagagattaatcaagtaattcatgttcttgaatggttctcttctaatggccgccgcggtgtgtatatgggaaatgctgattataatcatgaagcagttcttgaaagacttcacactgaacagaagtatgtaactcctgaattttccaagaaattctttggcgttgatgttcctgcatatgattgcacagacgaagagtttgatgcttatttagataaccactattcttgttcaaatgaagttatgtatgctattcaggcttggttgggtaatccaattgaatatgactatgatttcatgcgagtatttgagaaagtagaaatcttcaacattgaagaagaaattcgtattcctgatgctccagttgcattccatgttggaattacgtataatcagaaagaaagcccattaaaagttgattggttgaaatacgtgaaggaaaagtaatggatattggttcaggtagttcatatccatcatgtgctttgagtaatttcgctcctcataaatttatctatgatggtgtagaatgtgcatcaatggagggattcttgcaatccctcaaattttcttcgcctgaaatgcaagcacatgtatgtacactagtcggaaaatccgctaagtttaaaggtaaaaagaaacggtggtggccaacacaaacgctttattggaaaggcgtgccaatccatcgtgcttcagaagcgtatcagaatttactaacaggagcatacgatgcacttagtaaaaatgaaggattcagaaaagctttggctgctacccggaatgctacgctcactcacagcatgggcaaaaataaaatttctgaaacgattttgactgaacgcgaattctgtaatcaactttatcgtttgagaaatgctataaataatcagtaatataattatcttgttcagtgttgaaatcggtagacatggtgacggacaccttttgagctcgcatattgcatcatatgctggcgatggtggtaaatcgccgacggaatcagtcgtgcaggttcgagtcctgcctgaacaatctcggggcatagctcagctggatagagcagcggacttctaatccgcaggtcgaaggttcgaatccttctgcctcgaccatttcgcatcgatggtggaactggtatacacatagcacttaaaatgctacgccgcaaggattgagggttcgaatccctctcggtgcaccaagccgatttagctcagctggtagagcgcttcacttgtaatgaagatgtcgcgggttcgactcctgcaatcggcaccaaattcgaagggaaacttgcgtatgccctcgttgagtcgtcagatagaagagaatggttcgtccattaccgctagtcggttgttccctgtcgcaagcataacctcctgacgctatacttctttggatgagactgatgcctccgagtccaaaggaatgaatttagcaggtcatctgccagtaggtgatgctgtcgattttcagagccccgtcttcggacggggctttttagtataaatatcatagaaatcgacactattactaaaggaatttataatgaaatttaaagaatttttggcagaagcttcttctgatgttaaagctgcggctatatcagctatggaagctggaaaatactcatacaaagatacttctgatgaatcacgattccaattcgcacgtgatatgaaagaacttggattccgcggcaacgatgttacaaacgcatggaaatcaatggttgtaactggtgaaatttttactaaaccaaagccaggcactgctaaacctaaagctgctaaaaagtcatctgttcttagcgacgctgatgttaaagcactgaataaagcatgggctgatgttcacactgcatacgaaaaagctgcggcattatctgctaaactccatgcaaaagtagttgcatctgttgacccgtcaatcgcatctaaagttaacgtacgtgatacccctgatttatatgcagtactgtatggtttaagcactagttctaaaacagaagatttcggtaatcgtttgaagcaactgacgcactacgttggtgatgttggtcgccattataagaaactgtaatttatagcccagatgccttctagaggtcgtctgggcatttctatataccaggctgtataaatccattctaccctccataaagtccttccagattccctaaaattatttgaaaatttgtgcacaaagttgtttacaacgccagtcaactcggttactatagctacatcgaaacaaaacagagtaacggagaataaaatgtctaaattcaactttatccaaattgaacgtggttataatcaatatggtactcctgatcgttatcgtgcagtttggattaaaggtgaacatgagaatgcagtgttcaacgtagcagaaacccgtgaactgaaagatttgattaaacatgttcgcaaagattggcctgctgttgaagagtactacgttcgagtttaccatgaagaagctgctacggttcaaatggctatcaagtttgctaaaactgttcctgctttggttaaacgaattgaagcggtgattaactgctaataattttggggagttataatgaactccccacctactgaggaaattgatatgtatcaggataagttgagattagtagcacaaacttattttaaatcttttgccaggctgtttggtgaaactccaaattttccatccggtgaagaacgaatggctgctctgaaaactattgagaacctggtgatttcaacttacaatgagtttgccgatgacccggcggttaatcgtcttgttgatatcgcagttttggacaaaatggaggaactcattaatgcatacaaatgaagttccaaaaactcttgctgatattcgtcttgaagctaaaatagccatcgagcgtttaattaaagcaacagtagaagaaggcaaagagtctgtacttattctcggattagaatcatacgtcactgattacatcgagatattcgagcgcagcaaaaatgaacagggtctaatcattaaaccatatgtttatgattggattaatccgtacgaataaaaccaccataactattgaaaggaaataaaatgtctattctgaaaaaactcgttgaattcatccgttctaaattcggtacctttgttgcacagaacacttctgttgaagaccagtacaccactgcagcaaatcgtattattgatgaaatcactaaactgcgtaccacgcatgttaaatcagtaaatgaagaaaagcgtctgctgaaacttgctgacgaaaaagaccaggcaggtgcttccaaagagcgtgaaattcgtcgcttgatggcagaaggtatgaatgtagaaacccatgctaaactgggtcttctgtatcgtcgtactgctaaagctttacgtgataaagctgccgaatataaagaaatgcgggcccaaattgaagaaaccgtggttaaacttgatgaccaacgtcttgatttggcagtgaaactcgaatacatccgtgagacccgtaatgcttctgctttgggtattacctctgctgatgacgtgattgaaatcgcggaactcgctaaagtagatgtacaagacatcatgatgaaagttgaaaccttcagcggtactcagcctggtattgaaaccaccactgctgatgtccaggaatatctggaaagtctgaagtaattttaccggggccttcgggcccctaatttggataataaaatgttatatgaatgcgctggagatattccaatggcaacacctcaaattaaagaattaattgcagcaggattcccaacagaaatcactgatgttctcgaaaaatttgcttatcctgatactcggcctgaaaattggaaaactcgctataacgggtataacaccacagttttgccgcgggctatcgttcttaaagactattacaagctgaaaaacttaatttccagtatttcgtctatttccgatggagttaagcttgtagatatctttgcacttcggtacggaatttattctttcaacgattctccgtcaaatctaacatcagctcgtgctaatgccgatggatattttacctctagctccacaacgtatacagtagttatcgagattatctataataaaactagttatcgtctcggtattaacatggttaaatacgtgacatctcaggatgattatatcaattatttgaattactgcgtcaatgaattgccccaaaaagtcatgggtatgtttgactctaacaacatggtaggcaaacaattaatcattgatgaatttatcaaatattgccgtaagagggtgcagaaatgagtaatttatatctgccaagtgaacctccagtttataattatgtctataaatttgaccaaactgattatgttctaattccggggatggtctgtgctgctggaactatgataacgcttatcataatcgacgtaatgaatttggctgaaattagcagtacatcattagtgaatgtaatattacttacatggggattaataggtttacttggtctaggattaattgaactatttcgttgggtaaagtatgttaagcataactgtgaacgaaaggctgaatggaaagaacagtgcaagaatttaactcttgaatggaaccgcaaaaagtcgtttgagtttattaaagaggtgagaagaaaatgaatgaatgtaaacctgacgggttttggaaccaagatgggctggcgccagcttttggaatcgcgacatggattttatattgtgcttttgtaattgttggagggacattctttggattgaacgtctcagagtttatgattatgcttttatttttaggtgttttcgcattcagcctcatgtggatgctaattatcgcgttgattaattgctgcacatttttagcttaccgtatgaaatacaagaagtggaaagaaaaagaagatttcaacacctggattaggagctgcagaaaatgattaaaacttgttaccgtggaatgattaaagacgatgagcctgggtattttttcctatttctgcttatctggttttcattttcagcttttgttggatttgggactttttggggtttttacttcttttcaccaatctttggagatactttgttctatttaggttggatgtcaggtgttggaacttggtttgcaatgcttgctcgttggttgcaattcgtttcccagcggcagcggggtgtatttgataagcccaaagtaaagaaagaaaaatctaaagatgattctcgtaatgaaactttgtcctggattaaggagatgaaataatggctgttgcagtgcatgtaaaatttgaaaatggtgatactcgccttctgtgttacagtgataatgaatcactgagcggtatcgagatttcactcaaagaagaactgcttggtattaatggacctatctgtgatttctcggtagaaggttcatataactgtgatggtgtattagagtctatggtctatactgccatggaagatattctcgaagaaagttggaatgaatgtcaatgaaagagctcagtgcaggaatcttattctttaccgatgacaaacggcttttcatgggtcgtatgacaaatacatatatccagggcagaggctctagatgggatattccaaaaggacatgttgagcctggtgaaacaccaaaagaggctgctattcgcgaatgcaaggaagagactggatttactgagtttgaccaggacctcttatatgaccttggacgacatgattatgccagcaataaggatatccatctgtttggatatatgctccctgtgagcccagaaatgttcagaaattgccgttgcacagcttaccataaagatgaaaatggaattcctttcccggaaatcgacgcatttgctttaattaaaccttctcaatggaaatatgtgatgggaccaagtttgtataaaatcatgacacaaatgtatagcacagctcagtgaggttattatggaagaagccgttgaattaggcattccacacatttataaacatgagctacgatttattcacgatggaaaatggattagcatatttcatcctagggataaaatgtcgcgtatactaatgaaatcacgatacgtcttcggtgacggcgagtatacaaaatcagcatattacatagcagaaaatctatatccaggatttagtgaattgcccgaggacgatagaagagattatgtgtggtggaaaggtaaatggacaccatacgagaagtgtagccttgaattattcatagccaagtgcagggccaaataaatactcctataattaataggaggtccttatggatatttttggcatgctgcgtattgatgaaggatacgatagcaaaatttataaagataccgaagggtattggactattggtattggccacttactgactaaagacccgtcaaaatctttggctatttctaacctggacaagcttgtaggtcgttctactggtggccaaattacccaggctgaggcagaagtaatttttgcaaaggatgttgaaaaagcaattaagggcattgtggctaatgctacattaagcccggtatataatatattagatgatgttcgtagagcagctctaattaacatggtattccaaatgggtgtaggtggtgtcgctggattccctgcttccatgaagctcttagctgctaaaaaatgggatgctgctgccaaagaactggcaaattcacgttggtatcgtcagacacctaatcgtgctcgtcgtgtaattgaaactatgcggaccggaacttgggccgcttatcaaggaaaataaatgaaaacttatcaagaatttttaaatgaatcccgtttagcaacagttggcgtaatgactgaatctgttggaagtaatcttctgaaatttaaaaaaggtcagaagatgacagccacgctagaagatggtacagaaattgaaatggacgttgttggatataactacgtagtagacggcaagttatataataagagccatgctaagtttgattcattcgatgatttcacctcttctattgaagatgagtcttctcgcaaagcagtagcatctggcgatgcacgctccttaatggcatttggtcatgagcgtattaagtctaagcagaacaaacctggtgaagataactttgcattagtaggttatcagtctggcaaaacttctaacggttaccaacgtactgttaccatgtacatgcgtaatggtaaaattgcattcgtaaacgatcgcggcgctattcgttacgctaaatcaattaagtaagcaatttcctaataaagccgaacacgacctctcctcatgaacgtcgagtcctctgagtgaagtagcttttcctacctgtaataaggtcgagcccaagtgcggtaaggggtttacatagtgtgtcgatggattaaacatgtgccaaggaatggcccctttaactggaatctaaaatgaaacacttaactcccatttatttgaccctgatgcatgctttcagagacgctgcagacagacgattgaataatcccaactacagtttttatgaaccgtcttgccttatgcgagagtacggtacccttcgtctagacggtggaagacaaaccggaaagaccgcagccttatgccaattcgctaccgattggttgcttgaagatggttcggttataatcttatctactcgatacacacaatcatctgaactgatggaaggtattctacgagaatataattcatcgcatttaattaataaattaccggctaacgagatagctaaatcaattgttccgatgacaatcagggaatttctatccaatgattcctcttataagtttagaggaagaaagtttggaagagcattaattatcattgaagaaccaatgaaagttcccgatatgatgaagttctatgatatgtaccaggaagctatcagatggtctatgcctaatgataccttacctttatttttcgtgataggaatgcaatgatgacacagacagaaattgttgatatgattacagtaatggaaaatacaggattttccgatatgaagcaattaataacaatggttacggctggaaacctgcttgagtacaagcgctacaagtttctgtctggtccgtttaaaggtgcagaattcatttctaacgctcctaacacgaagtggatgaatcgctatcctaattttagaattgagtttatatctggcaagctcaaaggcgtgattagttcaagcttaatcacatatgaccaacgcattcaagagaaaacaatgcaatggctgaaattgttataaagtgtcctccacatttagttgaaagcttctgcgattggttcagtaattctggagagcaagatttctatgaagcccatcagaatggaacttggaatgaaaccacaaaacagtgggaagaagctacaacgtatataggcactcgcggatatggagttaacgagcctattgaaattgtggaatacgataaagaaactgatgaagaaatactttatgctaatgataccagagaacgtttatggcgagaatctgaattagaagcagaagttattcgtcttaaagaagaattaaaaggaccaacgggttttgctacgtggaaagacgctgctatttctgaacgtttagcacgggtaaaattgatgccagaaggtaaaatctcgtacttacaagctgcatccaagttccattctactgagtggaatactatggacgtaattaccgcatacatgcatggttggaataaagaatctaattaagaggaaatatgaaagcatatcaaattcttgaaggtgaacttaaaggcaccatttacatcgaagatggtgatgacgcacgagtaatcgtttcaaaagttcttaaagaagatactattacggatgctgaaaccttttatggctacaaggcgcgtgaagtagaaattgaatatcaaccaacagtaaaagttgaaggcggtcagcacctgaacgttaacgtgctgcgtcgcgaaaccctgctggacgcggttgagcatccggaaaaatatccgcagctgaccattcgtgtttctggctacgcggtgcgcttcaactccctgacgccggaacagcaacgcgacgttatcgctcgtactttcacagaggcactataatgtcaatcgaagatattaaaggatacaagccacataccaatgaaaaaattggtaaagtgaatgctatcaaagacgcagaagtccgtcttggattaattttcaaagcgttggaagaagaacatgttgaaaagtacatgagcttagatgttagtacaatgagcgacaaggaatttgacttggctaatgaacgcattactcaaattcgcaatgctattcagcacctgaaggaagcttctatgtgggcatgtcgttcagtgtttcagccagaagaaaaatattaaaaagtagtttactttccttacgggccatgatactatggccctacaaataaaggagaatgaactatgtcaactaacccagaagtattcattcgcagaactaaactgcgtcgtaagtttgaggaagcttttcgctctttgaatttatcagttcgtgcccgagctaaggctgagggcaaagagcctttcttcactaagtactctgatcatttgttggaccgtgctatccaacgtgaaattgatgaagagtatgtattctctgttctttccaaaattcctaatcatcttaaagaaattaatgaatttttagcaatgccttggcttccaattgacccaaaagacattgatgaaaatatcgagtataaacccatgcggttagaaattacggatggaaatctgtggctaggatttaccatggatattccaagaccaggaaaaggacctagtataaagtgtcgtatggcattcgttaatgataaacgtttgaaaggtaaaatcagcacaaaagttatacacattaattgaggtaaacatgaaaaaagcgcttatcggtctaatggccttgtgttcaacggcctttgggtctgagccaactttcagtaatgttcaacttgacaacttacattacgcatataattttggtgaacaatatcaaaaatccggaaaggaaaaatctccgcataaccgatatgataataacggattaggatatataatggctgctatatcatggaaagaatcttcggcaggagccaatttaaaagcaggaaagggacatcattcttatggggtatttcaaaattacttgcctacggttaaagccagagctaaactggaaggtaaaaaccttagtgattctgaaataagaaaaatgcttaaatccagacggaattctgcggagtgggcatatattgagctttcatattggttaaatatacataacggcaacatgcgaaaagctcttgctagttataacgcaggatggaatgtcaaaagaggaaactcttatgcgtcagatgtcctagagaaagctcatttcttaaagaaacataaaatgctacatataaaggtggaataatgataaagtacgccgcgcttcttggattagtattggcattctctgttaatgctgaaaattcaatgtcggattcacttcgtattgctaaaacattttgtaatacgaattctgaatgtgttgatatattagcgcttgaattagattcagcattcagcgatggagtaaaagattcacgtagcccggcccagtggacaacactaataaatcgtaaggctaagagcatgaaagatttatgtgttaatgctcctaatgaaaatatatgtttaatgtatcgtgaccaattaatggctcgttatatgtcaggactatcgtcaaaatgaaaaaagcagctattttattatgctgtgcattttcagttaatgcctgggaaaagctcccaggctatcctgaacctgtactagcggcgcaggggactaaaatagaaagcaacggtccattcaagaacaatattgaaatagcatttgtgcctagtagtagaaaattgctaatgtcattttataattatcaagataaagatgaccaggtgatagttccacatgttgagtataatgctcgcggatgtggaatgcagagtgacggtgtttctgttgatggagtaatgcatcctaaagaacaaggagtgctgaaccctatccttaattgtaacaatgctatatttttaagagtatacaataatcttaatgaatatgcaacatataaaattccataggtgaataaatgattactggatatattaagggtaatattgtagaattattcatgaagcatgaatgcgatatcgctcatgggtgtaattgctttactacaatgggtgctggtgtagcaggacaacttgctaaagcatatcctccaattctcgatattgacatcgatgaagaccgttattatgacaacaatttagctaagcttggaactcatactcgagccattcacaaaaaaggcactgcatattgctataatttgtatactcagtatgccccaggtccaaatgttgattacggcgcaatttttaatgcattccatgaactaaattctggtcgtattgtttataatcgtcctctatacattccaaaaattggagctggtattgctggcggtgattgggaactaattgagaaattaatcaatttagcaacacctgatattgacattatggtggtagaatatgaagaagctaaaagctaaatccgtcttgttagaggtaaatagatgattactgaagagcaaaaaactaaactgtggcagttgattgacgattatgcaggtgccgagcaagtagtagctattagtgccatttacggaaatggtctacctgaagaatacgatgaactcattcgttctaagaatgctatttctgattttatggagacactttaatggcacagctttatttcaattacgcgagtatgaacgcaggcaaatcagctaaccttcttaccgcggcgcataattacaaagaacgaggaatgggaactctcattcttaaacctgctattgatactcgagattctgccaccgaggtaacatcgcgtattggtcttcgtcatgaagctaatacagtagacgaatctattgatatccttgagtttttcaagtgggcacaaacacagcgtgatattcattgtgttttcgttgatgaagcccaattcttgactaccgagcatgttgttcagctgtgcaaaattgttgacctgtacgatgttccggtaatggcgtatggtcttcgcactgattttcgtggagagttattcgaaggctctaaagcacttttggccgtggctgataaactggtcgagcttaagggggtttgccattgcggccgtaaagctactatggttgctcgtattgatgaaaacggaaatgccattaccgatggtgaagtagtagaacttggtggtgaagataagtatgtttctctttgccgtaagcattggtttgaactaattggtgtttataatgaagccaagaacgtataacactatactgatgctaatcgtaggtatgctattcatttggattgctgcagcagcgtctgtgcaaagcgacagacgagaagaagcacaaaatcgtcttgattctagctgtaaagtattagcacaaggtaaagactttattgctaatatgaatgggtgttatattaaacatgagtagcttatttgccatagcaagtggtatagtactagtactcataattggattcttgctgtacgtaatattgctttcgttgatggtttaatatgaaaaaatatgtgatgtgctaccgttgtcttcatgtatatgattacaacactgctccaaagacagctaccaagcgtcttaaaaccaaagaacctgaatgtccaaaatgtaaatgtaaggtcatctattcatgaatattaaatttttcaaatcaggattttactatcgttgaggtaatttaacttaacgaggtaataatgtctagaacaattcgccgtaaaggctggcatgtagtaaaatcttccaaatggaacgatcagaataataacgaatttgcttatattaaaagctataacgaatacgttaaaactcagaaagataaagaaacccaacagaaatatgttgaactgcgtatttctgaaaatcgggaaagaccgttagaggccaagaaactgattgctaaatcaaagcgcgatggattctggaaaactctacgttggacccgttatgctatgccgatcccacgtctatttcataaagccgaaattaaacgcgcattgaagtatgacgaagaatataactgggacgaagctggtgctagaactattgagcaaggcatctgcgaatggctttgggattaagtaacacatacttatataaatactattactaactgatgaggtgtatatgaagcatttgtcacataagcaactccgtaatttgaccatttctcaattagacgaaattcgacttgaggttgggcatattatttcagcacttcgtatttcttataaagaaactgattctgaagcggactataagcgtatgcgttctcacgaaagatacctcgatgcagttaaggctgtacttcagcacaaacgtaatactggacaaaaataataggaggccgtatggcctttaatcacatttgcttagccctggtgttgggctgcgggatttcattcccagctgcatcacacgacgacatttcggattataactcgtatgttgagggagctctacaagtttatgctaaatttaaggagcctagtaagcaagagtctgaacagttctattctttcatacaaagtaaatggaagagcgagtcttgttctaaagattgtgattctttaggacgttcagcaggtgaagaatatgctaaccgcatgaggatacaactcgataatgaagttcaatgattttgtaaaggacggtaaacttactccacaagatgaattcatcggtttacttatggcgtctcaggcgtattttcattcagcgcattttgataccaaatcgtatgccagacataaagcgtatgaagttttctttaacgagattccagatttgatagatgcttttggtgagcagtggttaggattctcaggtaagagttatacaccggctttaccatcacagaaagagctgccaaaggacaccattgaaatgctagacctcattctggctaaggccgatggtatctacaagtcagttcctgccgccctccaaagtgttctggatgacatcacaggtctatgctacaagactaagtatttgttatcattgcagtaataccctccgcctccttcgggaggcattttcttttcaaaaagttgtttacttcccttcattacatgatactatagacatatcaacaaccaaacgagaaaaacattatgattaagttaactaccgagcttcaacctggaaaaatcttttatcacgtgtgtggtgttaatcgcactgaaaccaagtctggttctatttcgcgttacattgttgcatcaggcacgtatgatgtagaacttggtcttcgtggtgtgtattcgcgaaaatctcctttcttcaaggtgatttgtgaatatgaaaactatgctggccaaactgaaagctattcaactgagcgttctgcacatgatatgggcgtattcaagccaggtgaaaaacgttcggttcataatcttaatcgtgggttttggacgcgtgaagaagctgaacagttcattaaagaacttcaggaagacaagttcagtgacccagatgaccaagcgtatgcagacagactgactcctattgaggattttcgtcgacagaaagaatttgcggattcttatcttgattcctgtgattacgactactacgactttgatgatggcgaagaatgagaaacgttttacttatcatctacattgtggtacaataccagcatccgatgtttacatataatttggtgcaaatgattctggagagtttgaaatgaatggatggggtccatcagatgacggatttgcaactcgtgaagctacaatagctgacgggattgaatgggcccgtcttcagaaacaactccaagaacagcgggaatccgaagagttctgtgttgattgtgatgaggaaatcccagtagctcgtcgtctgttggttaaaggctgtcaacggtgtgtagaatgtcaaggaaagtgggatacagtaatgacttctgcatataatcgccgtggttcaaaagattcacaattgaggtaattatggaaagtattcttgatagtaccaatttagataatccgtacagcgatgtgcatgtaaaggttatcaactcttattttactaaaaagttgagtcgtatcgtgctaaaacaaggcaatgatataattcatcttgatactaaacaaattgattcattaattcaattcttgatagaggcaaaagatggcgagtaaattagtatgggacggaaaatcccgcaaaggcgatgcagtaattgaggacgaaagtccatatattaatgatttgcatcttaccccggtagagttatacggttctacactcattgaaattgagcgtaatagcactattttaatgattgataaatccgatgcagaacagctcgtaaaatatcttgtaactatgattccaactatgaaggactgataatgaacatcaataaaaactcttggcatttcaaaatgaacctgtggtttaaatctgacaacatgtggaaaatgccaaaaactctgtgcggatacttctggacaacagttcttcatgttgtgttttcttcagcgattattacattcatcggttccgttgcatggatgttcggttggccgattgtggcagagacaggaattctcgcttggataggtattagtttatccacgttttggttaaatgttatagcagtaccagttggcgcagtggttatagcagcatttatgcttttgtttgcagctatagcttttggatttatttttggtttagaaaaatttaaacattaccgtatccagaaaaagtataccaagaaactcgctcgggtaaaagctggtcttccggcagaagccgaacctttagtgttcatccagtatttaaaagctcgtaaacggaaagtttgcccaatgattgattatgtagaaggtgataaatgaaacgttttattcgcacgaaatttgaagaaagccttattgaaaaacccttaaaggttggtgataaagtagaaattgggtttgataaccaaagcaatcgatttgagcttgaagttgaatttatttctaccttcaaatgcagctcagcgcatacggtatcgattttctttaaaagtaaagacaacaaaatcgtagtatattacgaccatagcagccgagaaacaactactgtagtatatccaaaagacggctaccgtggaatgtatatcgatgattacctaaatgaatcagcagacgatggattttatatctgcaaacttttaccgggtagttctaaatcggtagttaatcttagcagccttaaatacacagtttatgagaagtgcaaagttaatgttcctcttgtagtgggtgataaattctctacaactaataactgctatgaagtactagcaattgcagcagatggaagcatgttttgccagaacgataaaggaaaagctcacgtgtttagtacaaatgacatctcgctcgttaaatctatgcttgatgttacagtaggtgaacccagtgaagaatgatcaagtttatatcgtgaacggccttcgggccgtctttcgtgctaaaaccgaacgtggtataatttctacatatcctattgccgaatttacttttgatgacggtgaaaagattactgttaaatttattcctttgactggcaagtacagcggcaaagataatattgatttagacatatattatgaaggcggggtatggaaattgaaatcgtaactactaagaaaaaacttagtatgagtattgtaaaacaaatgccgctagcttcagccgaaaacattaaattcgcaatgatggacccggaatcacgggtcctaggatatatcaatgcatttcgctggaacagacttgacatccaggtggcaatcattagcacaggaattgattgggcattagttcctatgtatgaaaccacactgcgtgaagaaacctgtcgtgaacagcatcctgatggacaagagtaccatacacatgaagtagtgtattattacactagtcaaaaaattggtaatgtttaccgtacatcaaaaagaactactgataaaactcgagcagaagaagccgtcaagcgttctaatgcattagttaaattcgctaaagggaatcatatctacttatgaaaacaatcgtaaaatcttattttggttcgcatctgtatggtacttcaactcctgaatcagatgtggatttcaaagaaatctttgttcctcatccgcgtgatattctgatgtgtcaagcgatgaatcatactaaccgtaatacgaataacagtgcaaccaaaaatactaaagatgacattgaccatgagctgttcagtttgaaatacttcttcaaactcgctgctgatggtgaaacagttgcactggacatgcttcatactccatcggaattggtagttgcatctgaccttcctgaagtatggaaattcattcaagacaaccgagctcgtttctataccacggacatgaaggcttatcttggatatgtccgtaagcaagcaggtaagtatggcgttaagggttctcgtttagctgatttgcataaagtcctggatgttatccgagatattcctgagtggaaatatgacgatcgtcccaagcagaaaggcattaacgagcgttggaaagttaaggacatcgccgatcgtcttccggtaggtgaattccttgagtggaccacctttacagaccataaatcaggtcagcagtatttctataatgtgttaggtcgtaaattccagacaactatcactgttaaagaaatgaagtactcccttgagaagcttgatgctgaatatggcgaacgcgctcgtaaggcagaagctaacgaaggtgtagattggaaagcactaagtcatgcccttcgtggtggtcttcagctgcaggagatttattcctccggtgaccttaagtatcctctggcgcaggttcccttgattaagaaaatcaaagcgggtgaattaccgtttaaagaagttcaggatattttggaaacgaccgtggacgcagttgaacgcctggctcatcaagccgaaaagaatggaatgcctaagaaagtagacatgaagttctgggacgatttcgtcgagaaggtttatcttgaaaaccacaattcttactacaaatgatacaatgaaggtcttcttgaattacggaagacctcataaaggtagacggtggtatttggaagcagtttgcagagagactggtcgtagagaaaatgctaaattctctgctcgaccaactcgaaaacaaatccaccgatttatgtcatgggccggagaaactctccggttctcactttattgggctgaaatatgattttactgtggagcgtagtagtgccaatcgttgttgcaataatttactttatcgtgggttggtctgtctgcaaacatctaatcaaaaacggaactattgagaaggtaggagagtattggttctatctcatcttttggttccctgcttttattgttggagcgattatcatgttcttccgctgggcaggtaaacttccaaagcgtatcgcagaaaacgctatcaacaagcacgcataactgaggagccttcgggctcctctttttgtttcaaaagaatgcataaagtagtatacaagctcgcgagctggtgatactatagacctgtaccacccaaacagataacggagaataaaatgaaaactttagaaatcgtcgtaaacaacattgataaagcctttaaagctgctgaagctcacggcgtagaatttgaaccaatgatggtaggagaagcgttctctaaacttgctatcatccgtggtgaaactgacaacttgattgattttgtagatgacttctatctcggttcaaaggttcgtccttactacatcaatgaaattttagaaaaataattaaaaagtagtttactttggagctgtagaatgatactatagctccatcaaaacaaaacagagtaacggagaataaaatgtcaactatcaccatcaagaaagggatttacttcggcaaagagatttcaggtacgtatgagttactcggtgagtggttcccggatagcttaagtgctgaagattctcgtcagggtgatggtaaagtctttgttgaactgaatggtaaaaagcgtggtgtttgggtattcaaagatgatattacagttgacggtgtagctgctaaaattgaagttgttgaatccgttgatgaaatgaaagagcgtatcaagaaacgctttaacgtcatgggattaatgactaacggtttaattcatgggaatattcgttctctgattatctccggagcagcaggtatcggtaagacttactctttggacaaagcattacaacatgctcatgatactaacgctattgattataaatcagtgaacggtaaaatctcaggaattggtttatactgccgtctttgggaatcacgtgaagcaaattcagttctgctcattgacgatgtggatgtattctctgatatggacattcttaaccttctgaaagctgctttggattcaggggagaaacggaaagtttgctggagcactgcatcttctttcttggaagataaaggaattcctaatgagtttgagtttgaaggtactgtggtctttatcactaacgttgatattgaccgtgaattagagcgcggttctaaacttgctccgcatcttcaagctctggtatcacgttcggtttatcttgaccttggtgttcacactaatgaagagattatggtccgagttcaagatgtaataatgactacttctatgttacagaaccgtgggttaagaaattccgaagttattgaagttttggaatttatgaaagataacgtaaatcgtctgcgtaatgtatctctccgtactgctctttatattggtgatttcgtcgcgactgaccgtaaaaactggcgtgaaattgctgaagtaacaatgctgaaataatttaaatgggaggagaaatcctccctaactgaggaaaatataatggctactttaatttctaatgatgtaaagcgtgttttgtttaaaggcggaatgtatatcgttgatactcccaaaggtgatacctcttcctggactattaacgagtggattaattacattgatgaaaatggagcgtgggtgcaatgagtttagcagctattaaagatattgaatgttggttaaacgatattaaagtatatccgcctggtcatatctttgcgggtaaacccaagggtaaagcagagaaagcctgtgaagcaatctgtgaaaagctttataagtttaattttggcgataagaaaaatgtattagctgaagtccattcttcttatcatgaactacgtgtaatggtaaacgtatttcgtgctcctccattcattgagctcaggaaagaatacgctaataaagtatttgatactttccttgcaaatgtacaggatgcagtaaagcatttagacgaaatgcataaacagcaccaagatttaaatgcttattataagccttggcgtaaatcataccaagagcttaaaaatcgtgttgaacttattcgctatgaggtgttaaaatgaaatgggtaatgacagaaagtgaagcatatgcagcgtatgtttcaccagacgatcgccgtagtgagttgtttggttattatggttcatattgcgttgccgaagaagccgttaaggggcagtcttggtggggctcagatggtacagttaatcgtaagccaacggaactaattacattcaccgatgaaaatggtgaatcatggacattccctaaaaaggctgctatcaccgtccaggaagaaacacctgaagctaagcgtaaacggttggaaaaaattaaagaagccgctttggctaaattaaatcctgatgaacgcgaggccctcggattatgagcaaagaatttagtactactcgtatggtagatgcttttggatatccgtgcagcggatatcgtgaatttattcacccggaagttgaaaatcaatttaaagaagttgtaagaaatattttgctcaatgcatttaaaactcaaggaactaacccgagagatttaggcatttatcttgaagaagcaatcagagaagtccaaaagagcgtatcggctaaacttcattgggctgaagaaaatattgcgtggtcaaacaagaaacgttctgatttaaattggcccgctgatcgtgaacaaatcgtcaattatgctaaggtgtaataatgttaaaaacctatgaagttaaatttaaacgctttattgatggcaaatgctatgacaataaagaacgttcaacccgaatttctgcaccgtcagcgtaccaagcagtatttcagcatgggcagaccaatggcgtggcattccctgagcaagacgttgaagatattatcttagatgttattgaggtaaaaggtgtttagtactatagtgtctatacatgcgtattacgaagggcagttaaatgctgcccgaaccaagtataaacgagggatggaggaatctgtggaatgtctcaaaggtattcagacgtttgcccagaagacccagaacctcatcttgatggaccgtaaacaggtctcattggctgaagagctaaaagcctctaagatgattatagaagacaataggaaataccaactgaaattgcttaagcggcgacaacaccagtcgccatggtttaacagtgatttccgatctttttaagggccttcgggcccttttgttgtttacatcttagaaaagccatgataagatagcttcgttaactaatgaggagattgaaatgaaagcacctacttggaacgaacttcaagaaatgttcaatactgaagaagcttttggaactatttctgaaatggttgagaatttagcagattctccttcagaagataatcttctgtgtttagcacagttcatcattgaaacttacatcgagaatcagaaatgacagtatacgtagatgtcttgatgaatcatggctggaaaatgagaggtcatcaagtaaagaactgtcatatgtttagcgacaatattgatgagttgcacgctatggcagaagctatcggaatgaaacgttcttggttccaggataagcgagttccacactatgatttgcgcgatgttcgtcgcaagcaagcagttgctctaggagcagtagaagtatctcgtagagacgcagttctgctttggagaaaatttttcacaaagtagtttactttcggcgaggctgttgataagatggtctcgtcaaccaaactggagaataaaatgaaaactttaaccgagattatctctgcacttgttgaagaaaatcgtgtagcccgccaagcacaccgagcgaaagttgaaaaacgcgccgaggagttgaatgctggatgggcgaagacccgcttcggtcgtgaatactttgataaagttgtagctcctacttggggcaaagatgatcgccctcatgctccctttgatggttatctttgggaaaatgaattaggtgaagttgaagcttatcacgcaggcagttacttgccgtatgttacagaattggattcactggataagcctgagtataccggtgaccacggttggtggaaaatccgcttaactcaagaagagtacaaagaacttcgggagtatggttatcctcttgaagtacgcattccatataaagagtggaaattacaagatggcacagatgttgttatggcagaagttagagctcataagagcatcttagaggctatccaggaacattcaaaagaggtctttgataatatattcaatgagctgaataagaataaaggggatgcaccggaaggacgagtgactgtctctggtaccgtaacgtcagtaaaagtttatgaagactattacggcgtacaatgtaagatgatggttgtgcttgagaatggagctacggtttacggctcccttccaaaaagtattccgtttgaatacagaggcaaagtacagtttactgctacatttgaattagcgaaagatgataaaactcatgctttctataagcgcccaagcaaagttataatgcttgaggaataattgttgtataatgggttcagggagattttgagatactctttgagcccagtccaaaatagaggaaaagataatgaataagaatgaattaaagatgtttgtagccggtgaatttgataagcataacagaaaaggactgtcaaagcgtgaaaagcacgtaaaggttctggcagctttacatgatttaaatccagctgcttataatgtagcaattgctggtaacgtagctcgtcgtgttctaaatagcatggcagcacatgaagccaattatgctggttttgttgtagaaaacattcgtcgttctcgctggttaggtgcaatgtcagcagagaaacagctcaaaaagtttgctatcggcaatgctaaaatttacggtcagcgttatagctttgcggcaggggcgtttaaaactgaagaaagacatgaccgcagcgctgctcaaatcttctgttctgaatttaatgcaaacctgcgccgtattcttaatcgttcaatttgcttacttaaaggcgatgagcgtgtgaaataccaggtatcttctactagttctagaaatcctaagggtgtttcatttattcgtgccgaagagcttgacaatgtaactgtacgaattcatattaatagccatttgtccagcggaaagtatccggctcgggcgcttttagcgcaagttcgtactgcattagaacatatggatgtagttaaaaaatcgtgctgtaaacagcaaggtgaaaactcatctgttcttgaagtacatttggacccatttaagatttttcctaaaacattgagcaccaccccagttattgatgaagatgtagcacatatgtatctcaatgttattaagcctcttccgttaacaccagtaaatcatattgaaatcgctaagaatagcattactgccgaaatggaatcggttaagcggtttattgatacaaaagaagctgaattaagtaagcatgaattgatgatggcagatttagtcaaatcgcttaacgagtacaaagagcggtatgaatctctcgagtatgcccggagcttactgtgaaaaatcaattaaaagaagacatggtcgttgatgataacgaccttgaaattgagtttgagtatccacctgtacctgaatttaaaattgactgggatgcctgtcttgaaatggtagaccgtcgagaagctgcagctaaacaagttgtgccttgtgaaaaatgtggtagtattcaagtacagcttgttgattggacaaccgatattctgaaaatgaaatgtcggacttgtaagcataaatttgagagaaaattaaaatgattactaaaactattactggtgctaatactaagttttttgtcgagtatgctaataacctcataaaagacaaaaactttgctaacatcattgcagatatgattcttgacgcatacgaaagtggcatcgaccctatgcagcttaaagaatatcttcgagcgacaatggattttacagttcttaacatgatgcttagaactgatactgaattcaatgaaatgattgctcgtcgtaatgaaggcaagttcaatttgactgatgacgaagtattagcgtgtgctgctcacgaagcttggaagaaggtgattaaatgaaaaccactggcgcgctttggaaagaattttataacgatgaagccttctgggaaggctattatcatgatgacactttaatactctttgatgatgttgaagtagaagaatatgaagacccttcgcctgatgcggtagtaaaaattgaaagcggatatgtttacaaaaccgatgatttcttcacttcccatgatttgagtcttgcaactttctttaaacgttggaaaaagaaacagaccgctcgcactattgtagtcactgttgataaagataactttgacgaagtatttgaaactatctctaatattcctggagtgaaaaaggtaaaatgattgacattaaattagatacttatgcagtacgccagttattcccagaaggtacagcagcccgtgctcaactgcagcagtcagtaatcaataacatcgttaaagaaatggtgttaaaagattcccagaataagctgaaacaagcagtacaatctgaagttaatattgctgctgtgactattccagatgtccgagcagaagttaagaagcaagttcagcagatgttccatactcgcggttggaatgatatgtctgctaaagaagaaatgtcacagatgatgcgtaacgctgcccaatcatgcgctaaaaatgctattgatgatatggttcgtcaaactattgatgacgctgttaagcaagctgaaggtcgtattaagatgtctattgaaagagctaatctccgaattcaagaaatcattgttaacgcaatgaataagaatttcgctgatcaaattaacgctgccattgctgctaaattggcagaacacttcccggtaactgctaatggataaaattgattttagcaaattaaatataccacgtatgggaattcctgatgatattgccaagcaattagctagcgttcaaccaatgccagataattgcatcaaagatattctcgatgcgttagatggtaaaacattagttataactactaaggctgaaaatggctcgtaaacgatatatggaagaagccgaacgagtaatgctactcatgtattcggtttattataatgagactggtcaaattgctaacagttccaatctcaaaggagctatgacccgtggaagaaattttgcccaagctgcaattgatggcgaagtcacgaagcgccttggaatgattaacgtttataaagcgtataaacacccgagttggaaccaagttcaagctcaagtatttaaggaaatagaagaagatgttcacggtttttggttacgacagcagcattcataagtgtgtattttgcgataatgcaaagcgtctgctcgatgttaagaaacaagagtatgcattcatcaatgtaatgccagaaaaaggtgtatttgatgaagtggttatcagtgatttgcttcgccgtttaggtcgtgaatcgcaagttggattaactatgcctcagatttttgctcctgacggtacacatatcggcggttttgatgaactccgtaaattcaaattcaatgcatgattatcgtggaaccctccttcgggagggtgatattgtagctctttattatggctacggtggattggaaactggtgaaattaagcagattaagaatcaccgagcgaaggtagaggtaacttactctaatggagttaaggttatgtctaaatggaaatacggcgagtgtatggtgaaattatgaaatacccaattgagtttgtttttcctgaaggcgaccaagtagatttagaacgtaatcttcgtgaagcaatgattgaaagagctatatctgatccgcagtatgctttcatgcaccaatggggtgaattctttgtaaagcaaggaaataccattcatggtgttcagtggagttatattggtcttgaaattgattacgatgatgctggtaatccgttagggtcttggcgttgggaagatgaagaccttggtccagactttgaagttgactgttcttggcatgaggaagaactatgagttatgatatcggtgatttaaaagctccacgcatggtaactatttcagcagaagagcttgaacgcttgcaagcaattgaagaattgctgtgggaaattgaatgttcgcttccatccggtttagaaagctggattgatgatgaagacttacagaagctgcgaggttaaaatgactaactctgaattagtaaaagaaatcaagcatatcgctggcgtcactggtggctgggacgacaactacgattttgaatatccgccaaatgctccagatgacgatgtagaagaaatctttgttttagtagaagatggagactggacacaagagcataagtatcaagaccgcactcaaatttggtattatccagcacgcggcgttcatttcatggtatcagaatctcgttcaggctcatatcatactgattggtattatagtcctcctgaagtagatatcgttactcgtcatgaaaaagtggttactcgcactgaagttgaatggcgtattgaacatgattctgctaatgattctgaaccaacaccatgcaaagtagcaaaggtctaaaaccctggtatgcggctcgttgggaaactgtcgagccagaggaagatgctattcctgaagaggattataatacctctgaacctaccataaatgaattgcttgattatgaggacaaagtgaatggggcttattggtaagcagtttgaagttattgagaatgatgatgaactgagcgaacaatttcctatgttcattccgggatttaagtttcaagttatttctgcagataatgaagacgaccttgaactggtaggaatcactgcagttattgatttactgacaaataaaatcattactattaacgacccaactccacacggcgaatcttggttctggtgtttctacagcgaagatacgatgcaccaaattaaagaaattggtcaaggtgaagatgttcctctgatttctgaaattaaacttaatcatttccaaggtgcaatcgttccaattaccagagctctttacgcctttgctgggcaggaaaattgtgattcagaagagtatgatttaatgcaaaaagctgcggattacattgtcgcacttgaacaacgtcttggagttcgccatgtctaatacttgcatttctaaatcaattaaggttaaactcctagacctgtctgagttgcatcgccagattaaaaacatctttaaagaccatggaattaaagttggagatatcattgaattttcagatggttattatgaagatgaaattgacggaatggcatggaaaagcgtcaaacttgtagatgcgaatagcaacgaagtctatagttatcatgcagatgatatcgttggaatatttgcattctgtacttcgtactgcgttaaagaatcatctaaaaatatgtatagtagttactcgttaatttagctataaatactcttatctaatcgctgaggtaagagtatgttattaaccggtaagttatataaagaagaaaaagaaaaactatatcaggcacagaacggattatgtccttgctgcaaacgtcctttagatgaggacattcaaaagaaccacctcgaccatgaccatgcgttagaaggtgacaatgcaggaaaggtcagaggcttgctctgtaacctgtgtaatgcggcagaaggccaaatgaagcataagttcaaccgctctggtttaaaaggtcaagatattgactacctcgaatggttagagaatttgctggtctatctccgccagaatcgtaaagacagtaatattcacccgcaatatgttgccgatatggctaaacgcttttcacgtcttggtaaacctgagatgattgctgaaatggaattgcatgggtttacatacgaggaaagtgatggaaaatcacaacttgcttcaaaatacaagaagcagcttcgtaagagtttaaaatgaatatcgaattagaaatccagggacttattaataaaaccaacaaggacctcttaaacgagaacgctaacaaagattctcgcgtttttcctacccaacgtgacctgatggctggtatcgtatctaaacatatcgccaatcaggtcattcctgtctctgtaatggaagcacacaaagaaggtgttatccattttcatgatatggactatagtccagctttgcctttcactaactgctgtttggtagatttgaagggtatgttgcagaacggctttaaacttggtaacgctcaaattgaaactcctaagagtattggagtagctaccgctatcatggcgcaaatcactgcgcaagtagcatctcaccagtatggtggaactacgtttgctaacgtcgatttagtattggctccttatgtggagaagacattcgctaaacatgtacgtgatgcacgcaaatatcaagtagcattagtaaaagattatgctatttcaaaaacagaaaaagatgtatttgatgctttccaggcatatgaatatgaagtgaatactttgttcagctcaaatggccaaactccgtttgtgactatcacatttggtatgggcacgtcatgggaagaaaaattaattcaacgagctattcttgataatcgtattcgtggattaggacgcgacggaattactccaatctttccaaagcttgtgatgtttgtagaagaaggcattaatctacgtaaagaagacccgaactatgatattaagcagcttgcattagaatgcgcagctaaacgtatgtatcctgatatcatcagtgctcgaaataatagagcaattaccggttcagaaactcctgtatctccaatgggatgtagaagtttccttggtgcttggagagactcttctggtaaatctgttcttgatggccgtaataatctaggggtagtaacactgaacctccctaggatagccctggatgcaaattataaaagttcggatgacagtaataaactgttcaaactactggatgaacgtcttgatatttgtaaagaagctcttttaactagaattaaatcccttgaaggtgttactgcgtcagttgctcctattctttaccaggaaggtgcttttggtgtgcgtatgaaacctgatgatgaaattcttgagctattcaaaaatggacgtagttcaatttcattaggatatattggcatccacgaatttgatatgcttacttttaaaggaagcggtaaactcgtcctgaagtacatcaacactaagctaaacaagtggacggaagaaaccggctatgcctttagtctgtactcaactccggctgaaagtctgtgctatcgtttctgtaagattgaccaagctaagtttggtgatgttaagggcgtaactgataaaggctggtacactaatagtttccatgtgtcagtagaagaaaacctgtcgccttttgaaaaaattgaccgtgaagcaccatatcattctattgctaaaggtggtcatatttcttatgttgaacttcctgacatgaagcgcaaccttgaaggtcttgaagcggtatgggactatgctatcgagaagttggattattttggtgttaatatgccagtagataaatgtctttcttgtggttctactcatgagatgacacctactgaaaacggattcacatgttcaatttgtggtgaaactgatccaaagaagatgaatacaattcgtaggacttgtggctatcttggtaatccttctgagcgtgggtttaatcttggtaagaacaaagaaattatgcatagggtaaaacatgttagagaaaccaatgaagcaagttgattggaaccaacttagcgaatggggattgatttggaaaatcaacaaagaggttctgcatccgcttggaattgctataacccgtgaccccgaaagtggattatcggctggggctattcaaactgatgaaccctggaaatatgatgcagaagtagaagcacgtaatgaggtaagattcaatgaatttcgacagaatctacccttctgactttgtgaatggccctggatgcagggtcgttctttttgtcaccgggtgtttgcataaatgcgaagggtgttataataaatctacttggaatgctagaaacggccagttattcactatgaatactgttaaagagcttgcatcccatttaagcaaatcgtatatccaaggtcttactttaactggtggagacccactttatccgcagaaccgggaagagatttcaaatttggtttcttgggttaaagcaagatttccggagaaagatatctggatgtggacaggatataaatttgaagatattaaagacttagatttgctacaacacattgatgttataattgatgggaaatacgagcaatcactgccaaccactaaaaattggcgtggttctgataaccaaagactctgggtaagaaacggttctacctggacacatgattgaggaaatttatatgctgacttacaaaattatgtttactctgaaccacatggctactgaactgtttggaccagaatttctggctatgacagcattcatcttaactatttaaggaaaattatgaaattcattaatgctattcgtaaatttatttctaatgttattgcactggttgcattaaccgcaggtgctttcgtagctattccatttattgttctcatcattatttctgactggattaatcctactaagaaagatgaaaaactgtctaatgaagaatttcagaagcgtgttaatactctgactgctaaacttcaacaggtcatgaaatgatagaattattttgttgcgataagtggtacaagtttaaagaagactctgttgataagtggctaaataacgcgtcgtcaaaggatgttgaattctacaacatgcttaaatttaagccatttttggtaacagctctgacacaggacgggtctgttgaacgagttaagaccttcaacggcgttagcatagatgctgatgattttgatcagtggtgtatacttaatgatgctgaccgttgctatctcgaagaagctactgtcgacaaaatttatcctatgactacagcggataaacttgaattaattgaaagattgatttctgagattaaggctgaactatgatagaaatctatggcatccctgaagaagtttggagatgccctggatgcaaagcagttcgtgacttgctcagtaagctgcaacttccatatgagttctataatgtaatcaacgaggttgacggtcagccggtttatgaccgtccgttgattgagtcacttgctaaacgcatcgggtgctatccatcgcttgctattcggtatcctgtcatttttatggatagcgttaagcagtatgacattccaacgtttaaagccaatcttattgctgctggatacgatccagatatcatagaagattagccagttcctttctaaggtcatcttgaccaccttctgtatatttctatacccttcatttagaggttcctatgggacctctcttttattctaaactcctttcacaaagttgtttacaagccagttgatgagtgataccatagccctatcaacggataacagcataccgtttaacttgagaggaaaatatgaactggttaaattggcaagaagctctagaagctatgagtaaaggctgtaaagtaaagcatgtgcattttactgatgatgaatacttcttgatgaagaacaaggtcatctgtgacgaaaatggatatgatatgactcgctggtacaagggtgagtcttggcaaaacgaacattggtacatcgcatgaaaactttttctgtaggtgatatcgtccgtaccagaatttgggatgggcttcaatttgaagtagttgtctacgtcggttcagatggggttctgcttcaccgaattaacaatctgattaagtggcacctagaacgcttcgtgaaataccatgaattcaatagctacaactgcactgtagctccggttgctagtaaagaatactacgatatgctcgaagagctaaaatctctcaaagattgatttgctacaggagatttgatttagaatctcctctgtcaaaacaatcgttactgaggaaattaatatgtcccaagaaatcaaaaacgtactgaactcttttgcttatgataaagtatctgcaatgctggaagaaggacgttgtgtaactccgtctttgcttgatcagtgggaagttgagcttcacggtacgatgaaagaagaaggtcaaaaaatcggtaaagcacgcatccgcgaattagtggttgcttatcttctgtctgaatttggcattaaagcctttggtgtagaaccaatcactccgggtatcggtgaaatttctgaaagcactattcgtaagatgaagaatcaacgtaagaaaggcttccgcgatgttaaagcggttaaggcggcgaaatgatttcatatatcgtgtgcgcatctattcctactggtgtatggcatagaaggattaagtatatccgggctcattctgagcctgatattagtcaagctaaacggatactcacaaatcaatgggatgaagatactagcgtaattatcagagtatttccaattgattcatccactctagacagccaacttccatctccgtcagagatgtggcaagaagggttaaacgagcaggaactgcgagagtatcttgatgcgtaaggttattctatacacagaaatttttactaaccgttgggtatttgatagtattttgcttgctgatacaaagtttgccgatgacatcggcagagctagaaaactggcgtatgaattggcagaaaaatccccaacatttgtacgtatttcatacattgtaacaacttccgattacgtgtataaagtatcaaaagaagcattatacagattttgtaatgttatgatttcttctggaaaggcattaaactataatcaattggtggaaattctaaatgactgaagaacagattgcagaagttggttttcttggatggttcatatctaaaacgcctgatggcagaaacacgattgaaactcctaacggtgaattcatcattgaagaagattttgatgcgttttggatttatgaacgctctggagagaatgaatacacatccgtggatgctttctctaaatttgaagatgctattgactcggtgaaagcatggctaaagtaaaccaaattatgattgtagtagaaggcattggcggatttactatagattcttatatgggtgtttggtttgacaatgaagagggcatgtattgggaaacgcatgcctctatgttaaatgaaactcattatgaaagtttatactcttcattcatggaaatgatgcatgaagtagatgaatctgattggtttgaacttagtttggttgagttcaaacgtatcatggaacagctgttccaatgctatcgtattatgaagggtgaactatgaaaattcaattgactcttacccatgaaaatattaaaggtgtgttctgtcttgaaaatagccaaataacttttgcacaagatggaacgtactggtatgctgaaaccgacagtatcgctgactatggaatggaacgtgtatttgaagattttgaatgtgtaattgaagttccacctggatttgaatataatgatttttatcgtatcatgatgaaattaattgcatgcgctgaattgattaagtaatgctttaatcctctcgcttcccaaatttgttataatagatattattaattgaagcgaagaggcaatatgagtaattatgtaaataacaaggaactgtataaatcaatctgtgcatggaaagagaagtgtcgggagtctgaagctgctggcggtcctcgagtagtaaaacagaacgatacgatcggccttgctattatgctgatcgcagaaggtctgagtaagcgtttcaacttttcaggatacacccaatcctggaagcaagaaatgatttcagacgggattgaagccgcaattaaaggcttaatcaacttcgatgaaactaagtatgataacccgcatgcgtatataacacaagcttgtttcaatgcattcgttcagcgtatcaaaaaagaacgcaaagaaatggcaaagaaatacagctattttgtccacaacgtgtatgattcacgggacgatgatatggttgcgttagcagatgaaacctttattcaggacatctacgataaaatgacgcagtatgaatccaccgcttataaggcgccagggtctgctaaaaagagcgaacctacaagcgatggacctaatctggaatttttatatgaggctgaagattaacctcgacgggtttttagaagatgtgcaagacctagacgctatcccttatttgctaaagatgtatttaagggaggtgcttgatcttgatattcacattgacccgaaaaatccacatgacgctgatttcaggtcagattctgctataattgaacatagttataattggactgatactgaattcacatttgaaataaattaccatccaaaggaataacatgaacaatattacccaggaagagcgcgacgagctgcaacagaaactaatggaagcggcagaagaacaagctattgctcgagccaacaaagttgttcgtaaaaaccgtcgtgaacttgagcgattacgagctcatgctggagacgcggtattagacaacaatttccctgcttacaagtatgctattgaaaaactgcgtactattttaaaacaaccttttaatgatgagattattctgacttgctggaatacctctcgtaaaactgtttgggacattctaaatgctggtacaagtaaaatttaaacgtatacgtaaagacgcgggatttactttgaacactgctaccggaacaatggcagtaaaagtagcagataatcaatatcgtgtgttaggttctaccgaaggatgtaagctaatagataagaactctcttgtctgggttgacaccttccaagttaaacggtggtatgaatggtaaatgaagagaactggggattcattgatttagatgaacaccctgattttattactagtgaagagaattgggatgtatgacgaatttgatgggttctaatcctgggcatgattggccggaaggaaattacacatgccggtgcagtaattgttcagaacgttatacaggaccaaagcgtagttacttctgttataaatgtgataccgccaggagagaagcacctgctcccgattatgaagcaattcataatgccaaggtagatatgcttagacgctttgaagaagctaagcgtatatgtgaagcggcgggttatgttgtatacaagaaaatttaaagggcttcggcccttttgctttattacgggaatggtaaaatattcaaaattaacaacaaaggtcaatatatgaagattaatattttaatggctcgcggacttgagggatgcggcgtaaccaagttcagtctcgagcaccgtgagtggttagtaaaacatggccatgaagtaaatatcatttacgctaaagataaagcgtttactcgtaatagagcacatagctataaagatgtaactattcctgtgtctcttgcagatgactacgataagactttatctctgcttaacgcatgtgacattcttatcattaactcagtacctgctgtcaacgctccagaggcagcgattgataactataagaagctcatagagaacattaaacctgaagttcgggtagtcgtatatcaacatgaccatagagcattgtcacttcgtagaaatgctggtcttgaagaaaccgttaagcgtgctgatgtactgtttagtcatagctcaaacggcgattttaataccgtgctaatggaagaatattttccaagcggcgggttgagtttctttgatgattctgactcagctcctccggtttataactttcaacctgctatgaacatcaaagcaattcgtgataagtattggaaagacttctctgccattgattttgatatccatcgttggattggtcgtactactacgtggaaaggctatttcttgatgtttgactttcatgaaagccatctgcgtcccgcaggtaaaacgactatcttggaaggtttagaacgcagtcctgcgtttattaacatcaaagaacgctatgaaatcgattattgccgtcattatcatcaggttaaaactggaccaggtctgaatcctcaagttcttgaccgatatgttaactctgagatgcttgagcgtatgtctcagtctggatttggctatcagctgtcacgtcttccggataaatttcttgagcgttcgctggaatacacgcatttagaactaggcgcttgtggaactattcctgtgttccataaagctactggtgatgctttgaaattccgggttgatggaaagccgttgacttctcatgattctggcattctgtggttgaatgatgaaaataaaaatgaagtctttgaacgaatgaaacatctgtcatctgaccggaagctctatgataaagagcgaaataaagcatatgaattcctggtagaacaccaagattctgagcattgctttaaagaacaatttgagttaatgacaaaataagtaatgggccttcgggccctttttgctattcatgggataatataaaattaaactctactagagaggttatatgaaaattctacatactggagattggcacttaggtgtccgcaacgatgacccatgggttcaagacgttcaacgtcatggaattcaacaggcgattgaatattcaaaagaaaatgaaatcactacttggattcagtatggtgatatttttgacgttcgcaaagccattactcataagacaatggaatttgctcgtgaaattgctgaatcccttgaaggagaaggaattaatttaatcactattgtaggcaaccatgatatgcactacaagaatacgttgacacccaatgcatcaactgaaattcttggtaagtatgaccatatcacggtgattgataaacctacgactatggattttgacggaactttgattgacttgtgcccatggatgtgtgaagagaacgcatcagaaattatgaagcatatcaaagaatcgtctgctgaatactgcattggtcactgggagcttaatggcttctatttttataaaggtatgaaatctcatgggttggaaccagatttcctcaaaaagtacaagcaagtttggtctggacacttccacaccatctcaagcgcagcaaacgttaagtacatcggaacgccttggacgcttacagcgggtgatgagaacgacccacgcggattctgggttcaagacactggattatcaacctttgatttcgtccctaatgaaatcacatggcatagaaaattgatttaccctgtcacagggcaagttgattttgaagagttcagaaatcttgcagtgcgaattattgttactgcagtagatgaaaatcttccaaagtttgaatccgaactcgaaaaagtagtacatgaattaagaactgtttctaaggtagataactcggttgagtctgaagatggtgaagaagtagaagttaaaagcttattggatttaatggaagaatatatccaagcacttgaagacctgtccaaagatgacatcaaggccttaaaggttatgtctaaacagttatatattgaggcacaaaatcagtgaagacctttaaactaaatcgtgtcaaatataagaatataatgtcagttggccaagcggccattgacattcaacttgataaatgccaaaagaccttaatcacaggtaagaatggaggtggcaaaagtactatgcttgaagctattacttttgccttatttggtaaaccattccgtgatattaagaaaggtcaattaattaactctttcaataagaaggactctgtagtagaactgtggatggagtatgacggtcatagtttctacattaaacgtggacaaaaaccgaatgtctttgaaattttacgagacggaaacaagcttgatgaggctgcaagttcaaaggatttccaatcatactttgaaagcctcatcggaatgtcatactcatcatttaagcaaattgttgtgctaggaactgctggatatactccattcatgggattgtccactgggaatagacgtaagctcgttgaagacttgcttgaggtgtctctcctggctgatatggacaaactgaataaaacccaaatcagagaaattaaccagcaaattcaagttaatgatgttcgtcgtgaagcactaaccaatgaaattaaaactcatcacgagtacgcagaaaagcagaagaaactttctggtgataacgtagctcgcctgcaggcgatgtatgatgagcaagtgaaagaggcacgaggatataaagcagaattagaaactcttcaaagcgaactgcttgaacttgtgattggtgatgacccagcagagtcaattcaagaagttcaaggtaaaacctttaagattcgttctaaaattgaatcatactcaaaggttcttgggttgtatgataaaggtggtcattgcccaacgtgcttgcaggatttgcattctaatgacactctaatcactaagattaatcatcatgttgaagaatgtaataccattcttggcgagttaaagacgcgccagagtgaactggatgaactagctcgcgagtataacactattcgtacgcgtgcaagagacatcaaaaatcaaatgagtaatttgaagcagatgactttaactgcagttgataaagcacgtcgtattaaagcagcaattgataaagcatcacaggagttcattgataactctgacaagattgaactgctacaagaagaattagataaaattatcctcgtcaaaactaatttggttatggaaaaatatcgtcgtggtattttaactgaaatgctgaaagactccggtattaaaggagctatcatcaagaagtacatcccgatgttcaataagcaaattaacagctacttaaaaattatggaagctgattattcgttcacactgaacgaagagttctctgaaacgattaaatcgcgtggacgagaagaatttagttatgcctcgtttagtcaaggtgaaaaagccagaattgatatagcattactattcacatggcgtgatattgctgaaaaagtttctggtgttaaaataaactgtctgttccttgatgaagtttatgattcggccaccgacgcagaaggtgttaaggcaataactgctattcttaataagatggtagatgccaatgtgtttattatttctcaccgtgaccatgacccacaggcatatggccaacaccttcaaatgaagaaggtcggacgattcacggtgatggaatgaatgagtttactacgggccaacaactgttggcctttcctgaattaaagcgttatgtgttagttaatttattttctgatgaacgccatcttgtaactgaagaaatgttacgagatgcttttacgggaaatgaatataatagagtcatgtccaacaggaatgccggttggatggttgaagattattacgattaaggtaaatataatgattaattttgttgatgtgaaagatatccaggttaaaaacgtacgtgcagattccaacccgaataaccaaaatcgtattcgtaagtcttgggttctggctctgaccgaagaaactaaacaggctatcaaagataagattaaagattccgaagctcgctttgctttctataaatctatcgatgatgaagtcgcagaaaaatggattgaactgatgcgtaagcattacaatgaatcaatcaaggctggtgtcaaaattgttactgatcgtcacggtggcgaacgtctagaaaatgattactgtgtagatgctgatgagcaactcgttgcggcaggtcagattgttgcagaagaattaactgctacattcgcagcttgatataattatcctgaacttaattaaaaggtattgaaatgaaattctctaaagaaactctgaacattctgaaaaacttctccaccatcaactctggtatcatgctgaaacctggcaattttatcatgactcgtgctgttaatggtacgacttatgctgaagcaacaatttctgataccatcgatactgatgtagcaatttatgacctgaacagtttcctgagcattctgtctctggttggtgatgatgcagatattatcatgcaggaagatggtaatctggcaattaaagatgctcgctcaactatcttctggccagcagctgacccgagcacaatcgtgttcccgactaaaccgatcccattcccggtagcaaatgtaattatcgattttaaaggtgaagacctgcaacagctgatgcgagtatctcgtggcatgcagattgacacaattgctatcactaatgttgatggtaaaattgttctgcgtggttataataaagtagaagacgctgcactgacccgtccgaagtattccctgaccctcggtgattatgaaggtgacggtaacttcaactttatcatcaacatgagcaatatgaaaatgactatcggcgattataaactgatgctgtgggcaaaaatgaatggctccaagaaacagactgcagcgaaatttgaaggtgcatcagcctcttatgtagtagcaatggaagcagacagtacctttgattttgagtaataacttcggggcttcggccccatctttaatctgaatgaggaaatataaatgaaattgacagtaaacgaagcagacttcatgtgggaacagaaatatcgtccaggtactatttctgagtgtgtacttcctgctgaagataaagaaattttttcagctttagtagctaaaggaaaaattcctcatttaattctccatagcacttctcctggtactggtaagaccacagtagctaaagcattgtgtaatgacattaatgctgaaatgatgttcgtgaatggttctgactgtaagattgatttcgttcgtggaccgttaactgcatttgcaagttctgcttctattgcaggcaagcagaaaattatcgttattgatgaatttgaccgtgctggtcttgcagaatctcaacgacatctgcgttcattcatggaagcgtatagcacaaactgtactattatcattactgcaaacaatcttgacggtataattaaacctcttcagtctcgttgccgtgtaattaattttggtaaaccatctccatctgatgttaagccaatgcaaatcgagatgctcaagcggtgtctcgcaatttgtgaaaatgaaggggtggtagttgaagataagaaagttgtagctgctttggtcaaaaagaattttccagaattccgtaagaccattaacatgcttgatcattattcttctaagggtgtgattgatgcaggtatcttgtctatcgttctgaatgaccgtggttcaattgaagatgtcatcgaagctattaaaactaagaacatcaaagaactccgtgctcttgctcctaaatatgcagcagactatacttggtttgtagataaactttcttctgagctgtatacaatggttactggcccaagcattatccgaatgtatgaaatcatcggtgaaaataaccagtatcatggtatagcagcttcgattgaattacatttggtttatatgcttattcaacttgttgtagagatgcagtggaaatgatgagtttatttgaagatgatgatcagtataacgagcaccaaatagcgtggttaggtaaagactggacgaaagtccaggaattatctgattcatataaagaaaaagcagaaaatcaattcttcacaattattgggtctattaacgaaaagcaagagcatttgaatatctcgacgatggattattcaaaattcatggttgaaaacgctctttctcaacaccctgactgtatgccttcggtttatgttatgaaccttgttggtcaagggctatctgaccaagcacactataactatatgatggcctctgttcctagaggtcgtcgatatggtaaatgggctaagttaacagaaaacatccaggatgcattgattcttcaagttataatgacatattacaaggtcaatgcgattgatgctaggatgtatagagagaccctggaagctaaaaacaagcttaaacctgctctcaagaaaatgaaaggtcttgtgactgatgaattggtcaagacaatcacgaaaaacgtgaaagaacagaaaaatcttaagaaaacagcattggaatggtaaagatgattgaaattacactgaaacagcctgaagacttcctgaaagttaaagaaactctgactcgtatgggaattgctaataacaaagataaggtactatatcaaagctgccacattcttcagaaacagggtcgttactatatcgtccattttaaagagatgttaaagcttgatggtcgccctgttactattgacttagaagatgaaattcgtcgagactcaatcgcacaactgctcgctgactggggtctactgagtattaatcgtggtcaaactcttgcccagatgcagaataacttccgggtaattacattcaaacagaagcatgaatggactttaaaatctaagtacacaatcggtgcgtaagaaaagggcttcggcccttttactttataaaaattggagtataattatctcacctaaagactaataactcggtctataaacaaaggaaacccatgaaagaattttatattagcgttgaatctctaggcaatgacattgtagaacgttatatcgattctactggtgaggaacgcatgcgtcgtgttccgtattctcctgtgatgtttagtcattgcatggaagaaacaaagtacaaagacatctatggcaagtattgcaagaagaatacattcccaactatgaaagatgcacgcgattggatgcgtcgcatggaagatatgggaatggaagcaatgggtatggatgatttcaaactcgcgtatatcagtgatacttacggttcagaaatcgtttataataaaaaattcatccgaatcgcaaactgtgacattgaggttactgcatctcaattcccagacccgatgaaagcagaatatgaaattgatgctatcactcattacgattcggttgatgataagttctacgtatttgatttactgcattctctttatggttctgtttccgagtgggacaagaaactcgctgctcgtttagattccgaaggcggtgatgaagttccacaacatattcttgaccgcgtagtatatatgccgttcaattcagaaaaagaaatgatgcttgagtacatcaatctttgggaacagaaatgcccagcaatctttactggatggaacattgaaggatttgatattccgtacatcatgaatcgtgtgaaacagattcttggtgagcgtacgatgaaacgattctctcctctgaataaagtttcatctaagattatcacaaacatgtatggtgataaagaaatttattctatcatgggtgtgactattcttgattacatggatttgtataagaagtttagtttcacgaaccaaccgacatataaattggatttcattgcttattatgaaaccaagaaaggtaaattagcatatgacggtccgatcaataagttgcgtgaaactaaccaccaacggtatatttcgtataacatcatcgacgttgaatcagtacaagcgattgatgctgttcgcggatttattgacctggctatctcgatgtcttattatgcgaagatgccataccaaggtgtaatgagtccaattaaaacatgggacgcaatcatctttaacagtctgaaagaacaggacaaggttattccacaaagtcgttctcatgttaaacagtcatatcctggtgcgtatgttaaggaaccagttcctgctgcatatcgttatatcatgtcgtttgacttgacatctctgtatccgtcaatcattcgacaggtcaatatttcaccagaaactatcgttggacagtttaaacttcatccattgggtgagtacattaacaagactgctcctcgtccgtctgacgaatattcatgttcaccaaatggttggatgtatcgtaaagatgtagatggtgtcattccagttgaaatcgcgaaggtattttatcagcgtaaagagtggaaaaataaaatgatgggtgccaaacgaaatcaagaactgattaaaaaggttctgaatgataagaagtttggaactatcgataaattcacagaagttaatgtctatgaagatttctctgatgatatgaaagcagaactgctgacatataccgaagagtgccttgataaactgatgtttgaatgtaaacatgctgaaatcttgggtaatactaatcagttaaaccgtaagattctgatcaactccctttatggtgcattgggtaacatttacttccgttattatgatttacgtaacgcatcagcaatcaccttgtttggtcaaatggcaatccaatggattgaacgtaaagttaatgaatacctcaacaaggtatgcggtactgaaggacattcgtttgtagtagccggtgatactgactcaatttacgtttgtgttgataaggttattgagaaagtaggtcttgagcgtttcaaagaaactaacgatttggtagaattcctgaaccaattcggtaagaagaaaatggaaccttggattgaccaatcatatcgtgagatgtgtgaatacatgaacaataaagaacatttaatgttcatggaccgtgaagctatttcttgtcctccgttgggttcaaacggcattggcggattctggaaagcgaagaaacgatatgctctgaacgtgtatgatatggaaggtactcgatatgcagaaccgcatctgaaaatcatgggtatggaaactcaacaaagttctacaccaactgctgttcagaatgcattggaagaatctattcggcgtatgctgcaggaaggtgaagaatctttacagcaatattataagcagtttgagtctgagtatcgtgaacttgactataaagtaatagcagaagttaagaccgccaacaatatcggtaagtatgatgatggtgcaggatatccagataaaggtactccatatcacgttaaaggtgctttagcgtataaccgagctaccgcaggatttgaaggtataacaccaatcatggaaggcgagaaggtgatggtcatcccgctgcgtgaaggcaacccgtatggcgagaaatgtatggcatggccatcgggcactgaactgccacaagaaatccgacaggaagttctagtgtggcttgaccacagtgttctgttccaaaaatcgttcgttaaacctctgacgggtatgtctgaagcggcagggttagactatgaagagaaatcgtctcttcttgacatgttcgatttttaaaaaagttgtttactttaccacaaggatgtggtaccatggttctcgaaataacatactgaggagattacaatgaaatcgttacttgctgttattgttgctctcacgctgactggttgtcaaatgccacaaggtgatatcgtcccggcttcttctgttggacaggtgcgagcaattggcggtactgtaggatactatcgtgctagcaaccaggtctctgctgaatcgctcgcggttgagcgtcggttggcgaaagaaaaagctaatcctaatcgtcagctatctgcgatggaactcgacatgattgagcagaataagcatgagctggaagaaattaagcgtctgcgtaaaactcaaaaagaacgtacatgtactgctcaagcggcagcagtgaatgaccagattcgtttaactgattttgctaacggcggattgagttataatgagcataaacaacgtatggagcagttaaaatctctccaaaatcacatctacaacaaatgcatgtctaactgaggagattaacatggaagcagtatttggtttaatcattcttttcttcatctattttttgccgacctttgtagcttgcagtcgtaagcataaatcacggggtggaatctttatcacaaatctagtattcggttggtccattatcggttggttaattgcgctgatttggtctgcttctaacgcacagcagaatacaattattatccagcaagttaaataagaggtctcatgattgtaactccaatgacagtacaagatatccgtcaagaattcgctgatgctttgctcaacaaagaatttgtgattgataagacgggtgtgaagactattgaaatcgtaggtgcatcatttattgcagatgaaaacctaatttttggcgcagttaatgatggatatattgctcgggaacttgagtggtataaatctcaaagtttattcgttaaagatattccaggtgaaaccccagctatttggaaagcaattgcatccaagcatggtgagattaattctaactatggctgggcagtttggtcatcacaaaactattcacagtttgctaactgtgcaaaagaacttatcagtaatcctgattctcgccgcggaattatgatttatacacgacctcaaatgcagtatgattttgagcgcgatggcatgagtgatttcatgtgtactaacaatgttcagtatctgattcgtgataataaagttcatgctgttgtaaacatgcgttctaacgatgtcgtctttggatatcgtaatgactatgcgtggcagctctatgttctggaacagttaaccaaacttctgaatgcatcaggtaaaaactattcggttggcgatattatttggaacgtcgggtctttgcacgtatattctcgacatttctatctcgtagataattatgctcacacgggtgaaactcacattgcaaagaaagattataaaggtgaatggaaatgattcagtttgtaattccaagttataagcgcgccggggcagttactgccctgactatgtttcctgaaggttatgttccacatcttgtagtacgtgaatcagaaaaagaagcatacgaaacttggcacggtcatgctgctaaaatcgttactgtccccgatgatgttgatggaattgcaggaactcgtcgtctgattactgaaatgtatgcagggcagcgaatttggatgcttgatgatgatacgacaattcatctgactgaaattcgtgaacgcgacgatcgccgtgttccgcttggtgtcggcgaggcaatgagccaagaagtatttgatgatatggtcaaatatgtcgagactgctatggattgtggttattatcatggtcatgctcgcttgccgattttcaaaattacatcaagctggggtcattatcgcgagaatagttttgggttcaccaatactttctatgatttgactaaacttacagcagaagatattggttacggaattattgaccttaacgaagatgcttatgcttttctaaaattaattaacatgggtcatcctcatctggctctgtttaagtacctcgttaaatctggtaaggtgcagtctcctggtggttgttctacacagcgtgatactgctcgacagaatagagcccttgaacaactacatgctgctttcccaaatcaagcccgttggaaatctaaagacggcgaaagacgtgggttattcggtgataacgaacctctgaaatcaattcgtatgtgtattaacactcgagtgaaatctcaggccttccacgagtttggtaaggtagaaccatatctgtgagggcgaaagccctccaaggacctcttatgaacatctataataaatctgatgtagctggtaacatattcaaggctgaagaattcagatgcttcgtatgtaaatctgatgagtttgttcatgaaggaactactggctcagatggaatgcattgctggtggcatggcatgtgcgttggatgtaaaatacattatgaaatagatacggaaacggtggtttataataccaagaagaaatggaacttctgttaatagcttcaagaacaaagtaatataattactctatcctttaacctgtgagaaaaatataatggagacttatggaatataatgaatgtctgacttaaaatctcgcctgattaaagcatccacttctaaaatgacagcagaactgactaaatcaaaattctttaacgagaaagatgtagttagaactaaaattccgatgcttaatatcgcaatcagtggagcgttggatggtggtatgcagtccgggttgactatcttcgcaggtccatctaaacacttcaaatctaacatgtctctgacaatggttagtgcttatcttaataagtatcctgatgcagtctgtttgttctatgattcagaatttggtatcactccagcttatctgaaatctatgggtgttgaccctgaccgtgtaattcatacaccggttcagtcggttgaacaattaaaaatcgatatggttaaccagcttgaagctattgagcgtggtgaaaaagtcatcgtgtttatcgactctattggtaacatggcgtctaaaaaggaaaccgaagatgctctgaacgagaaatctgtcgcagatatgactcgtgcgaaaagtctgaagtctctcttccgtatcgtaactccttacttctctattaagaacattccttgtgtcgcggttaaccacacaatcgagactatcgagatgttcagtaagacggtaatgactggtggtacaggtcctatgtattctgcagatactgtgttcatcatcggtaaacgtcaaattaaagatggtactgagcttgaaggatatcagtttgtcctgaacgccgagaaatcacgtactgtcaaagagaaaagtaagttcttcatcgatgttaaattcgatggcggtatcgatccatacagtggtctgcttgatatggctctggatatcggatttgtggttaaaccgaaaaacggatggtatgcacgagaattcctggatgttgaaaccggtgagatgattcgtgaagaaaaatcctggcgggcaaaagatacgagcagtacggaattttggggtcctctgtttaagcatgagccattccgtgacgctatcaaagcccgttatcagttgggtgctattgattcaaacgctgcggttgatgaagcggtagcagaaatgattaactcaaaagtttcaactaaggttgatggtgttaaacttcctgagagtggttcagtatcagctgctgaagttgaagatgaattagagaacttcatgaatgaagactgagtttgatttagaatctgaactcgagaaatttgaacaagaatctccctcggaagagggagacttcgagcgtcaagaacgagtgttcaagaaaagccatgaaataatccaagaagctatgaagactgttatccaagaaattgtgataaaactaaatggtcaatcacacttggtttatgttcataaattaaatatttctccttcaggggaagtaactattgagttcagtacaccatctgaagctcataaggatgaactttatcctcatgtggaagcttgtgttaaacaacaaatccagagtgcattaaagaccaagaaaaaatcattatggaaaatcttttaagaggttaaagtggtagaaacaatcttagctaatctgatttacaaccaggctttctttacgaaggtttggccatatatggacaaagagtacttcgagcaaggacctgctcagacggtgtttaacataattaagaagcacgttaatgaatacacagcaattccttcaaagactgcgttatgtgtagcactggataattcgtctataactgaaacggaacatgaaggcgcaaagaaacttattgataagttatctgatgctcctgaagatttgaattggttagttaaggaaacagagaagtacgttcaagaaaaggctatgtataacgctacgtctcgaattattgaaattcaggctaatgcccagcttgagccaaataagcgagataagcgtcttcctgatatgggagctattcctgatatcatgcgcgaagcgttatcagtatcgtttgatagctatattggtcatgattggatggaagattacgaagctcgttggctatcataccagaataaagctcgtaaagttccgtttaaacttagcattctgaacaaaattactaaaggtggtgccgagactggtacactgaacgtattgatggctggcgtcaacgttggtaaatcgttaggattgtgttcattggctgcagactatcttcagatggggcataatgtcctttatatttccatggaaatggccgaagaagtttgtgctaaacgtattgatgctaacttgcttgatgtatcactggatgatatcgatgatggatgtgtatcatacgctgaatataaaggcaagatggaaaaatggcgtagttctagtactcttggtcgtttaatcattaaacagtatccgactggtggcgctaacgctaatacattccgagctcttctgaatgagttgaaactcaagaagaactttaaaccgactgttatcatcattgactatcttggtatttgtgcttcttgtcgtattcgtcaatatactgaaaacagttacacgttagttaaagctatcgcagaagaacttcgcgcattggctgtagaatctgaaactgttctttggaccgcggctcaggtcggtcgttcagcttgggatgcttctgatatggacatgagtgatattgcagaatctgcgggtctacctgctacggcagactttatgctggctgtgattgaaactcctgaacttgctcagatgaagcaacagttaattaagcagattaaatcacgttatggcgataagaacatcaacaataagttctttatgggtgtgcataaggctaatcaacgctgggtagaaattgagcagcaaaacgacccaactaagcctaatccaagcaataccgtccgagaaggtgccggtgcacagaaccgtgtagccgaatctaatcgtcaagaacgagtatcacgttctaagcttgatgctctggcagaagaattaaaattctaggtaaattttatgatttttgtgtttagcgcggtccgtgaccaatcaggtcactcttttgttgtaacagccacagataccattcaccgaggcatcgaggcatataacaaagcagacctatctgtatgcgactatggagaggtcaaggtgtataacagcgatggcatctgggttaactctgctacatacctacctaccaagaatctgacctctgacgttttgttgaaaaaattgttcaaaaggtagtttactttcttcaaaggccatgatactatggccttactgaaacaaaacgagtagaggaaaacaaaatgaaaaagattgtacttgctttagtgttcgcagtatcaagttgctctgcagttcctgctatggccaactatgataaagacctatgcgaatggtcaatgactgctgatgagtctgaagtagctcagcagattcgtgcagatgttggtcatattgttgaaaacgtagacccgagcaaacagacagaagtgcaagcagaacttaaagacgacggcgcagcacttaagttgaattatgttctttactgtgatgctcagtttgataacttcaacatcgttaagtggattttaggatgattacgtacgttttagtaatggcgttatcaacaggctcaggcggaatgtctattgaaaagatggcattcacaggtaaagatgaagcagtaattaagcaaaagtgtgaagatacaggcaagcagtttatgcttatcaaagacaatccaaaatcaatgtctccgactctgtatcctacttataaatgcttacgtattacgcatgaataaatagtaggaggctctatgaaaacatacaaagagtttgttactgagatggtcgcaggtgatgctggcggcaatccacagaatattgcatcaggtaccacttccggggacatcgtcaataaaggacccgaaaccctttcaaagaaacgaaaagcggataaagacgctgccaagaaaaagtgataaaatggccttattagtttaaggccagaggaaatattatgtcttgggttgataacgagtatgcaattcgtgcaatatctcacctacctaaatttagacacgttactacatcttcaacattcaagttaaactgccgttgcccaatttgcggtgactcacagaaagatatcaataaagcccgattctggatttttgatgcaggccaaggattacgctgccattgtttcaactgtgagtataacaagtggctatcacagtatcttaaagataatgagcctgacctctatcgagagtatcttcttgagaaaagaaaggaacaagtctttgacaagccaaagagcgtagaaccgtctgagaaaattaatgcaaaactcccagtaatagaaaaacttaatttctgtgagcgattagatagacttccgaaggaacatccgatagttaaatacgtgactgccagatgtattccaagcacttcttggaaaaggttatggtttactaaccaatggccttctcttgttaactccgttaatccaggaacctataagaatgagacgaacgaaccacgtttggttattcctatcttcaacaagaaaggagagattgagtcgtttcaaggacgagcactacgaaagaatgctccacaaaaatacatcacaatcaaagcccatgaacacgcgaccaaaatttatggtctcgacactattgatgagtcaaaactcgtattcgtcatggaaggaccaatagattcgttgttcattgataatgctattgcaatcactggcgggtctttagatttagctcaagttccatgccatgataaccgagcgtggattatggaccatgaacctcgtcatcctgatacaattaagcgtatgaaacgtttagtagatgctggcgaaaaggtagttttctgggataagtcgccgtggaaaagcaaagatataaatgatatgattatgaaagagggggcaactgcttctgaaataacggattatattaatcaaaatatatcgcaaggtttaatggctaaattgcgtcttgacaaatatgcgaagatataggggccaaagccccttaaattaaagcaatcctccagtcataataaacgacacaaccttttctaacggcattggaggaagaactagcccgtgtgcgctagctaatggaactaccatataattccatgcagctaaagcagcagtggcgattccgacgtaaagatatcttccaaatcctcccttgtctttacattcttgtttcacttcagacatgaatcctcctgctatttatgttaagtgatataatatttatctaatttaattgaaaggaataaaataatggcacactttaacgaatgtagtcaactgatcgctggtgcagataaagctgaagctcgatacgcaggtatcgtccgtaaggttggtggtgaccctctgcaagtaatgcttgatatgcaaaaatctcttcaggttcgtcttgcaaatgacaagcctggtactaacatgcatcctgatgaattggctcaagctggtgatatcgtgcagtggttgcgtaatcaaaaagactacattgatgacgaattccgcgaactgctgacgtctcttggcggtatgagtaatggtgaaaaggcagctagcgctgtgtggaaaccatggaaagctgaccacgtcaagatgcaggaaacttatatcaaagacctgtctgacaaagaccagcttgaaatcaaatttgaaatgattgatatcctgcactttgttctgaatatgtttatggcgcttggtctggattctgaagaaatctttaaactgtattatctgaaaaacgctgagaactttgctcgtcaagacagtggttactgatggctaaaagaatatctaagcgtcgtttaaaaattatcagaaaacgaaaagaaagggccttagtattggcccttcgagaagaaatcactcgagaaattgataaagaaatattaaaggcacttacagcagctatataaatactcctgtaaactaaataggagattaaaatggcttacgtaaacatcaaaacttttgaccatacaactgctgatggtgaagttaaaggtacagaagtatctgtagcttttaaggtgtattctgattcacatcgtattgctaatgcgcagtatcagattttcccatccgaaaaagctgcttattcaacagtagttgatgatgctgctacttgggcaaccaccaacgcgaaaatgtttgaagctagtgcagaagtataaaattaaggactcctccgggagtccttttatgctatactgggaatggtatattattcctactaactgaggagaagaaaatgatatgttatactaagccctggtatcaatcgccattaaagaagtctcattttgattgttggtacagaggtgtaagagctgcagcgttattactaaaagctgcgcctgctttaattaaagcaaatgataagtggtttgaagacaacaacatgactgaaggagctatgtgtggcaaacgcaaaaatctataaagtaagcttacaacgcgcagttcaatcaagaaatgatgcaaaaggagctttgcgtctagaccaagatagaatttttactgttgctctatacagtacgttcgacaaagatttcaaagatttaattaataaattcgaggcatttggttggtgtccttctgaagattatggcattattaagactgctcatgtctttgacgtagatacagttccaggaagtcctgtttctatactgcatgctctccacttgaaaggatacaccaatgtatgtcatgaaactagtctgtatgaatacgaaaatgacataatttcaagaggcaaaaagattatcattgatagcacagattctctaatagaatttactaagttagtttggttatatatgggtgcagattttatcaaacttgctccaagcccgctgttacaaaaagcagctgatggatataacagcagtagttgtctgtatcgcaatactgagtggttcatgtgatggatttgtttgaaatgatggaagagcctcaggaagaggttcaagttcatccagtgatttctaaggacatcaaagacgaataccgtataattatacagaagtacggtattaaagccccagaagctcttctagatgaactagcttcaatctggtctgacccgccgccctggtctccgtgggcaaaataatttcacaaagtagtttactcttctaaaaagccatgatatgatacctctcgtaaccaaaatggagaatatcatggctatttcattaaacccatctatttcagtaaaattatcaaaggttattcctatcgaagaacccattcgttccattgatgttcttaacttcgcgcgagaaagcaaaggattacctttatatgatttaagcgtatgggaagcattagctaatcgttttgattgcaaagaacagtcaattctgtggcagtgcatgaacaataagattggcgaagaatttcataagaaacttgactctatcgttaggcgccatcaaattgataacagagacactctctatagaggtctatcatgccgtgaggctaaagccttttatgacgctcttattaaaggagagaaatttgactttggaaaggtagcatcattcacaacagatgaaacgattgcccgagaatttgcaggcaaatggcattactcgaccttcgtagtcattgaagtcaataattgccatcaatcatttgattatcataccaacatgaaatcacttttaattactgctccggattctgaattcatgcgtccaaatgacgtgattgataacattgctcagcgcagaagcgctgacatcgagatgattgataaagaacaagaaaggatgctaccgatgggaactaagttcaaagtggtgggtcataacaaagttgaaaaatctggtttacttatggactactttagtgttactatagcttagtcaactagtgattatctagaactagggacctagacccattataccgtccgtaagacgaaagcatttttgaggaaaacataatgaaattcactgctgaaaccgctaaagtttatactcgtttaattacaactttaggttctgctcaacgtcggcacaaggagttcaatctcaccccagaatatctgtttaacatcatgcagcagacacactgcgcatactcaggcgaaaagtttggaaccgtcaaaggaaaccatcctgacagcatgacgcttgaacgctggaataatgatttaggatatgtagtagggaatgttattcctgtcaagcaaaagtataatactttgcgtggaaataatacgattgaaggccttgaacgaaaagcgaatgaaatcgcagcacgcatagttcgttcttcagattctgttaagccaacaagtgataaagaagcttctcgtttggaaaagattcgtgagtatgaaaaaactattacatcaattaaaactaatttacgcaatcgtgaaaatcatctttctcaatttgtgcaaaaagaaaagaacggaactgcaacctcggctgatttagaacttattaatgcgctgagaactcgtatcagtggtggtaagtctgaattagctaaagttgagcgtaagttatctgctattttagcatcagttccgaatcgtccgtcagatgctgaaatccgtgtacaatcaatacggttaattgttagctcacttcgtcggttagaaaaatgctcaatgctagataagttaaaattgaaaaaaggtcttccattgactgcgtccttcttccaacttttgagaggtaaaatgtaatgcaacactatggatatgtagtagcgtataaggataaagacggatttgaccatccagtcacaactgatatgtatgatggagaacgatgtgtagtcttcactaatgaagaatcagccaataaagcacggattcgtacaatgtcggttttaacagacaaattagcaaaaggtaattttactgggaaaagcaaaaccaaaggaatgctttggtggaaaacaactgagctagtgtatgaaccacttagcgatgttgagcgtgaaaaactcaaagcaaaaattaaaaatctacatgtagtgagggtaaaagtggcatgattacgtttgaccaattaaaagaaagtcaaaaagcgatttttaataaagtcattgaaatggtcaaacaaggagctaaaggtcaacatattacgattaatggacctgccggtacaggtaaaacaactttaaccaaatttatcattgacgctttgatttctcagggtatctctggcattgcgttggcagcacctacgcatggggccaaaaaggttttatctaagctcagcggaatgcaggccagtactattcatagtcttctgaaaattaacccgacgacatatgaagaaaacgttctgtttgaacaaaagaaagttccggatatggcatctattcgagttctcatctgcgatgaagcttcaatgtatgaccgtaagctgtttaagattttgatggcaactattcctgcctggtgtattgtcattgccattggtgataaggctcagatacgtccggtagaacctggaagtaatgaacctgcactgagtccattcttcactcataaagatttcttacaacttcatttgaccgaggtgatgcggagtaatgccccaatcattgaagtcgctactgaaatcagaaatggtgggtggattcgcgactgtgtagttgatggtcatggcgtccgtggttttacaaaaggaactgcccttaaagattttatgctaaattattttaatttagttaaaactccagaagatttatttgaaaaccgaatgcttgcgttcacgaataaatctgtggataaattgaatgaaataatcagacgaagaatatacgaaactgaacgaccattcgtagtaggtgagattgttgttatgcaagaacctcttaccaaagaacttaaatttgaaggaaagaaattcagcgaaattcttttcaataatggtcagtttgttcgcatattagacgcagttgaaaccaccacgtttttgggtgccagaggtgttccgggtgaatatctggttcgtcattgggtattagatattgaaacctatggcgacgatgaagagtacgctagagagaaaatctgtgtcatctcatccgaagaagaaatgaataagtttcaattctttttggcaaaaactgcagatacatataagaattggaataaaggaggtaaagctccttggtctgagttctgggatgctaagcgtaagtttcataaagtgaaagcattaccagcttcgactttccataaggcccagggcatctcaattgacagaagcttcatttatactccatgcattcacatggcagatgcttctctcgcgcaacagctattatatgttggtactactcgtggtcgttatgatgtattctatgtgtgaggtaatatgtttgaattgaaattagaagaccttcaaacaatggttgttggcttacaagaatctaagtttgaagcaccagacaatgttaagcgtgctattaacattaaaattgatacagttctgaatgagcttcgtgatatagcagataatgctaatgctattacttggttcacaggatatgacccaaaggtgtatctgagcgaatatattggttgccagttacgcgaaattaaatttatgctagaggctcaaaatggctaaagactttattattgattttgaaacattcggaaatgtgtcaagctcttctgtgattgaccttgctctaataacctttgattctgaccccgaagttttggaaagcttcgatgaattggttaaacgtggtcatcgtattaagtttgaccttaaatcccagaaaggtcatcggttgtttggtaagtctactcttgagtggtggaagaaacaatcagctgaggcccgtgctaacctggcctcaacgccagacgatttatcagtaattgctggaattaaagaagctcagcaatatctgattgataatggaattcatccatgggattcatttggctggtgtcgtgggcagagctttgactttccaatttttgttgattgtcttcgcgatgttcaacgagcccaaggaatttccgaagaagaaattgatacatttaaagaagaaccatgcaagttctggaatcagcgtgacattcgtactgcaattgaatcgctgcttctgactcgtgggctgacaactacccctcttccaaagggtacgctcgatggatttatcgcgcatgatagtatccatgactgcgctaaggatattttaatgcttaaatatgctcaacgttatgctctaggcctaagcgaagcaccaagcccagaagataccgatcctttgagtttacctaaggggcgtggctaatggaagagtttgaattcgacgaaaacttcgaagagtggttcaaccgggaaatcctcccggaaatctctccaacgatggttctggtggccaaggctatgatggctaaagggtgggaagccgggtatctgttcggcgtcgatgttggatgtgaaatttctcaccgataactatttactttatgaaagagccattatataatggctctacattaacaaactgagagaaacacgatgaaagatttagttgtaggcgaaaacgttaaagtaattggtggtaagtgggttggtcacaatggtgtaatcgttaaagtagttaatcgtaatgacggtaaatctgggtataagatttaccgtgaagattttggtgattacatccactgcttgaaaaaattcgttgaatctagtgaaagctatctgcgcaagtgggtacatgtgaattcacttgacaatgttattacccaatcggtgagttctactaattcagccactaatctgtcgctgcataaaaatgttcttgtcactgatgagtgggaagaagacggtaaagccctagtaaacgtagtgtttcaaggcaactatgcagttctgcctaaagccgatgtagagccgacagaatcgcaacgtcaaggtttagtataaaaagttgtttactttaccacaaggatgtggtactattatcttatcaactactgaggagaataacatgaaaactgaaaacaccgtaaaaattactgccgaagcttttgaagacattctgttcaacccggacttaatcgtcgttcagaaagagaaaaccttcggtaaagaagagcattggacctggttgtatgtattcgcgaaccatggcgatattgtcccagttcgtacctttgctcgtgtaatcacagttgatggcccagaatacatggagattgtgtaatgaattttaaagaaggcgtacagtacaaattcgtcaatgatgaagcggaagaagaattttcttcacgttatgaggttaatgaagactttgtgtttgaactctatgaaaatggcgggagttttactgttactaaagttgaccaccaaaataatagagtatcaggaattatgtgggctaatggcacagaatgtgatgaagtcggcggtgaagaccttgtaatttttgatagcgaattcaaatactttactgaagttggaacttccgcgaatgtaattccaaccgatttggttatgaatctttctattcataaccgtggtcaagcaatcgctgctattgcagcactgcagagtgcatatcaatgttaaatttagctcctatttttgaagcatcaaaactgtcttatcctattcctaaccgtagcattgggaatgtcatgttgcaactttcttcagaaactggagaaatgtgtgattggattaatcgtccatggcggcagaaagaagagtttgaaggcgagtgcgcagatgttattaactgtgtagtagatgcactttggcttcatttcagaaatcgtcataaagatgatgcgcatgtatcagatgatgaaatctccatgatggttactcgtgcgctgaatgagcaaatcgtagtcaaaacacaaaaatggaaggatgctgttaatgccaatgtatgattacaagtgtgaagtctgtggaaaaaagatagaaattatgcgtaaaatttcccatcgtgactatactgttaactgctttaaccctaagtgtgaaggtcaaatgaagcgagtagtttctgcaccggcagttcactacgatggattaaagagcggtgattattgatgggaactaaagcacgcattaccatgaaacccggagaaatccgggttattaaagtaggtaatataacttatagggttaaattaaaatgaaaaagattttaattacagcgcttgccttcatgatgattggatgcactgacgctgataacgcaactcgcgtgttagataacgcgggatttactgatatcaaaatcactggatataagttcttttcttgctcagaggatgattttcagcacacaggctttacggctattgggccaacaggaaaacctgttaacggaacagtgtgctcagggctttttcttaagaacagcacaattcgttatgaataaatgaccttcgggtcatttagttgtttacatggacatcgtgttttggtattatagtcttgttggccagaggagaatattatgattattggaatgacaactgcgcaaaggcgtgctaaacgacagttaaaaatggtagagcgggctattggaaaatataggtttgcttggtggccaatcaatgacgtgaatggccgtactatttggatgcagaaatattatgaagtctgtgaagaatggatttcacttaatgaaaataacgagtaccggattgaacagtactacggaaattctcgatatgcatacgctaacgttagtgatgctcaatggactatgtttgaacgacaacggccccgatatcccgagtataaagcggttaaaggaggccatgaggttcttggtaaattgatgtatatcaaagaagaattacttgctataattaataattgatataattccttcactaaccgaggaaatgtaatgattaagaacgaaattaaaattctgagtgaccgagaacatatcattaagcgtagcggaatgtacattggtagttctgcgtttgaagcgcatgaccgttttctttttggtaaattccaatcagtaaagtatgttcctggtattatcaaactgattgatgaaatcattgataactctgttgatgaagctattcgtactaatttcaaacatgcgaacaagatttcagttgacattaaaggcaacaaaattattgtaacagataatggtcgtggtcttccgcaggctcctgtagtaacacctgaaggagaaactattccgggaccagtagctgcatggactcgtcctcgtgcgggtggtaactttggcgatgatgctgagcgtaaaaccggtggtatgaacggtgtcggttctgcgttaaccaacatcttttcagtatcttttactggtgcaacatgcgatggtaaaaatgaaatcattgttcgttgttctaatggcgcagaaaatatctcctgggaagaacatccagcaaaagataaagaattcatcaaagataagactggtactgtagtatcattcattccagatttcagtcactttgaaagcacaggattgactgacattgaccaatccatcattcatgaccgtctgatgacgttagcagtagtttatcctgatattgaatttaaattcatgggtaaacgggttcaaggcaagtttaaagcttacgcccacatgtatgacgaaaatgctgtagtgcaggattctgatacgtgtgctattgctattggtcgctcagatgatgggttccgccaactttcatatgttaataacattcacaccaaaaatggtggtactcacgttgacctagttctcgatgaactgagcaatgaactcattccagcattaaaacgtaagtacaagttagaagttaataaagcacgaattaaagaatgtctgactgtcatcatgtttattcgtgatatgtctaacatgcgatttgattctcagactaaagagcgtctgacttctccttggggcgaaattcgtagtcatattgatattgattacaagaagcttgctaacgctattatgaaatcagaagatattcatatgccgattattgaggcgatgttagctcgtaaacttgctgcagagaaagctgctgaaactaaagctgctaaaaaggcacagaaagccaaagtagctaagcacatcaaggcaaacaaatatggcaaagatgctgacacaactttattcttaaccgaaggtgattctgcgattggttatctacttacaactcgtgaccgtgaacttcatggcggatatcctttgcgtggtaagttcatgaatacatggggaatgtctgctgcggatgcgatgaagaataaagaagtatttgacatttgtgcaatcactggtttgactatcggtgaacccgctgaaaatactaactatcgaaatattgccatcatgactgatgcagacgttgatggtgttggttcaattttcccaagtcttttggcgttctttagtaattggccagaattatttgaacaaggtcgaatccgctttgtgaaaactccagttattattctcaccaaaggtaaagaacaacgttggttctattctcttggtgaatatgaagaccataaagatgatttcaaaggttggaaacttcgttatattaaaggtcttggttctcttgaagaagatgaatacgaacgtgttattcaagacccggtttatgatgtagtcactcttcctgaaaactggaaagaactttttgaattaattatgggtaatgatgctgcaccacgtaagacatggatgagtgaataaagaataaatagtaagggtactattgcccttacttagaaggaattaacatgcaacgttattggattactttgatctcaggcgactatggatatctgttcgctgaaaagaaacctctgcccggaacttgggttactatctgggtggaaaacattgatggttctaaacatgaggtttatggtcgagttagtagggtgtggtaatctaagggacctccgggtccctttttctttataagaatggatttatatggctttaatcaagaagtgcttggagatgattctaggattcttgcttaaagttatagtgatataatttcccctaaatcactgaggaaaatattatgaaacgtagttacatcccatcagaagaattattcaacgatgctatatatcgtgaatatcgtatcatccagcggttctttgacatccaagcagctgaggaattcaaagaacgcttcaaagaaatccataataaaatttttacaactaacaccgctactgctgaagagttacttgaagtagcagaaatcattaaacgacataattgataggaataaaatgaaaattaaatgtgatgatgaagtaatcattggttcttctgacgctgacgattcaacgtttaccattaaagcttcaggtaaagcttttgacattttgtcaaataaactttataagtataaagtccgtgccgttgttcgtgaactttctactaactgcgatgatgctcataaactgaacggcaatgaaaatcgtccattttacatcaaagcaccaactcgtcttgacccacgatttgtaattcgtgattatggtccaggtcttaatcataacgacatgatgacgatgtacaaaacgttctttgaatccacaaagaataacagtaacgatttcatcggtgctcttggtcttggttctaaatcgcctttaagctatacgagtacatttaacgtagtgtcttatcatgatggtaaagctacaggttatactgtcatgaaaaaccgcggcgaacctactattcgtccaatgttcgttgatgacatgaaagaagatgaagaaactggtcttgaaattacagttccggttaaagtagaagatattgatacctggcactatgaaatcgcatatattttgcgtacgtttggtgctgtacctccgaaggtagattctcttcgccgtgaaattgaatatttccctgtagataagactgactggttcagcgttaatagctcttacgaaagttatggtctgtatgcagtttatggaaaaatcgtatatccgattagcggtgtagatgttaaggcagattggctgcttaatcgttatggcaaggtttatgttcatttccctcttggcgaattagacattactccatctcgtgaagagctttctcttgacgaagaaacaattgctaatatccagaagcgtgtgaatgctcttgaagaagaggtaattaccgcagatattaaagcgtttgaagcgtatgaatctgaccgtgaattcctgcgtgagttcaataagctgagttctaaggaacgctctattcttcagagccgtggtattaccattgggaaccgcgatattaaacaagtagttgcgaagtataatcttgataaaattcgttcatattatgtagataacgaagtatcagtttatgtttcatgcgatgaacctgctcgtcgtaaagtgtcaagcagttcttggcatcgtcataaccaagtaaacatttctgatatttgcggggttgatagaactaaagcgtttgttcttattgacgataaagcgggtaagcgtattgctacggttcgtgctctgtgtaaatctggattagttccaatctgggcacacattacagtaatcaaagacaatgaagatgaattgcatgtcattgatgagctgaagaaaatcatggatactgatgaagttgtagtattccgtgtgtctgaacttgaagcccagagaaaagctcttcctgattatgacactggtccaaaagagaaacgtccgaaatctcctaatgtgtcattgcattggattgataaagacgggtattgggaagaagaccgccagactttagtatcatctgaaattgctgagcttgaaggttatgcaatcggtcgtaatcgtgatgaaatccacactttcccagataatgtttggtggtggaatatgaatatcgcgagcatgcggtctctggcagaagcgtgcggaattaagaaattctatgcaattcgtccaggtgctatgaaagccgcggcaaaagccgatggattgctttcatttgaccgatttattatcgaccaatacatcaagtgtattgataaggtagactacgaccagtacatgccgtcaaatgctactggaaaccgtatctgtggaaatattgcgcattacgataaattgaatttcctgtcgagtaagtttactgcgtctggaatgaaaaatccgttcctgacaaaattaaacaaaatcgctaaggtttgtcgtacaagtaaaatcaaagatgaaaacgatgatttagctttatgtaataaaatttataataaactgtctggtgatgctgagacaatcttctataaaaagattgaacagtttaaagatgattatcctgtcatcgcaagtgtcttggatacttggcggactgacagcaaactcgtcgatgatatcgtaaaaatcatggagctccttgatggagcttctactcaaaattctgaaaataaaggtgaataaatggctgttacctgtctgtctgaaatccaaaaagatgcaatcgttaaaaacttcaaaaacggtctgtacactaagaaagagctcgccgagaattatggtgtttcccgtgacactattcggcgtgtgtttaaagagcgtgaagctcgagctgccgcggcagctgttcctgctaaagtagaagctccagttgagcgtgaatttaaatgggcagcaagttccaaattcatttcaattactgaaggccgtactacttataacgctgatagccaacatcctgggtttaaatctgcgctgcagaaacttgtagatggtgatatcgctggtgctattgaccacattaacctggaacaaggcatcaagaaattcgttcagggtaacgtccgaattgaagatggtactttattctataaagatatcgagctgaaatctggtctgactgagcgtatcgttcgagctatggaagatggcgaagactttaaacgttatctgcctttcctggaaaacctgatgctgaacccatctcgtcgtgcagtttatcgtctgtttgatttcctgaatgcaaacgatattgacatcactgatgacggtcacttcattggttggaaagtagttcgttccacttatatggattgtgcttcaaacacatttgataactctccaggtaaaactgttacaatgccgcgtaaccaggtagatgaagacgatcagcgtacttgttccgcaggtctgcatgtctgctctaaatcttacatcggtcacttcggtagtggttccgatcgtatcgtttcagttaaagttcatccgcgtgatgtagtatctatcccggttgattacaacgatgctaaaatgcgtacatgtggttacgtagtattagaagatgtaaccgatcgttggggttcagaacttcgctaattataaggagccttcgggctcctcttttattatgggtgaaccatgattaatccatttaacgtatctcattctaaagttgttaatcttcgtggtactcatcatgcggctacggtgttttgccatcatgtagttaaacatgaaggtgatgttcactatgcttggttgcactgtgatgaactcgtagaacttggtgatgactttgttgttgaaccagacacatgtaaccacgacgatcgtgtttattttggtgaattgcatatcagaggaatttatggcattgatgaacaaagccctgcagagattgaaccagttgcggacatttaccctagatttgaataaactgaggggtgaagcaaaagtaaaaatcattgacactgcaagatatagtttagatatcgatccatctcaagacagaattgatgttcttaaaagatgtagaattgctataccggcagagtatgtggtagcagattttctcgatggatacgtgaacgatcaagttgttgaccataataacaacgatccatacgaatgggcatgggacgtattagctcatccacattaccaaggtgttagagttgaagttaaaacacactttgttcatgaccgagcaaatcataagccatggattaatgttacgactggtaaagacggtctattccctaatggaagtggaataaatctagggcccatgtttaaacataaagtcgcagactgtataattatattcgttgcagaagaagtgtcccagaatgtcatacggtacacaccaatgtttgccggcggtatcgaacacctcatggaagtagtaaaaccttcacgagttggagctggcgggtatatcatgcacaaattttaaaaagttgtttacttccgggattggccatgatactatggccttacaaactgaacgggagtaaaacatgagttacttagagctaaaatcacttcgagctaaacgcggaaatgcttctattaaagctgaacttttgaaagagtataggattctcgaatctatgaattggcattatactatcattgcttgtgataatggcgattcaacttacggcggattgtatcccaatggagccgctgcagctcgcgatgaacatatagataaagttaaagccttagaagaaaaaattcgtaacttgtgcatttaacggtttactttactgttcttcagtgatactataatcttgttagctaaactggagaacaaaatgaaaaagttacttacgattttgaagaacacctttgtagtattctgccttatcgttactttcattggtgttttcgcatgggatttagttaacgtttggattaatgctttcatctgaggaaaatataatgattcgtagtagttttgatcgtcgctttaacttaatgagaaccgttgttctgtcctttatcgttgcggtagcgcttggaattgtcgccgtgttcggattcggaatttattttgccattaatgcgattgatattattcaaactgatggccttaaatccttagtagaaaccgtatgggaaggtcaaaaatgaaacgacacatcgtgtatcgtctgcttgctttaggtcttcttgtgttttgggttggtggtgtaacggcagtagtatatttttggtagtagaaggggcttcggcccctcgtcggagaataaactttaatcaactgaggaaattaacatgcgtaatattatgacttttgctgatctcgataacgctggcgcagaactgatcggttctattcgtaacggtgattgggcagcaggtgctccatctcgtgaaattactgagcgcgaaggattttattttttgatgttcaatgatggcaaagcaggttatattggtgcatctgctcgtttctttgtagctaaacagcgttcaaaggcaggatttgaaagtgttctttctcatatccgttctggacgttctcagttgggtcgtgcccttcgttcaaactgtgtaacatatggtgtgttctggattcctgctaataaaatgaaaccactcaccactggttatggcaaaggtcaacttgcactggcgtttactcgtcagcattcaagtgacgcgcagacctactctgagctgaatcgtattctgaatgataactttgttttctctatgcagaaatactaatgagaaacttctttgtgatgggttacttgtttctgatggccctaatgatttgctcaggaacattcatgtggtatggccttgtgcctaccactaaagtaatcggaagtattgcgttcaccgcagcatttattatgtttgagcgcatttgtaaaattgtaggagtttacaaatgattaagaaactcctaattgtggcagcaatagctgccgcctttctattagttatgtactatggaatgatttacggaatgatttatattgtgcttttcatttccgatgttatagtacaaatcggctcactaatctggtaggtacaatggatatttttgacactctattaaaacaagcaggttctattgatgatttggctaaggcgtcaaatcttcgtcatcgcgatttgaaatctatcattgataatgaagcaaaagagtatgcgatttacactgtagaaaaccgcgctattccgaacttaattgatgggtttaaacctgtacagcggtttgttattgctcgggctcttgatttagctcgtggtaataaagaaaaattccataagcttgcgtctgtcgccggtggtgtagctgatttaggatatcatcatggtgaaacgtctgcccaagatgctggtgcattgatggcaaacacatggaataacaactatcctctattagatggacaaggtaacttcggttctcgcttggttcaatctgctgcggcaagtcgctatattttctgtcggatttctgacaacttccgtaaaatctacaaagatacagaaatcgctccagcacataaagataaagaacatgttcctcccgcatattatctgccggtaattccgactgttcttctgaatggcgttcgtggtattgcaacaggatattcaacttctattcttccacacagctttgaatctgttttagaatgtactaaagcggctcttcgtggcgaagttatggaacctgaagttcagttccctaaatttaacggaaaaatcgttcaaaccgaagacggttctgttgaactgcacggcgtgtataaagaaacttcacggaactcaatctatatcagtgaaattccatacaagtttgaacgagcttcttacgttgaaaaagtactcgaccctctggaagatgcaggatacatcacttatgatgatgactgttctaagactgggtttggattcaaggttaaattccgcaaagattatgctttgagcgaagaccctgaacagcgtcatgctaaaatcatgaaggactttaagctcattgagaaaatgagtcaatacattgtggtcatcgatgagaatggtaagctgaacgacaagttcaaaacttcaggtgagctgattcgtcattttgtagaagtccgtaagacattcaccgccaaacgaattgagcacaaaatcgctgaaactaagcaagcatttaatcttgctcaggcaaaagctcaatttattaaagaggttattgcaggtaacatcgttatccaaggtaaaactcgtaagcagttaactaaagaaattgaacagaatgaactattcaaagaccattctgaaaaactcgtttcaatgaacatctatcacatcactgatgatgaagcgaagaaacttgctcaggaagcaaaacgcctagcacaagaggttaagtactgggaaaagacaactcctgaggctgagtatctgaaagacctggaagaactatgatagaattttatttaattataggttctataattgcagtattaggtctagttttattgctcctcagttaatctagggaacctggaggtcatctccaggtccttccatataaatctatatccctccaaaatccctccttagaatgccccaaattattttcacaaagttgtttacatgcttactcggttgtggtattatagcaatatcaaaacaacacggagtaaaacaaaatgattacatcattaaaatctgatatcaaaaacattctttatatttctactcaagctgatggcactcgactgagccactatgtcaaaggtaacattgtggtgcttgatgtgttcgaagttaatcgcgagtatcctatgcgccaggtaattcaagcgagtaactatgaagacggtgaagagtatcaagttgttctttgtgtatatgatgatttctgggtgcttaaacttgagaatggcgataagttcttgatctttaacgtataacatttttactgctctttgaagaaaatttttcagagagcagaataaaatggtttacaagctggttagcagatgatattatagtctcataccaaacaaattgaataaaacatcatggagaatcacaatgtctaaagtaacttacatcatcaaagcttccgaagatgctctgaacgagaaaactgctgctatcctggttcaggtggctaaaaaagatttcatcacttctgctgaactgcgtgaaatccttgaagaaaccatgaacgcaggttctgttaactcaaacatcggtgttctgattaagaaaggtctcatcgagaaatctggtgacggtttaatcatcaccggtgaagcacaggacatcatctctaaagcggcagttatctatgcagaagagaacaagcctgaacttctgaagaaacgcaatactcgtaaagctcgtcctctgactgaagatatgaatgagcacaaagacctgatgatgaaacttctcggtgagatggaagatatcttacctttgaaagaacttactgtttaccgtagtaactatatcgcagttctggaaaaacgcaccttcggtattcgtagtcttgaagttaacaacaaaggtactttccgcatcttcggttacaagatttctgaagagcatcagaaacacttcactgacctcggaatgtcttgccgtgtagctgcaacaggcaatacttacttagatatcgctcgtactgctgaaaacattgaaaccatcatccgctctattaaggaactgtaatgaacaagtttaaagtattgaatgaacttcagcgttgtgtagaaaaagttaacttgaatgctaatatcccaactgattgttgggatgtatggttccgtgggcactttatcggatacattgataagaaattcgcaaaatgctatgctatctacaatgcagatggtaaacatatcatggatgtagataactaccaaaaggcccttgctaaatttgttccaatggcggaagctgttaactcaatggaatggttagagaaaatgcagggtgaacctgttattcgtcagattggtattcgtgaaaagaaaagtttatggcagaaaattaaaggattctttaaatgactgaacaagaaattaatgatttgattatgaatcttgtgaaagatattaatacccgggctcttcacaaataccaaaacggtgaagcatggacaattgcagactgtaagaaaggtgcagaccatggccgtgaagttattaaaacctttaacgagaagttggtcaaatgtgtaatgtaaatagcgaaattccagaaatctgttttaaagtagctgattggtgggatggacgattacttcaacgtcgtatcgtttgtgcagcaaatcgttttgaattgaaaactggtggaacaattgtagttccaggcactcgccactattctgttgatatggcgaacgttttagatatgtttcgcgacaaattggtttctgatcatgtccatggagacaatcaaggatttgttgaccaatggggtgagtacttcacgcgtgaagaagcattaatcatcgctacacatgcaggtcaagttaatacagttcgtcctaaatcaggaccagccaatgaattattctcagaggatttatactaatgattagtacattaaagaataacattacgcttttaaaaattcaacgtaaatcgcttcagcgctcattagaaatgatggacgataattggggtacatataccaatgaagccgggtttaaaatggcagacagcaaattcatgaaaactctcatggataaagaatacatctgcccgtttagccatccatttaatggcggtgctaaaccatttcttgctgaaatgtacaaaataatgacagaagaaatgattaaagatattgactattatatcaaggaacttgaatgtaaggaagataaagcgtgagaacaataagcgtcaaggcagattacttcaacagcttaaatcgttcagaaaaggctcaaattaaacggtttatcttggaattgggatatgtgcatgctggagatttaaaagcacatatccaagaatgtgatattgctaagcgttttgatattacacgcaattgtttaaatgaggtaattgcacatgtacaacccagtagcgaagaatgactttaacaaaggaggcgcgcataaagataaaaagcgtgctgccaaagaatcaaaacgcaagcaaaaacataaaggtaaagacaatgcgcattctgaataattccaaatgtactactttaactattatttgtgatgacctagaagctctccacaagaaattaggggaccattctggattagtagcagatatccattctgaactaatggaagacctccagaatgctggatatggggactggatggtacatgattggaataatggcacctttactgtggctattatcgctaatgttgaacctgaagaagttcttgaacaatttcagaaatgtgttgatgcttatgatattggagattatctatgaatactgaagctttacgcagagaagatgaagccaaggcgtatcataaacgtgttgaattgctttcagcaattaaagtagaatacactttacaagttaggcttaaagttcttaactcttgggctaatgacttagaagtaaaacatttagagcaagcagtaatgtctacgtttaaccaggacacttctaagccattcagtttgtcagccgacttttacacgtatggaattattactattaaagcaaaggatagaggtgacattataagtggagttgagtatatcgaaagcattttaggtaatcgcggagaggtagttttagcatgagtcataacttagaatctgtcgttgaatcacaaagatatcttgaagcgttaatgaataaaatcgcgcttggaagtctgattgacttgtcttttcaagaggcaattgacgtatgtcactggatgaatcgtagggttcgtccaattggaaaggaatggtatttaacggctagagtaaaagatggtcgctacgggctctggatgtcctctggtgctgagtatatcactaccaaggaagatttgaattctcgttgggaattggcataaaccggtttacaacgcggtatcaagatgatactataatcacataatccattatgttgtaggaaaaataatgactaagtttgaaattgtccaagaaatcgttactgttgcttctattctgactaagttcaatgctgaacatatcatggagaagcgagatgaatttattgcattcttgaatgaaattggaataaagaacgagcaggggcgtcagttaaatcagagcaactttcgtaaaatggtttctgagttaactgacgaagagaagagaattctcgttgaagaatacaacgagggatttgagtctatctatcgaacaatggctatgcatagtaataagtaatcacttagctcttccaagagctctaaccgcctgaccacatatcgatgttagtctttcgttagataatgcaggtttggaattgtaccagtacatttcaacagttccagcataaacattgtctaaattgaaatatggacagctaaacatatacgatatttcaggcggttttctttttgttggtaagaaaacaaattccttatccgtccaaaaatatctacctgataaatgcgtgctatattcagcagttgttttgtcgattggatatcctcccaagtttttagaatctaccgtgctaggtaaagtcccctcataagcaattaagtctacgaagtagttcaagtttttaggtctgaacgtaaagaccgcagaaaaatctgcaccgcttgagatatgtactatctggagttgttcgagtgctgtattatcaaatcgggaatctctatccttttgaaccagtttatcatacttgtcataagtactgtcgacgtaagcggtaataagactatcagacttatatccagcaaacgccaacattgctaaaagtacgacaacaaaaacacgggaaaagagaactcttcccgtggctccatctttgaataatagctcgagcaacccaagaaacatatcaaaaaatggtattgattgtttgcttgccatattgctctccttacagagctatttattgctctagcatatgcttaatatgctgtaaatgacaattggaaagttcgtccatcattggcgtaaagccaattccaaaaagcatttgggtctgtacaattatagcatcgtcttcctctataatctctagagctgttaaaatggaactgacttccatcttcaatatcaacgcgccaatttacattaaaattcccactgccttctaaaacgatggcatcattataaccgtcccatttactaggctctgctagcccaaaaacaaccaaattaaagcctgtttcccatatacctgataaggacccacgagaatcaagtaatacgttccacgaagcactgttcttatcaatccaagcgccgcgaaccttaggtcctgtcgcagggttgttacctgaaatagttatactagcgttccagacgtttcttccgatcatgttggacatccaaaatggtgtccccaaccttaattttgctccagctgcaatcattgaagattctcctgttacagctttagctgagcttcctacattaggacctgttactgccatgatatctcctcaaagatggggccgaagccccataacattatttagatttaagttcttcaatttctgctttaagctctttaacagattcgactaataacgcaattactgcattatagtttaaacgaagtaatgcatctttatcgttatcagttgtaactgcttcaggaagaacttcctgcacttcttgtgcgataaggccggccgatggtttagtatcaccgtttggaagctctaaatcataaacattaccagatagcttcgacactttatcaagagcgttatcaatcttagcaatatttgatttcacacgacggtcagaacgaatttcaacgtcccagaaattaccaacaccttcaacgcgtagattagcagcactaccccagatttttaccccagtgtctgtgatcgttaaccattggtcaactccagcgccgttatagaaatgccaaccagcgcgaacatattcacccgactgccatgagttaaagctatcgaaaatcgtatcaccgcgctgtaaacgtattccatttacagtgtttgaagtagatgtgtttcctggcgccaagtgggctaattgcagatatccatcatttctgaatacaagctctcggccactttggttacggataatcatgtcaccattttggccgttagaccaaataacgcctctggtgttaccagctgaatcgcggaaccagtagttagagtttttaccagctgaactggcatcacagtaaacattaccgtttttagcaaaaagaccaccagcgtcggttgtgtcagcggcgaccaagtttccagtagaaactttaagactgttgctaacatctaacccgcctcttagagtacttttgccatcaacttctaactgccatgtttttaatctggtgccagttacgtcaaggttaccagttacagtaccaccagctaacggaagatacgtgtcgccagcattactaatagcagaagcaaccttgtcatcaacatatttcttgttggttaggtgcgagttatcagtaggagcttgacctgcaataacaaacttaccagaagcgacgttgatgtttccatcagcattaatcacaccgctgaaacgggaattgcctttaactatcaagtctgagttcaagttagtattacttgttactgtaagctgcctgttaatttgggcatttccgtaaacggtttggtttccgctagcatcaactttgaatatatcgctaaacgtgtcaccaggattaatttggttgttggtatttgcagataccataacggtaaatgagttagatttaccgatagccatttttcctggcataccgtttttcttgactaaaccaatatcagagtttttgccaagaacgatcattctgttatcttcagaaacgttcaagttgcctgtgattttcgagttctgggcctcgaactcaccaccgactgtcattttaccgttttggtcaataacagttgattggcttgcagtatcgccattcggtcttaaatgaatcgcttggcctgcttttgcatagattacaaaagcacctgcagtgtttgaacgaacagcagggccttgcgcccattcaagcatcgtctcgttattgccatatgctttggctctaatctcagaattagatgtatcgccgtaaggacgaaaagcaatatatttcgcggctgctggtgctgtagtagaagctgacataattaatgcgccaatactaccaccttgggcctcgcgaattacagcaccattcttaaacgtgactactgggtcattatttccaacaccattaacaattaatccaccaaacgtcgcagtttgccctaaacctaagttaaaattgttacgagcatcggcggcagtattagccccagtaccgccagacgaaattggtaaaataccgttagtgtttgatgtagttattacttcttcccacggcgtccaattgacagcagtcgcagaagtagttcctgttccagcaccatatctaaagtaggttttattattacgtccagatataaatgtttgtttattacggaaatctacaccagctgctgatctcatcttttcaacgataagaatgaaatcacctttcaaattagttaaagctggaggcattccagtaatatttgctccaggtccttgagctaaacacgaatatactctacgagtgccgacatcattagagtctaagaaaagatcatcgatagataaagttcttccaccaatgtcttcagcaacttccgggccaagataacctccggtcatgttaactctaaccattccaatgctgttttgatcaaatactaaagcattatccgtctggttatcaccggttccccaacgaagagttccatctttagctaaaccaagcttgcgttgaagaattggattaacaccagttaatctgaacgctattgataagtttgcatcggtatttctttcaagaactaccggtgtatgctgaacgcctttaatgtatatagcctgggctccagcatttgtatcagattggtagacgtttaatctaccggtcatggtgtcacccgatttggatactttgctattagcagttccggttaaattacttaaataattgtttaagtttccaccgaataaagtaccaccaacgatgtttccatcagtctggaacgtcacagctttagatatgtcagaagggaataatactaaatccccggtgtttctaatttgcgccagatgacgcatgttgctagtattaccttcatagttccaaaaatcaaatccgccttgaacgtttgcagaagttgaacgatggttaataaaatcagtacgacctgacccgttttctttgttccaagatacataagcaccctgggatggaggaacaaatgatgcgccgcctccagacagttttaatactctacctgagacagtattagcagtaatatcaccattaactgtaatacttgcgccataagtaccgccacgggatttagatacgaagtcgttatcatcggcattaggtttatttgacgttccgtaaagcatgttatagcttactttaccatctgccaatccgcggtcatttatagcaaatactctgacattaccagttgagtaatctatattaagcgcagacattgtatcgccagttctagaaaagaatcctgcgccatgagaataaaaccctgggccttcccacacaggcttgccatctacggttttaacatttgctctaaatgttgtaccgccaatagccttaaggcgagtcattaaatcaacgtcagaagtaatatctactactgattttccgttaccaccaataccgaaggcaccaacttccatcacatttccgctagattcaccgacatcacgaacagccgcagttctaagacccaggttgtttcgggcatctcctgcgttagtagcacctgtaccaccacggttaaccggaagagtaccggtagtatcgccgaaatctggttttgctaaactatcaaaaatctgtttcattgaaacaagaatacttccagatggtgcagtagcaccagtatcttgaccagtttcgtagataattactctaccgttatcttgaccattatatccagcagtgtttagtactgtaacataaagagagttaccataacgaggaaacttagcataaaaatcaaatgacgcatccgcatcggtagcagcatcatttttaacaacgtagtactctggaacgtttgttttagacggagaaccgactcgacgccattcaacccagttatctaaattgctagtgctccaagatgttaaattgcgaccagataacgtgataaaatcaacgtaatgtcttccgtgcccagaatcaataccaccactaatcattaaatctagctgtgaagacccatctcctggatgcttaactgtagctattttaacccagcgagctgatgctgcggttgcagcagaaattacgtattgccatgcttgacggttgttttctacattcgtcagaagagtgccggatttaccaggacctcttccattcatggcgtaataaacctgtgaatttctgaacgtaaggttactgtcattggttaattgaagaacaccagttcctctcaggtttttaatgtatgcgtcattagaacctacacccatttccaaagtaagagtgctgccgtttgaaatttttactgttttactagttaaacgaaggtccccaggtatagaagtatcgccaaacccatctaataatgctaaacgacgaacttcagcttgcgccgttccaccggttctttgaacaaaatagataggttcgtttccgttatcatacgtaccgatttcaagaaatccctggtcagatgcgccaccagctccaatgtaccagccatcgttattagcacacttaccggtgatatgacgtactaatgctccgcttaaatccgaagcttcaaaattgatagctttattcggagaaatagttacattgtcttttaacgtagtagttccatcaacattaagattacctgaagtatctaagaaaggaacccctttacctgcaagctgaacaacattatcggcttcatctttagtgtaaatggcaagagtacgcccatgtgtattcaacactatttcgccacgggctacgatatctgcacctggtgctttattctctgtgctagttcttttaaattgtatttgttttaagttttgatcggccatggctacctcttagtatgtgccaaaatctattgttaccccgcgtgaaataacctgatctaatctaggagcatattcaccggatgttgctttatttactataactacgccagcgttagctctaagtacaccggtcattgtatcaccagctttcttgactgctgcgttagctacgttgctaacagtatttattcgtccatcgacataatctttgcgggttaaatgctgagcggctgttggagtagaagcattagcaataacttgggaacctgaaacaatatcaccaaccgttccgatagtaccacgcctagcactgaaccagattgtacgcccctggaccccatcacttgtacatgagttccaaataccgatgccgtaccatgaacgcaaatccatgttagctttttctctggtatcaccatctccgttgccagaatacagcccattcagatttgaaccaccagaaaacgttgcggaaatcttaacgccagctttaaattcgacttcttgttggaaaccttgagaacctgtgccaccgttagctttagatacgaagtcattgtcatttgcttgaggtttatctatctcagtataaacctttttacctctataagttagggagtttcctgccggcacaagaggaaaagtacccgcgtgccaaataggatttccaccaactgttgaacctgcttttaaatcggccatagtttatcctcttatatattttctatttatacgaaaaaaggaagcccgaaggcttccttagtctgatgtttctctgaacgattgaactggaataacaccgctcggatcgacttttgaatttggaagttccataatcatagtggttcctccttcaacgcctttattcattcttacgccattcacgccaaattcttgaacaacactgttaagtttttcgctgtgagaggtttgaacaaatacaaggtttttgattttagagtcaccaactacagacgtttttggatatcgtgataccacaatagtaaatccatcagcgtccgtaggaacagcggtaaatctttcaaatcttagccatctatcagctccattttttggaatttctaatgatacgcttgaagataataaagatgtacctttgaaccatcgcaagctagctctagttgtagaacctgcatcaagaaggcttttagatgcatacatatcacatactaaaaatacagaatccccaggagatagtccataatcagcgattttgcttatagattcattttgaactggatatcgcttatattcatatccagtagaatccgagtattcattggtatcttcaatagaacgataaggacatccagtatatcctacatctccaacgttatcatatacagtatctactttagctctggaatcttctttgactacaccatcatttccgtaaaatgactcaattaatatacgcccttttgctgctccgagcactccaacataggcagagtttggaaatgatttggaaaagtcagaacctggccaagaagcagaccacttgtttttaaaccatctatctatcaacggactggattgaaatcgttcatgtgtcattataatatacaatcctgaagttaatccatttgcatattctacaaacgctttgttattagcgttgttatcatcagtggtaacgtcaaatgttttaaagttaataaaactattgccgttaacctgaacaacattaatccccctccgtaaggaggaggtcatatcaaaggcaccgttaatattcaattctggcttgttcggaacagcattagaatgtgtagcataagcttttagccaatacttcacagagtttgcctcagagaggattcgtgtttccacgaaatcctcgccgaaggctgccattaaaattggttcagccattaatcacctacccattcaaatttgagagtttggtttggacggtctggccagattttaactggaccaagcttaatccattccaaaacttcaagggttttaacctgagttgatactgagcttggagctccgatatcagctgcagtcggaggagtagcagacgtgaacactcgcatccaatcatcaaacttattaaggtttggattataaatcctcatccacacagtatgcgcgaaacgcttatccgcagtttcggttgtcggaggataaggcgtccaaagctgataagtattgtttgtagttacaccaacctgagttaaaacaccaccagctgcagttttttcttcatacccagtcactactaaagtgcttgggttagcagggtcaatcggtgttctgattggaaccatataaccgcgaagaccttttagtttagtagcgtctttaatttcagcagtccaagaaccttgtctcattacagtttcatttgttggaacataccatgattcagaacctgtaatgacgatagcagaaccgcttaagttaagattgccggtcatggtatcaccagctttcttaacataacgaccatcagctaatcttgcgtagtttttggtagttaaaattggatacgatccagttgaatcctgtgcaaaaatttgtgtatcagcgtcacgggaacgaataaatgcggactgtgattgggcaccgaatattgaattcaatccctcaacagcaagcatctgaacgtccttaaccataacagttccgccaactattgcatttccagaagacctcagagttttagttgatacttcattaggaacatctagtgtaccgtttccgccaaatgtgtaggtctggcttgcagcagtagttcctgttccgttttttacgcgaacttttaagtttccggctgaagccgtttgaggctcagcataaattataccacgctcgcttccatctctattctgaaaacgaacatgcacatttccagtgtcagcagttggagaaattttaacttcaccaccattagcatatataatattctggacagaaatattattgctaaatgaagtgtcctgactaaatgaccaagctccagaaatagtctgcgctatatcgcgacgagcatatttgtctggggtttgaccacctaacattcctgtgtcataggctttaccgagacgaggcaagtaatgtttcagtgtaaggttcaattcatacggagacactgcgacgcccttagaggcatacccgttatccggaagagttgagccattggtatcattacctttccacgttccatctcctgtagatagcctcacggtccctctaacgctgtctgtagcttgccatgactctgttacctgaatagtctgtttcaagtaagcaggaggaacaattctatcacttaatgtacctgcatcaacttgtgcttgtgtagcatactgagcaagaccgatagctccttcagttgctgttttagcatgtagcgtggcagcagtaactattttcttggcgtcggtgccggttctaacctcagcagcagtagcaagagtggttgtacctctttgagaagtacttgcttcctgtatgttgatggtataatggtcccagaggttcccagtaatagttaagccagaactagtattaacttggatacgatcagtattagcaaatttatcgaacagtaatttagggtttaccattactgtacttgaagtaccagcttcaaattcaccctgggcaccaggtgtcgcgaagcgagcaataccagtacgatcgttagttgctgtacggtcatttaatgttttaggtgtaactgctttattagtcacgccgccagcattaacttcagtttgtgtagctatttggattaatccaattgctccgtcagtagcaacttttttatgcaaagcttctggtgtaacgactgtaggaatatttgaagaagccggagttccgtttctaacttcgctatcagttgctaaccaaactattcctgactgatttacagtagctttatactcgcgaagagtttttggagtaactgcatttttgtaatcagaatgatcgaatataccggtgccagcagaagaacgatcagcagttgtgttaggagcaccaccagtttttactaactgaataacacctaaccgtgaatccgacgtagtacgataaagcaacttcttaggagtaacaattgtaaaatcatctgttcctgcatccattttagcattagacgcaatttcagctaaacctctacgagtttcagtagcagctctttcgttaagctttttaggagtaacgattacattatccaagtaagaagcagttgttgactgattaacttcgctggaagttgcaattcttgctataccagtttgggtttcagtagaacgacgtccatttaaggtttctggcgtaattgctaattctttttctggatttgactccgcattagcttgagcctgtgtagcaagagcaataacacctaatcgagctctagttgtattgtctttagcatcaactcgttctacggtagggtcagattcagttacaatccaatagctttttccggatgctttatcttcaatatatgcaagcccaagaacaggaacatacgaagtagttccgttaaaggtaattgagcttgattgcacccatgctgcatcaggtggatactctgagcgttttggaaattgcagtaaattcaaattacttgcgatggtatcaccatcagaagctttaattactacagtctgtcctttgcgcatgtaattcattgcgattgtgacagtatccccaacagctacgtctgtaggcaaagtaacgttaattgttttaacggtattgttatctgcgccaaatacagaaatatgctcattaggcattaaagtaacatcagaagtaattattcttactcgggtgcgtaaatcattttcaaaaatacgccagattttgtcaatcgagtcatataccaaaaatccggtgcctgaagtacgtacttgaacctctgtttgtccaggagtcccaattgagatagttgggtcaaacgtacgcacagtcatatggttaatcggcgatgtaccatcaaggtcagtaaaattgatgatatcgtttgaattagcgaacaacggcagagtaataaaaatctctgagttggaagtataacgacgaactacgttatcacctgcctgaacttgcgtcggaacaatcccgttcggaactaccatcttggcagtatcgccaaaatcggttaaacttgcacgccatgcaccattactaaacgtaagcataatttgtgaatacggacgtgtaagtcttacctcacgcagacgcgattcaccaaatacgatagacgcaccagtatcttgtgctttaattaagattccgttatagccaggacgcccgccaatatcacgaactacgatagtatcgccttcatctggtgctaacggaagcagtaatgtagcattaccggcagcgttagagtcaacgttgatgaactgaccagattgaatttcaaactctcctttacggacggtataaatccagttcgggtcaacacgtaaagaagtccaattcgcctggttaaaatctccagcaggctttggaatatctttatttgcaatccagatacgacgtccataagtcacagcaaaatcagtgagatacccacgtgtcgggtcatatttttggatagtgttttcttgaataacgtactcgacggagacgccgtcggttttaacgttgcggtcagctagtgccacatttataactttatttccgcctgcgtccaagccgttcgttgcacggaaatgttgtttcagtaaatcgctcatagagtctcctatggggttatgcttcattatagaagtatttataatggctgtactaactaattgaacgaggttcaaatgtctgatttaaattgcttattcgccgaagaagaccaagtaaaagaaggcgtcattctgattgacttgtcgcaaatcgcaatggcgacaattcttcatacgtataaagaaggcgataaactaaccactcctatggttcgtcatcttattctttctactttaaaatttaatgcttttaagtggaagaaggacggatacacaaaaattgtcatttgtgttgataatgcaatcaatggatactggcgccgggatgtagcatattattataaaaagaaccgtgctaaagcccgcgaagaatcaaattgggactgggaaggttactttgaaggtcttcgtactgtaattgatgaatttaagcagtatatgccttattacgtcattgatattgataaagcagaagctgatgatagtattgctgtactgaccaaaaagttcagtctcgaaggtcatcctgttatgattgtttcttctgatggtgactttactcaattgcataagtatcctaatgttaagcaatggtcaccaatgcagaagaaattagtgaaatctaaaaccggctctcctgctttagattgcatggttaaaattattaaaggtgacaagaaagataacgtcgcttctattaaagttcgttcagatttttggtacactcatgttgatggtgagcgtactccttcaacgaaaatgacatttgttgaagaatgtcttgatgctggcgaaaacattaaagacttgcttactgaagaacagtataagcgtttcttggaaaaccgtgtgttaatcgattttgattacatccgcgaagacattgttgctaacattttagattgttataataactatcaactaccgggtcgtggtaaaatttatagctactttgttaaatccggtctgtctaaattaatgaaagaaataaacaacttttaaggtgaatataatggctaagaaagaaaaagagcaagtagtatttgatgaagcagtacacggacaggctctgcgagatatgattaaggaagcctcaggtaataagctaaaagcagaaagctatcttgagcttaacaaagacattaaagaccgcgccaagaaagagcttggtgtagaaggcaaattatttaatcagctgcttgccctgttccataaaggtacacgcgatcgttacgaaactgaaaaggacgaagtggtagaagcttatgactctattttcgcttaaagacgagggggacacatccccctccgaatccattaatcagctgctagataagcaagctaatggattcgctattgaatctatggtaacagaacttggaatgggatatctcgaggcaacgacacaatggctagaagaaaattctattcctgagggaaacttcagcagatatattccacctgcaatcatagaaaaaattatgtcagaagcgttagaagaaaatatgcttcgaccatcatttagtcaaacacataaaacgaatagtctggattttttattatgattcgtctacgcatgccccaaaacaataatagatacgttaacggtaagagcgtttatcttttatatttaatgctcaaacaacacttcgctggtcgatatgatgttgttaagtataattgggtcatgcgtgtctctgataaagcttatcaaaagcgcagagacaagtatttttttgagaaacttgccgagaagtatacgctaaaggaattgactctgatattcatgagcaatcttgtagctaatcaagatgcttggattggtgatatcagtgacgctgatgcgttgatattctatcgtgaatacatcggtaagttgaagcaaatcaaaactacattctctgaagacgtaaagaatatttactactttgctaagaaagttaatgtagataagcttcatgatatttttgaatataatgagaaagtcggaacatcttatgtgttcaaacttcttcagtcaaacgttatatctttcgagacattcatcatgcttgactcgtttttagatataataaatacacatgatactgcaacggataacttagtttggagtaattactccactaaattaaaagcttataaaaaacttttaaacgttgacggtgctgaagctaagaaactctttattagcataatcaaatcttgtaaagaaattagtatataattaatctatcgtccagttgcaaggacccatgttgcaacaacaactgttaaattaaaaaggtaatcatatgttcaagcgtaaaaatcctgctcaacttcaacaacaactggctggtctgaaaggtggttcttctttctctaacgaagataaaaacgaatggaaactgaagaccgataatgctggtaatggtcaagcagtaattcgcttcctgcctggtaaagatgaaaactctctgccgtttgtaaaactgatcaatcacggtttcaaacacggcggtaaatggtacattgaaaattgtacttctactcacggtgattttgattcttgcccggtttgtgctcatctgagtaaaaacgattcttataacagcaacccagctgaatataagcttctgaaacgtaaaacttctttctggtctaacatcctggttattaaagacccggctaacccagaaaacgaaggtaaagtattcaaattccgtttcggtcagaaaattatggacaaaatcaacgcgatggttgaagtcgatgttgatatgggtgaaactccggttgatgtaacttgtgtgtatgaaggtgcaaacttcgtcatgaaagttaagaaagtcggtggtttccagaactatgatgaatgtaaattccttggtcagtccgagattgcaaacatcaatgatgaagaaactcagaaattcctgaccgaaaatatggctgacctcagcgaaattgtggctccatctcagtttaaatcgtttgaagttaacgaagccaaatttaaacagattatgggtacagcagctcttggtggtgccgcggcaaaagcagcagctcaagccgataaaattggtgatgacctggattcctttgacaaagacctgtctgattttgaatccaaaccgacctcttctcgttccgcagacgatatcatgggcgatgctggtgacagtgttggcgatgacgatctgaatgatattttgaacgacctctaatataaagggaccttcgggtccctttttctttatcccctccaaaaatattttcacaaaattgtttacaagccagttgatgagtgatactatatctacatcgaaacaaaacgagtagaggaaaacatcatgggtaaattaaacattgatatcgtggcagaaccttacatcaataaatcaggattttgtactgatttgatttttgaagatggttcacgtttttatgacactgaccatggtattgattttgatttagttattaaagaaggccctggtggcggttggccaaatattgacctccgtggttctaaagaagcagttcgtgcttggttagaagcaaacgagtgggaagatattgatttgatgatggaagactggaaagagtaattacctttggggacttcggtccccactttgaggaaatgataatggcacaggttactgtagaaatatatgattatgaacatttcattgaaatcattgagaaatatggtttgattgaagttagtaacaaatctgccccatggggaggaaacgaaatcacggtagaaggtgatactcctactttatggttatggcttgaacaagaatattttcctggcatggatgacgaatgccgtgaagacacattaacgacttttagtgagtaaattatgaaactgaacacagaatatcgcattatcccaagtcttgctgccgagtgggacctttcatctagcggaaatcgccggatgcgcttgatgattgaagagcatggtggttcgttctttcctactaaaatgctcgacgaagataatagtttcatcacagaagtaaaatttaaagatggaacaactgctgacgctgaaggatttggagacgcatactttgaaatctctgattatgaattcaaatacttcgaaccagtatatgaaattggtagtgcaatccaacccggtcctactcgcttggacttgatcgttacctcagaaaatgcagaagaaatgattgacttgatcaaaaaagttttcaaaaagtagtttacaaggagctatgcttgtgatagtatagctccataatctactggagaataaaaatgaaacttcaacgtcaaagcatcaaacttggttctgaatatcgtggtaaatggaatttctgcatttgcgataaaaacccagaagaattagagcgtgttgaagaagtgctgtgccaaatggaagctccattcactatgggtggtgaaactgtctattggaatgattactgtgataactgcccatgctatgaagatgggtatggctcaggcttctggattcctgttgaagatgttgaagaattcaaaaaagcatttaaacttgctaaggccaagaaatgattgaggctgaattagtagttttgctaatttctgttactgccgcttttattagcggcattatactaggattatttttatatgcctaaaattagtgtaattggatatcctcgcgttaatattcgctgccaatttgacgaaatccctggagtaactcatattgagctcgtatttgaccctcattcgcgatgcaatcaggtttcaggtaaaattgattcagcgtatggcgaatttttaattaatgaccaggtgattatttcagctctttctggcaatcaagcgggttcgttgtatattttgaaaaaggaagtatttgaggaaatttcagaagccataaaagaaggatttaaaactcttcagaacatgattaaagctagtgggtacaagtcatgtggattttaactgactgggattgtaagtactgtggtggtagcctatggcaattaggtggccggtgttttaagtgtggaatgaggcaaggttaatggaaaatttcgcagtagatgattatgatgatttgatttggtgggatggccgcgaatgggtaactatctgcgcaatgtctaacgttgatagtgctattaaacgtctacaagagcttcaacagaagtgggaagacggcaatgttgaacgagttgaattttgctgaggtttaaatgattcaaatagtttatgcctttgctcctacaaaaactgtagacggcaaaaatgaaaatgctttcggtttaggcgatggtcttccatggaaacatatttctcaggacatgaaaaactttgctaatcgtactcgagatactatcttgatttgcggagcaaagacttttatgagttttcctaaacctcttcctggtcgtaagacaatcgttgtccaagacatgagtcgtgcgttggcaactgctaaaaatggcttctttgcagatgcttatgtaagtgaattagaatttatcggtttcttgggtggtgacattatggccgctcatacttcttacaacagcactatcacttttaatagagaccttaattattctatcataggtggtgccggaatcatccagaaggcatatccatatgcagatagggttatccaaacaaccatcagaaaaagtcatagagtgaattctgatgtcactctacctgctgaatttgtagcagctcctacttgtccagaatcaggattcattactaaagaaaatcactggtatcatattgatgaagtgactaacatttcagaggtggtctatgagcgcaaactatgatatcactcagctatcagaagacaaagcccaaaagaagtggaaaggatttccatttaagcatggtattcatcttctagtttttagttataatggtcttagcacttataacggttcaactacagtatataaccgaaatggaaatatacctattgaaattgaacgtgattataagaagatgttcatcggaatgtcacatggcaatgtgatggtcaaagatgatgtagtgtctattattgggcgatttgaaaagcgtggtaatcagcttttctttacacctcttcaggaaaaatttaatgcgtgaataccaagaattaattaaagacatttttgaaaacggttatgagacggatgaccgaactggtaccggcactattgcgaagttcggcacccagcttcggtttgatttacaaaaaggatttcctgccgtaactaccaagcgtcttgcgtggaaagcgtgtattgcagagttgatttggttcttgcaagggtctactaatgtccatgaattgcgtcttattcagcatggttcattactagaaggtaaaacggtctgggacgacaattatgaaaaccaagcaaaagacatgggatattctggtggtgaattaggtcctgtgtatggtaaacagtggcgagatttcacgggtgttgaccaactaaaattggtcattgaccgtatcaagcaattgccaactgaccgtcgccagattgtgactgcttggaacccggtcgatttggataaaatggcattaccgccgtgtcatctgctttatcagttcaacgttcgtaaaggatatttggaccttcagtggtatcagcgttctgtagatgtattccttggtctacccttcaatattgcgtcatatgcagcactagttcatatcattgctaaaatgaccaatcttaaacctgggcatttggtattcactggtggtaacactcacatttatctgaaccatattgaacagtgtaaagaaatcttgcggcgagagccaaaagagctgtgtgaacttgaaattaattattggcctccagtgaaagataaagaatttcatgaattagcaacagaagaacaattagcttgggttacaggaatgatgaaaccatctgactttgttcttaaaggatatgaatctcacccaacaattaaaggaaagatggcgatatgaatattcgatttgttcgtaaaggacaccagtctaaaacaatattaggcgagatgtgtgatgcattctctagtgatttgcctgaagttaatgacaagatagtttttgacgggaccgaacaaagggttctgtctattgttaaatcatatgaatggtctataggcaaaacacaattaatctgttggtttgaagttgatataacatgaagatatgtcgggtggttaataaataccattccgacttcgatgtaaatatccaacgcggaacaatgtggggaaattacgtcggtaaagattgcgataatcgtcctgatgctattgctgcgtttaaggacgattttattgctaagattcggaacggagaaataaagcgagagcacttagaaactttaagaggaatgagattaggatgcacctgcaaaccgcttccttgccatggtgatataatagctcttgtagtgaataaactttttaaagatacatttgaattagaggacttatgcaagtaattaagagctcaggtgttagtcaagaatttgacatgcagaaaatcattaaagtcctcgaatgggcgtgcgaaggaactaaagtagacccatacgagttgtatgaaattattaaatcccatctgcgtgatggcatgagcactgcagatatccagaagactatcgttaaggtagcggcgaatagcatttctattgatgagccagattatcaatatgtagcatccaatgcagcaatgtttgaaatccgtaaacgtgtttatggacagtttgaaccgcctgcatttattgaccacatttcccgatgcgtcaacgcaaataagtacgataaagaaattctaagtaaatggtcagcagaagaaattactttgcttgattcttatattaagcatgagcgtgatttcactatgacctatgctggaacaatgcagcttatcgagaagtatctcgtaaaagaccgtcatactggtgaattgtatgaaactccacagtttgcctttatgctgatcggtatgtgcttgcatcaagatgatggcgaaaatcgtttagcaaacgttattcgtttctatgacgcagtttctactaaaaagatttcattgccaacaccaattatgtctggtgttcgtactccgacacgtcagtttagttcatgcgtggttattgaaggtggtgatagtcttaattcaattaacgaagctgctgcatcaattacgaaatacatcagtaagcgtgcaggtattggtattaatgcaggcatgattcgcgcagagggttcaaaaattggattcggtgaagtcaaacatactggagttattcctttctggaaacacttccaaacagcagttaaatcctgctcccaaggtggagttcgtggcggcgcggcgacactgtactatccaatctggcacttggaagttgaaaacctcctcgtacttaagaacaacaaaggtgtagatgaaaaccgtattcgtcatttagattatggtgttcagattaataacctgatgattgaacgcttgattaagaatgattacatcactctgtttagtcccgatgtgtgtcttggtactttgtacacagaatacttccgtgatgctcaagcgttccgtactttatacgaagagctggaaaagaacccagacgtaagaaagaaacgtattaaagcccgtgaactgtttgagttgttccttactgaacgtgctggtactgctcgaatttacccgtacatggtagataacgttggtgaatatggtccttttattcgtgatgtggctacggttaagcaatcaaacctctgcctcgaaattgcgttaccaacttcggatgttggccaagaagatggcgaaatcgcgctgtgtacactcgcagcattcgtgctcgacaacttcaactggcaagaccaagaagaagttaacgaaatcgcagaagtaatggtaagagctttggataaccttttggattaccaagattatccagtagacaaagcgttaaaagctaaagaccgccgagcattaggtgttggcattactaactatgcagcttggttagcaagcaactttgcttcatacgcagatgctaatgatattacccatgaaatgatggaacgtattcaatatgcactcatcaaagcctccgttaagcttgctagcgaaaaaggtccatgcacgctttacaaagaaacacgatacggacgtggtgaactgcctattgactggtacaacgaaagaattgaccaactcgcagctccaaactatgtctgtgactgggaactcctgcgagaagacctcaagcgatacggtatccgaaattcaacgttatctgcgcttatgccatgcgaatcgtctagccaggtatcaaactctaccaacggtattgaaccaccacgtggaccagtgtcagttaaagaatcaaaagaaggaagcttcaaccaagtcgttccaaatgttgaacacaatgcttccctttatgattatgcctggcagctcgcgaaacagggtaataagccttatctgaaccaggttctgattatgcagaaatttgtagaccaaagcatctctgctaatacttattacgacccggcgaatttccctaaaggcaaggttgaaatgtcggtaatgatggacgacttgctttatttctggtactttggtggtaagactctttactatcataacacccgtgatggttccggtaacgatgatatgattcaagactctgctgactgcgcggcctgtaagctttaataaaagggaattataattagaccacggatggttaacaccacagaataggaaatagaatgagtacagtttttaataccaagcaagtagatatcatgaccgaaccgatgttctttggttctggtctaggaattgcacgctatgatattcagcgtcataaagtattcgaggaactcattgagaagcaattgagtttcttctggcgtcctgaagaagttaacgttatgatggaccgtggtcagtttgaaaaactcccagaacaccaacgtaatatcttcactgataacttgaaataccaatctcttcttgattcaattcaaggacgagctccagcagcagttttatctgcacttatttctgacccaagcctagatacttggaaccagacttggacgttcagtgaaactattcacagccgttcgtacacgcatatcatgcgtaacctgtatgtagacccagctaaaatctttgatgaaatcgttcttgacgaagcaatcatgaaacgcgctgagtcaattggtgtttactatgatgatgttatagcgaagactcgcgcatgggaaaatgccaaaaatcgctgctttaatcaagataatatcgaaattaaagaagctaaacgtgatttaatgaaatctctttatctttgcttacatgttattaacgcattagaagctattcgtttctatgttagttttgcatgtaccttcaacttccataaaaatatggaaatcatggaaggtaatgctaaaatcatgaagttcattgctcgtgatgaacagcttcatctgaagggcacacagtacattctgcgtcaacttcaaactggcactgatggcgaagaatgggttgagattgctaaagagtgtgaacaagaagcaattaaaatcttcatggaagttaaccgccaagaaaaagattgggctatccatcttttccgcaacggtggtcttccgggactgaacgttaaaattcttcatgacttcattgactatctgactgtgtctcgcatgcgtagttgtggtcttccttgtcctattactgatgcaccaactcgacatcctattccttggattcgtgaatatcttaactctgatgcagtccaatctgctcctcaggaagttgagataagttcttatctggtagctcagattgacaatgatgtcactgatgatgttctaattggatttaaaaagtacttataaggaaaggggcttcggcccctctttattatgaatgatattgctaacgagttttcttttataaaatatgttcaacttgagttagaaccagattttaccatcaaaccaattttgatagcaaacaagttgaatgtagtttatgccatcgcagttgatgatgaactagtttacattggtaagactaaaaatcttcgtaaacgtataaattattatagaactgctattaatcggaaagaccaaacctctgattcggctaaatctgccaagatttttgaagcactaatggctggcaaaaaagtagagttctatgctcgtcagtgttttaatcttttgattaataatgaacttggcgagatgtcaatatccactatggacttggaagaaccgatgtttattaaaaagttcaatcctccatggaacacacaacataaggtaaagaaatgttagagctatataaaaatttaatgaatctgtgtgaaagctcagaagttgcaaaattcttttataaagattttaccggtcctatggatggtaagttcagagtgttttcatatcactacgcaagctacagtgagtggttaaaacccgatgctcttgagtgccgcggtatcatgtttgagatggatggcgataccccaattcgaattgcttctcgtccgatggaaaaattcttcaatttgaatgaaaacccactaacgatgggaattgatattagcgatgtagaatacattatggataaggctgatggctctctagtatcatcttatgttgatgatgggtatctataccttaagtcaaaaacatctctctacagtgaccaggcaagacaggcttcagctttgcttaacagtgaagaatattcttcgcttcatcaggttattcttgagctagcgctagatggttatacggtaaacatggaatttgtttcacctaataatcgtgttgttttagcatatcaggagccacagctgtttgtgttaaacgtccgtaataacacaactggtgagtatattaaatatgatgatttgtacgctaatgctaaaattcgtccttatttaattaatgcttacggaatttctgaccctactacctgggttgaaggtgttcgtgaacttgaaggcgtagaaggatacattgcagttctaaacactggacagagatttaaggttaagaccgaatggtattctgctcttcatcacactaaagactcaataacgtcaaatgaaagattgtttgcgtctgttgtatctgcaaactctgatgacttgcgttccctttttgctggagatgaatacgcaattaagaaaatttctgcgtttgagcaagcttatctagattacctcagaaagtcacttgagctatgtcagtcgttctacgatgaatacagaggtcgtgctcgtaaagactacgctattgctgctcagaaagcaacggttaatcagcgccatctttttggtgttatcatgaacatgtacgaaggaactgtagatgtagataaactgcttaaagacctcgaaaaggtgtttttgaagtactgggcaggatatgttccaaaagagtacgaaaaagaaattgaaatttctgaagaatagttgtttacatcctcatcagagtgtgatactatagacttatatcaactgatgaggatattgaaatggatatgcaagcaattactttagatatggttgttaacaaatatggtactcattctgatgggatttttgtgtggaatggcaccaagaaggtggggttcgtcactgacctacggacgcacatggcgcgcaaggaagctgctcgtaagaagcaaaaagagtacactaatcgtgtgaacgagcagcgtgccgaagcccttcctgaagccgtagatgaaatgattgatttcctagataatcatctcgcgaagtatggtgcagaggtgttcaagaacatcacccagccaaacgttcatgctaacggatgcaaatgctatgtaatcgttgacccgatttatggcaagcatcgtcttggcattatgcatcgcgagctgaattattctgagatggcagaatatgtagaagcttgcttcaagtgttctccttcggaaagttctgatcgtcacatcctcatttcgggattatcccgtgatgatatcgtagaggttatccttaaactatgctcaaaataaacacaacttggttgatgattggagtgttagcattatccgccgccggattgaaatatctttcgtggcgggtagaaaatcttaaagctgacctcaaagttgttcaagacgaatctgatcgacaagcaaaagaaatagaaaatatcggtgtttctataaaaaatctgcagacaacatataaaggctatcaggaaaaccgagcggctcgtgatacttctaacgctaagatgaataaagattctaagcgcggaaacatagttgcagctaaacctgggttagttgaaaaacagattaacgcaagcttcaataagtttgcagaagatatccaggaggctaccagatgaaacgaagtctattagccatgggtattatcagcctacttgttggatgttcttctagtgcaccggatgtcccggttttgcatcctgattggccagacccaattcaaaaatgggaaggacattgggaagtaaaagtaattgacggtaaagcctgggttggtatgccgtttgaagagtctcaagagtatcgcatctggatgaatgacattttacgttatactaaagatgctaatggaatgatatgttattatcgttctgaccttaaagaacctcgttgcgttaagtgatggtattataatgaaccgagagcagtatgaaacacttaaagggttaattgctgaaaatgaattggcgtgcatcgtgtttggacgcgcagctgaaaattatgacaaaaatgatatactgtcaatgaataagccattgcgagcaattaaagaaaaatatcgtgctaattggggtgaaaagtctaaggctcttcatgattttattgacactcttaaggatgtataatgaaaaaattggttttgacacaaggggctccaggctctggtaaaacaacctgggctaatgaatacgtagcagctaatcccggttggtatgttttgtctcgtgatgatttgcgtgaaggcatctttggccttaataaacgtaatgattacaaatattctaagcttcgtgagaagtcagtatctgtatgccagttttctatggcgaagactctactcgagatggaaaccactaaaggtgtcatcattgctgatactaaccttaatccaacgactatcaagaagtggcaagagctggcatacgaaattgatggtgtcaagtgggaaattaaacgctttgatgttccttggactgaattgcttaatcgtaacctctatcgtggcgcgaatgcagttcctattgaagtgcttcgtagcttctattctaagatgcacccatatgatttgtacattccagacgaatcactgccaaaagcagttatctttgaccttgacggcacgttagcagataacaatcatcgttctccttatgacttggccaaatgtggtaaagaccatccaaaggaaatggtaattgaatttcttaaaatgcttcgtaacaaaggatataaaattcttaccgtttctggtagagagtctggtactaaagaagaccctactgtttatcagcgtattacgaagaaatggctgttggaccatgttggcgaaactggcgaacacttccaacgtaagcaaggcgattcacgcaaagacgatgtggtaaaagaagaaatcttctgggaccgaattgctgatcgttataatgtaaaacttgcagtagatgacagggcgcaggtagttgaaatgtggcgtcgtatcggtgttgaatgctggcaagtagcccatggtgatttttagaggaaagtataatgtttccaaagtattctgaagtagtaaaagtatcatttacgcaagttgttgctaatcatttaacagatgagtttactccatctgaagtagccaaaatgcatgcagagtttttatctgccatgaatgcacttattccaaacggcgaagttattaaattttctattgaccggtcaggcggctcgtctgaagttaaaatttcttgtggcgaaggtgaacacgactggtttatcgttggaattattgctaattttgaaacccaacaggttgagacttatgttgtctgacgctaaattttcacatgatgaatttatttcgaaggttaaaatcttcgcacaggaagtagcaaaccgggttcctggaagtaaagtgactctccgacgagagtcatcctttaactatgtcgatgcttatatcattacagttaataatggaaagagcaatcaacatactcaattggctttaaccggaacaggccaagttgaaatgactaacattttaggacatatctaatgactttacgtgaagcggtagaagctcttttaattgaacatgctcgtggcattaaagcagaaattagccaaaatggtattcgtctaattaatgctgttattggttctgaccaaggcgtttggtcaattccacgcgaagaatatgatgctattttgtacagtaacgttgatgttaaggaaggccaacctctttatggctatgtcttttccgatgttcttgaacgaggaaatcatccgtttccagatggcacaggcattcgtacttctcgagtagagagttttgcttctcctactgacgagttaaaattggttaaaacaaataacacaacttatctggtgatttaaatgaaagcgtcgacagtactacaaattgcgtatctcgtatctcaagagtcaaaatgctgctcgtggaaagtcggcgcagtaattgaaaagaatggacgaattatttctactggctataacggttcaccttctggtggtgtgaactgttgtgaccatgcagcagaacaaggttggattggtgaaattccttacaaatctacgggattgcgtcaagacggattccaagtcaaaaaagtcggattgctcaaagaacatcgagcagcccactctgcatggtctaaagtcaatgaaatccatgctgagcttaatgctattctttttgctgcccggaacggcagtagtattgatggagcaacaatgtatgtcacactgtctccatgtccagattgtgcaaaagccatcgcccagtctggtattaaaaaattagtatactgtgaaacatacgacaagaacgaacccggctgggacgatattcttcgttcggctggaattgaggtgttcaatgttccaaaacgcaatttggacaagttgaactggtataacattaaagaattctgtggaattgaataatgaaactcagaattgtagaagttaataaacttaatctaagtggtgatgttgttatatcatactcagtagaacgctggtattggtttaaatggaaaccattagcaacatttaaatttgaagaccaagcagttcgattattaaaagaattatccaagcgcaaatctgtaattatcaaaactattaaagagacatcaaaatgaaactgactactgaacaaaacatccatattcgtgaaactctgaaggctgtgctgagcatgggcgaatcccagattgtgtttgaaaaagctgatggtactattcgtactctgcgctgtactcgtgataaagatattattccatctgatttggtagaaagtactactaaatctgcccgagcagaaagcactacttcacttccagtatatgataccgagaaagaaggttggcgctcatttacctttgataaacttatctcggtaaatggtatgaaagttgagcatctgctgcagatgatcggtaagtaatttgctttaaactgaccatgttaatataactacatggtcaaacaacaaaggtaacacatggaacttccaattaaagctctaggcgagtatgtaattctcgtatctgaacctgcacagcaaggtgatgaaattgtttctccttccggtattattcttggaaaagaagaacaaggacaactgccggatatgtgtgaaatctattctatcggtgatgatgtgccgaaaggatttgttgaggtaggcgatttgactccgttgcctgttggtaatatcagaaacgtacctcatccgttggtagcagcaggtgtgaagaaacctaaagaaatccggcagaagtttgtgacttgtcattataagtccctggcatgcgtatataaataataatatgaattgggcgtcggaaattagttaaccgagcaattctaagcggtggatgcccgagctaaacctcggttaccgtccaccaaattttaacctcatttgaggaacgattcaatgaacaaacaacttactaaagctctggaactccaacgtaatgcatggaattccggtcacgaaaactacggtgcttcaatcgatatctatgcagaagcactggaagttctgaaagggtttaaacacctgaacccagcacaagctgaatttcgtgatactttagaagcgatggacgaactgaagtatgctaagcatcttggttctgctgctcgcaaagctgttcgccactttgtggtaacgctgaagtaatttgtacgcccaccatgtgtacgcatgggtaacgtatgatgtggacgttgttggttatccccacgtaaaacatccgaaaccaacggtgatttgctaccaaagtgcagctagaaataaacggcaagtgcatgctaccccgaggcgatggccaatcgggagtacgcctcaaggcctatacatccatcggtgtatatcttatccctgagaaatcagacccggaacctttaagctaacggtgtgcaacagataagagtttaatcgtacccttaggggcttgagggagctacaaccgaaagaactgtcgaaagaagttgaacctcggaagaacgtgctcccatgtatttctccaaaatggaagatgataaaatggctaaacaagctaaagcaaaaactgcagtaaaagaagttgttggtacctctaaacgcgctggttacaagcgtgggtcgaacaagcgtatcaatcagacggttgagaaaatcatgcgtcgagctcgtgcggttcttcgcgatgatgcttctcattttggtaagccgaaagcataagttcagggactccttcgggagtcccttttttattttccacagaatgaaaaaagttgtttacttctaggctcaacaaggttactatagacctgtaccacccaaacggacaacggagaataaaatgaataccatcaacctgaacgcaactatcaagactaaagaccatgacggttacaaagctcaaactgtccatgagaaaatgtggattttgtctaaagttcaaggtgatatcgttccatgcatgacaccggacggtccatcagatgatttctgctggcatatcactttaacaaactggttcacaggttctgtatatgttctgaacactccagttgttggtcgtattcgttctgaaacttacacagatgaagaagacggttactcagaagatgtaacctggtatgaaaatggtcgtaatcgtgccgatgctttgattgaacaaatgaaaaaggtcggtaaattaaacatggataattggactaaacagtaatcttgactggggcttcggccccatctttgaggatatcaaaatgaattacagcaaaaaccgagtatattgcatttccccagaaacttaccgtagatggaaagacgctaagaacacaattaactatctcattgccactgttgttggagttcaaggctggacgccgttagaacttgattcgctgggccgggttgttaagattaaaaccgaaactggtaaaatcatttcggcaaaaactataggagatgaatatgaccggtctctgtcatgcttattttcttctcatgagttagaagaaggacgggttgtgcaaataggagcgtttgaaaatcaaagctctgatgatcgttatgcagtttttgaaatcccatcaacgttcgttaaacctactccagtggttaaagatgggcgtagtgtcttcactttaaaagaagcaaaagaaatcatccttgaactaaccgatatcgtccccgaaactaccaagtatgaactgtttaaaagcatcggatttgcagaagtaaaaactgttaaaactgtagaggtgaaaaatgtctgaagtttttgaaatgaataaaagctaccgtttgaccgaagctgcaaagaatgagtatctttcaaccagtagtaacgttaacaagcttattgctgaacgggttgaatgcatgccgtggacagttcatacgttaacggaacatggtaatgttaaatcaatcaaattagaaagcaccggtgaaattttaaacgcagatatgctaggatttagtaattgcatcatgtttactaagtacgagctccgaagcggaatggtagaagttaacgatgacggcagcgcgcaatacatcatcgtcggcggaaagaaagagagcgaatttggtattgttcgtggtgattacaactcaaacctgttcactcttgaaaaagccaagaaatatgtaacgaaagttatcaagcatgacccagaatataagttccagatttttaaactgcattctactgctcgagcagaaaaacaagaaataaatgtagtttttgaataaaagttgtttacttcttgggtggtctgggttactatagacctgtaccacccaaacagataaacaaactacggagaataaaaatgaacttcactaacttcaaccgcaaatacgtacagaacaatgcttgggacgtttctactactttgctatgggaacacaacaatggcacagtagctcaaatcgatatgtactgggaagataactacgtattcttcagctttgaaaatggtcctactctggatattcagttcaacggttctgaaatcaaagttggtttccatgatgaagttcgtaaacgtgatttatcttcacatccgtcttggaacacaaatcgtcaactgcttgttaagatttatcttcgccacatcctcggtcgtaaaacaaccgaagaacaacgtgaagcaatctgggatatcgtttcaaacgaaatcaagttttaactaactcggggcttcggccccattattgaggaaatgataatggaaaaaggtaaattctataagcttaaaaagactccaatcttgtctccaggcgctcttatcaagggtgtttttgagcaaatcggtaataatccgattaaaattaccagaacctttaaatatgcggaaaataccggattagttgaatttgaaatcattaatccagatggagaatgcaaacgcgttagtgtagatgaagttcgcttttctcacatgtggtgtattcttactaatcaagaatttcaacattattttgaagaaaccatcaacaaagaacctgaaccgaagaccgatgatggaagcaatgattggggcgtttggacctcaaataaaggaaatgatacctacaatggcggattaacaaaggaagaagctgttaatcttgcaaaagtacaacgcctgaatgcaactaaagatacaaaagttgtaatcatgcaaccttttgctgtccccgtggttcacgttaatattcgtccgttttaagaggaaattgaaatgattgtatcagctttctatgattcacgaaagaaaaaagttgaaaccattatcagcgatactcgcgatggtacacctgctaataaaaatggtgtgaaagcatacattgataagtattgccctcctgaatttcgtatggttgatggcgtagattctctgagcattaatgttataaatgctaaaattgaattcattaatgcaactatgccaattgggtattctgacagtgatggctcaaatgccaaaatgccgaaagaaaaattcataactaaattttgaggaaattaacatgattgtatccgtgcctaaatctaaagctggtattttttcttgcagtttgaaaaaccacccaatggttgatatcatgtcagctgatgttaaacaacacaccgttgagtatgaaattgatgctccggatttctttgaattgcccgaatgggcagtgagacttgatgcatgaaatatcatatcttcagtacagtaagattagcaaatggaattcctggagttgtatgtgatacggctccatccattaaagcctactcagttgaaccgtggtatgaagttaattgggttgatggcaatcgttcaattcatgcggaatctgagctttatccgattactcaattaagggctgctaacgacgatgtctattaatcctcatttcggtcatatggttgcccgacgtatcaccagggaaatgctaaagactgctgagtattataatatagaattaattgatatagaaccctcggacactccagggttaatctggttcaatttcaccggtgccgcaaatagcgttgccaaatttaaacaagcattgaggaatttccccgaatgtcaaagccagtaatcgcaaccgatgttgatggaatcatcgttaagtggcaaagtggtctgccttactttgcccaaaaatataaccttcctgtagagcatatccttgatatgatgactactgaaaaattcattaaacccgctgagctgtttgattgtgaagaagaactagctgttaagctgcttctgaagtacaacaacagcgattttattcgttatcttgctccgtatgctgatgctttagctacagttaataagctcaaagaaaaatacgattttgtcgctatcacggctcttggcaactcagtagatgctaaccttaatcgtcgtttcaatctgaatgctttgttccctgatgcatttacagaaatcatggtctgcgattatgatgaatctaaagatgctttactggaaaaggctaaagtaaaatacggcgatcgcatcgtctgttatgtagatgatttgcctaaacatattgctgccgccagcaaagtctttgaagatactgaaacccgtgtgttctatatgcctcgtggtgagcgagaaggttcagtgactgctcctggaattatggttgaagattggcatcaaattgtaacttgcctggaatctctgaaatccgttaagaaacctcagaagtctctttccggattgtgggaagaagctatcaaagaccaaattcgtaaagagcaacatccttttaattggcctccacggcaagttccaggagattggtggaaacaacctatcattccgtttagtcctggtccacatgttcctcctggaaacgactggtggaataatggtcgtattacatgtgataatcatcaaattaattgctaacactctgggtatggtataattgccataccctaggaggaaacatgtttgtagttcatactaaggttggtaaacgctggttatcatgtgattatggccatgttaatcagttttatcgttggaatccaatttggcgtgaagcgaagtcgtgcccgatttggaatgaatgcatcaataacgggtttgtttatatcgatggattaacttatcatcgtagcgtaagcgaactttcaaaagaattaggtgaataatgatttttgatatcatcaaagcaattgaagatgctaagggttctaaagctaaaacccaaattctcattgacaataaagataacgttgatttaaaacgagcctatctgctggcgtattccgggcgatttaaattctttattaagaaagttccagaatatactcccgttaaatatccaaatgttccttcaaagacgttttctgatggtctagattacctccaagacattctggcagcacgagtacttactggtaatatggcaatccaggggctagtagatttgctctctaagatgaacgagggtgatgctagtgtactagtccgtgtccttcttaaggatatgcgttgcggcgcttcaggttctattgctaataaggtatggaagaaattaattcctgagatgccacagatgttagcatcagcctactctgagaaagcgctatcgtatattaagttccctgcatttgctcagcttaaagccgatggagctcgatgcttcgctgaaatccgcggagatgatttagatgatgtgactcttcttactcgttccggtaatgaatacctgggtctagataaacttaagcgtcaacttatcgagatgaccaaagaagcccgagaacgccatcctaacggtgtgatgattgacggcgagttggtatatcatgtcgaagtgaaagaagaagaaaacgacctgtttgatatgtttaaagagcctgagcttcctgagctaagtaaagctaaggaattccaacagacggctcgtacagaatcaaacggattggctaataaggccattaaaggaacaatatctgccgaagaagcagaaggcatgagatttcaagtttgggattatgttccgcttgatgtagtatattccgaaggtaaagttcctggatttgcttatgatgtacgtttccgtgcgttggaaatgatgagcaaaggctatgacaagattattctaattgaaaaccatgtcgtacacaacatccatgaagctcgggctatctacaaaacatacgtagaccaaggtctcgaaggtattatccttaagaatatcggtgcttattgggaagataagcgttctaagaacctcgtcaaatttaaagaggttatcactgtagatttgaaatgtgtcggttcgtacgagcatagaaaacaacctggtaaaatgggcggcttaatgttcgtatcagaatgtggtcgtattcgtgttaacgctgggtcaggtcttaaagataagcccgaagaattacatgaacttgaccgtactcatttatggaagctcagagattctcttccgggaactatctgggaacttgaatgcaatggttgggtaactgctgaaggtcgtgatgatggtacagtaggattattcttgcctatcattaaacaacgcagatatgataaagaagtggctaatacattcgaagccgcatttggtgttaactttactgaggcaacaggaataaaatgaaagttttatacgaagtgattgctaaatctcttgacggacgtggtggtatttctgttcacaccgaagttcttgagtttaataacattaacacattaagaaacttcaaagaaaacattgaagagtatgagtctgtaaatggactacaagtttggcgtacagtaacaataattaattaaggccttcgggccttttttcgtataaatagaataaacaaacgaggatatgtcatggaacttttaaatgaagttttcgatgaagagaatagtaaaatctatcctgtcgagaacgttaagccaaaacttaaggtaccacaggtctttttgattaaggtgccgggtaataacaatttaatgattcggttagtgcaagggtcaggtcaaggtgatgcagttaagaacatcaagatgggtgataaattcattcaggtctatgttttctctgtatccgaaaaaggtaacatcggtgcgcttaaaggtggtttaggtcaagacccgattggtgctatcaataccatctttgaaacggttaacaaagtagttaaacaaattaaagccgatgcagtaatgttccgctttaatccaaagaaaatgcaaggacaagataaagctatccagcgtattcttgctcggttgattactactcgcaccggtggtcgtttcaatctaatgaaagatatggcttactacaaaggtaagtatgcttattctattatggttcgcaagggtaagaaacttgaagagattgaaggaattcctgaaatttcagatgagttatacacaaaggttgaatccaaagtaggtgaaatttatgtgtctaaagaaaccggcgaaagcgttaccaaagccgaagcattggctaattccattggcgaaaaagaagacaagaaatctgaactcgctgtaatgagtaaaatgaaagtgtctcgaaaagatttaatccgagcacaatacggcaaattcgtttcgtatgttgatgaagattggccagaaaataaacgcgaacgttggtatgaattaactactaacactccagtactaaacgcagaaggcgatacggtagacctccaaaaagatatcaaagccggattagaaaaatcaattcctttttatgttgatgatatcaagcactatcgtgttcgtggcggatatggaagtaattttggcgatgcagttgagagattatttgtaggccaaatgtcgagaatgcatgacgactggaaggttttcattccttcggggtcagacaaaatgaaaatcgctgagcaacgaatttcagaagttgctgacgttattgaacaggctaaaaatcctgcatctatggaaacaatgcgtaaaatcgttgaagtagctactcgtggatttgatat

SEQ ID NO: 12 - DNA, 169308 bp, Unknown
  bacteriophage strain capable of infecting bacteria of the genus Klebsiella
ccttcaatcgttttagtttcatttccacgtacataaagcgtgttatcgccatcaatttgctgtcgacgattatacatgttataataggtctcgttccctccaacgttaaccttcttatccccagagattaaaatatttccatcgccctgagtcatgtcatataaatcggctacagtttttctggtacggcgtccatcgggagctacttcttcgtatgaacctgttgggtgaacaatacgatagcgttcatagccaggtgtatcatcaaactcttggatatggcctgattctgtttccattgtgtgaacatatggatactgaccattatatgaagactcaggttctttaaaaagaattcttgaatcttctggagtccacgggtcttcaggattaccaccagacttcggttctacataagccgcagacaggttttttccttctggctttggagcaggaactccatatgattccatattacccgttagaataatcatggaaacacgagaagcacgaccttttgtctgattaaaccaaacagagtttcttgcttctgtataagcggttttccaatcaccaatgaacatggcatcaagcattttaccaaattttgctaaaccacctacacccatttgaaagctcatattttctaaagccatctgccttgacttgttgactttagcatatacaggtcctacacgtgaattcgttttaatatcagaaagcattttatcgcggtcttgcttaaataacgcgactgcttcgtccattgtaatgataccgggatttcccgtaacagtacgaccaacctgattagataaagttttattaatgacagacatatcacgtactttttgcgccatgataaggtgtccaataccgactgtaggatatccttctgtgtcccagtagaccttcaatctaagaccttcatccctattaagcatatctgttattgtaattgcaggatttgggtcttcaggaatatcacttaagtcagcatcatcaggattaatgccaatgtctaaatttctgtcctgaatgatatttggtatagcactatacccagtttcatcgccttgaactaacgggttagtatctgacccgacctgtctaggatattgacctgtagggtcagaaaaaccttccgtgtagtttggcttagtttttctgtgcgcagaatatgttcctattactagtcctgctgttttgaattcatcaagccataagccaaatacagatgttccttccaccattccggttatagatgagccaactccagaaattccggccgagttagtaggctgaatcactgacatccaaggaaggtcttcagtaggaagaccggttatagctccttgcaccttttcaaatggatgaagcccgtaaacgcgtactcgcactcttccttgctttaacgggtcttgtctgtcttcaacaacaccagtaaaccattttaatgaatcgttcatttcaatcataaaacttctccgatggtagtctgggatttgtaccggcctgattcgtattcgctgtcaggtgctttttccatttctcgtataatatcagaaagaaatgcctcaatatcactaggattgataatgtttatttggcgcagtttttcattttctataatagaatcttcgtaaatgtcaacaccagccaaagcaccagtatattgaggatactgatgattaaagtcacctttatcataccaaacacctgaattttcaggatattgttcgagattgtaatagcgattgccgtacgcatccacgtgatagagtatttggtctccacctacatccgcatatttttgctgcgcaaattgatagcatgcatcttgggttttaatccaatctctgaatgggtcatatacattattgcacattaaaagaatccagtacagctggctatttccataaagagtgtatgctaattcttctggtctaggagctccacttatgtaatatgtttgtaaaagatagttttctgctacagtgtcgaaatatttgcgataattacgaaatatgtcagcggttgggatagcttttgccttagcaccttttacggtctttgcagaataatctatcggactaaaaaatgagaagagcatagtttatcctcttataaatattaaatataatttatttataaatacctgtttactccaaagattttatagtataaaatagcaataaatataattgagaggatactgctatgaactataagaaaatttatgatgatttgatacaaagaggaaaatcaagaactctttctggatacaaagaacgtcatcacattgttcctcgatgcatgggcggaacggatgaaatggaaaacttggttgatttaacagcagaagaacattttgttgcgcatcaactactggtaaaaatttatccagacgagattaaactagctttagctcttaagattttaatgggttcatgcaataaaacgaataaacaatttggttggattagaagaaaagcagtaatagcttctgctaaattgcatactggaatgaaacggtcagatacaaccaagaaaaatatatcaaattctttaaaaggaaaacgtcttggggtttcatttactgatgagcataaagaaaacttatctaaaagtttaaaaggacggattttcacgtctaaacatagagaaaatctgtctaaacgtgaaataactgatgaatggaagcataatatcagtatttcacagaaaaatcgtgattggacaggtcatgccgataaaataaaggcaggaattacccaatcagtcagaaacaaattatctgaaaagcgcaaaaatgcaccaaaattgacgtgtcctcattgttctaaagaagtggattcagcaaatttcaagagatggcacggaactaattgcaaggtatacaaaaatggcttatagcggaaaatttttaccaactaacttagcaaaatataagggggaccctcgtaagatcacgtaccgatctacttgggagcagtttcatgatgagatggttagataaccatcctgatgtagttcaatggaatagcgaagaagtagtcattccatactttagtaatgcagatggaaagaaacgccggtatttcatggatttctgggctaagttttctaatggtcaacagttcttttttgaagttaagccgaagaaagaaactagacctccggtcaaacccacaaagttgacgacatcagcgaagaaacggtacattgatgaaatttacacttggtctgtaaacgttgataagtggaaagcagctcaagctactgccagtaaaatgggtatagaatttaggttaattaccgaagattcacttaaaaaattaggatggaaaggctgatggctatatttgaatttatcactgaagctgcagaatcgcctaaagctaaatcccgtagtgaaaatcaatgggtagcattaggagttgaatactctgctgctcgtaaaaaaggcatgacgtcaaaatcatttgctgaaagcaaaggaataaatcccgctacgttcagtaaagcaatggctcgtcatgcatcaagaattaaaacggcaattaaagtagcagaaattgagaaaaaacctgctaacaaaatgaccaaacaagagcgtgctcttgtgatggtaaattcatttcgaagctctatcaaagataaaattcgtaatgaaggcgcagcagtaaacaataaatctgctaaatggtttgcagaaactataaagaaaaatatacgtggtcattctgtaaccaagcctcaacctggaaagctatatgcttacatgtatgacgctaagcacaaagacactcttccattctgggataaatttcctttgatagtttatctcggtctaggaaagcaaggtacaaccacactgatgtatgggttaaaccttcactacattccgccaaaggctcgtcagcagtttttagaagaacttctgaaacagtatgctaatacgccagtgatatctaataagaccagattaaagataaactggagccaagttaaaggatttgctggcgctgacaaaatgattaaagcatatattcctggtaacataaagggtgctttaatcgagataaaaccagctgattgggcaaatgtagtcatgctaccaactcagcagtttatgtcgaaaggcaaacgttattctgctacttctgtatggaaatcataatgtctactggcttgtttaatcaaactaacacaactaactttatactagaggtccccgacgggggcctcactcaggcctttaaggctaatcttcaaacggcggtagttcccggaattcatattcctgctactgatactgtgggttctccacaaggcatgcatcgtgctaaattgcctgggtctacctttgaatttgacgctgttcctgttagatttttagtagacgaaaaccttgattcatgggtacaaatgtacaaatggatgttaagctgtcagaattacattgaccgaggaaagtctggatggaataatggcggtgaaggatttcctggtgcagttttaatgcatgtgcttgataacgataagaaagaaatcgtattaactattcgctacatcggtgggtgggtaagtgatttgtcagaaattgagtattctttaactgaagaatctgaccctgctatggtatgtgtagcaactttgcagtacaaatacattgaagttgaaaaagatggtataataattactggtagaccttctgtcaatgatactcgcgaatcccagtatcaacagaaagttatgggaatgcatccttctatgaggtaataatttgaagcttttatttttgattggtaaaaaacgtagtggtaaagacactactgctgattacattatggataactacaatgcaacaaagcatcagttagcgggtccaattaaagatgcactagctgatgctatgcttattgagtggtatcgtgatacgtctcgcgagtttcctcgcatcactcggtctatgattgagggtattgattacgatcgtgaacaagatttaaatctgtctactaaagacgtgattcgtatcatggcgaacgcgattgaatatgttcatcatgatttgcctttacctggcgtggtttatgataacaaacgtaaaatacttgacggtgatacgatggaagtcatccgtaaagttgtaataaataaacctgttgagccatggtcaattcgtcgtctcatgcagacccttgggactgacattgtctgtgataagctcgatcgcatgtattgggtaaaacgattcactttggttatggctgatacttttggtgattatgattatttcattgtcccagatactcgtcaagaccatgaacttgatgtagccagggcgatgggtgctactgttattcatgtagttcgtcctgagcaagaaggttctaaaaaagatactcacgtcacagaacgtggacttccgattcgcgaaggcgatatcgtaataactaacgacggttctctagaagaactttattcaaaaatcaacactatattaggaattcaaaaatgactactgaacaactgcaagcccaagtcgatactctgaaagttcgtgtatttgacctgtctgaaactatccaaggcctttctgctctgcgtgcacagtatgaagaagtactgcagaaactgattgctgtatccggcgttgaaatcagcgaagacggtcaggttaaacttgatgacctcgttgcaaaaatcgaagcacagttcgcagaagaaactactgaagaagctgatgcctaatgaacttcagtgattttagcactggtctatatgtagctgctaaattctctgagaaaactcttgatgctattgaggaccttcagcgtgagttgaaggtccctaatccagttcctcgtcataaaattcacacgacgatatgctattcaagagttcatgttccatacgtttgtgcttcaggaagttttgaagttgctacatcaggtaaacttgaagtatgggacacgcaagacggacgtacgctagttcttaagctagattcagaatacttaaaattccgtcaccaatatgcaagagctttgggagcaactcatgatttcccagattactcaccgcacattactctcagctacaatgtaggtccagctcacttcgagggtgaagttcaagtgccggtagtgcttgacagagagtaccaagaaccactaaaactggactggtcagaagatttgaaataggaatttatttcacaaagttgtttacaacgggttgtagtagtgatactataaccctatcaacttgaggagaataaaatgaaacgttgtgaattaattagaaatgttgcatcaactatctgcatgggagcattgggttttggcattatcggtgcagcctttatgtctcttcctgaaacagtatcagtgttaagtgttgcatttctaatgggtatcatttctttcataatggataaaatagcacatgaaaaagattaagcagtggttcatcaaaaactatgatttaaaccgtgaagaagtaactaagtatgattatgttactttgggtgtaggactaggtgcactactggcagcactgcattcatccctacttgctattgcagtgcttcttattttggctcactacagctggaaacgtaagtaatgtatgcacttttaacttggtctaattattatcctgctcctggctctgaccaaatcagaggtgtctactctacggtagaagaatgctatgaagccctccagggaacgtatcaggactattttgagatactgaactctcggtttgagaccgttgctaaaggttcaactgaagcatacaaagattaattgtgaggaaattgtgatgaatatcagagctgcatttaatactttctatcaagagaattataagcttcttgcacatgaatactatgatgcacaaggcgttccaattcctaatgatttagttacgcctaagcatgtcaaaactgattctcttgacaatgaaatccagcccggtgatttagtatcatactattgcggcgggtcactttctgcagcaagcgttggtattttgctaggatttacgcctaaaggttatcgtgtggttccgttccatacaagtccaattcctgagcaccgggtattgctctctcatatggattcaccatatcgggtattcctggttaaatcaaagagctcaccgattgtgtaatatgctttaggttttctttgttattattaatctatcaactgctctgattaatttcagggcagtataaataaaattacccaatggggagttagaccgtaggggtagcgggacagactgtaaatctgttgctcaaaaggctcgagtggttcgactccattactccccaccaaatttagagtgtttatgaaaattaaatacgaacaacaaagatataatgcattgtatcgtggaattccttgggaatttacgtatgatacttggattgaatggtggaaatctaccggaaaattatctgagcgtggacgtaaaggtcatgaatactgcatgtgcagaataggtgacaaaggtccttattctccaacaaatgtattttgtgccacaaatgctgataatgtacgagatgctgttaaaaatggagtaaaaccttatggcggcaagtgtgataattttaaaggaaaacatcatactgaagaatctcgtaaaaagatttcagaaaatagcgcttcaaaactgacagacgctgaagttgcttcacgaattgaagtatataattcaatggacatgacaaaatggggagctcttaacagatatgctaaagccataaatgttacgcatacccaagcacgaagatttataaatagttatatagaacgttagctcagctggttagagcactcgacttttaatcgagatgtcgatgggttcaaatccctcacgttctaccaaattcgggtcgttggctgagagggtaagcgacggactgttaatccgtgtcagaaatgactaggcaggttcgatacctgcacggcccgccaaatgaagaagtcagaagacgttctgataaatcgtcggcatagaattccctggcatggcgtttgtattaaggagtatgatttcatcctgcttaatgcttgttcatgttataatttcttacggcgttgaaagttcgctttcagggatacatcttagaacagagtgctaaacaagattcatctggtaccaaggtgatgagagtcctgttcccctttgcttcggcatcgtgccagagtatctctgaaagcgaattatggacctatagtttcagcggttaaaatactcgcctgtcacgcgagagtcacggattcgaattccgttaggtccgccaaataagaacgtggcagttcttgaagatgagtttgagtcctataagataatgccgaggacgaagctgtttgttcccacgggataagctctatattcggaagattatatctttagcgtgttctacatcaagctacttgttagtacttcaagaacccggataaatgcggggtaacttcagttggtagaatgttgggctcatatcccgacacgcgcaggttcgagtcctgcctccgcctccaacaattggactatagacaagcggttaagtcaccggcctttgactccggtatctctggttcgaatccagatagtccagccaaattaatattcattcaacgcgtctacaggggttgaactgatcattcttctcttaatttcgtatgaagtcctcatgatggatggagtgaatattgatgtggccgtagttcagttggtagaactcgagattgtgattctcgtagtcatgggttcaactcccatcggtcaccccaacaatgaaggaatggtggaaaaatacacgacccacagtcatgctgggttgtcgctaagcgaattgtgtctatatggcacttccttcaccaaatactggagagtagcgctagtggtagcaaaccggacttgaaatccgggccatcggaaacggtgagggttcaactcctttactctccgccaaatttatgaaagttaaacgctgcccatagcagtggtacatcaataattagatgattagctttccatgggagtatagctcatttggtagagctctcgaccgataatcgagcggtgactggttcgagtccagttactcccaccaaataacaggttcttagtataacggctattatgctgggctccaaacccagtgatgagggttcgattccttcagggcctgccaaatttgcatccatcgtataacggctattataggtggcttccacccacttgataagggttcgattccctttggatgctccaaattactccgtatagctcagtctggtagagcgttccatttgggatggaaaggtcgaatgttcgagtcattctatggagaccaaattaacggtatgacacaatacaagatggtgtaagctgagtagcgggattgcagtctcgttcagatatgctatcgagtatgggtgatatattaaacacatggattctgcaaagtccatgtgactcggttcgagaccgggcataccgtccaatcacttgccattgagaattatattatgaaatattacggcttcaaaacatcccatttcgggaaagcatatcgtacagaaaacattgatagacgtcgagcatattacgaatcactgcataaagcaggacgttctcgtgcacgacaagaaggccaaaaacaagcgaaggaaatagaatgaatatttttattggtgtatcaaatgacgtaaatgctattacggtgaagctgtctttggatggaccggttaatttagcattagggctttcatcttgtgctaaacgggatttaatgattaacgctgactttgcatatgcatttgatgaacgcaaaggtatgtgggtatggattaaatgccgatatgattcactgattaaatatgagtactttagtgaacgtgatattcaagaaattattgcttatcactctgggtgtaaaattaataaactgcggcaagttactccgttaacagctgatactaatgtagagcaacttgtattagattttaaacaaatttgccaggcgaaatatgatgaaagattctaaaggtcgagaagtacaagttggtgatatcgttttctacggagaacgcacatacaataaaggtggtcgcggttctatgaagtgtggccgtattactgatattgcttcaggattggctaaagtagataacgactacgttgcaatgcgaagcaaatcattcgttaaggtttctcctatgttcgcaacaatgtgggaaaacggaacgattttcgagatttaatgctacaagaataacctgttattattactacatcaaaacaaacaaggaaaaagaatgaaacgtatcgcactgattgttgaccaagaagctatgttcgctgctaccggtaaatttcatccggtgagtaaatttgttgctcgcagcgagaaaatcgttggtctggtagaaactgtcgcaggtgatgtaattgtttctattaaaacatctgaaatttctccggtggttaaagtagcagttaaaaatgacttctgggaagtagctgattttatgtgtgagtaattctgcctagcaggtggataagcccgacaaggcgccctcttcggagggcttttataaaagtcataagatttctataaaggccctgtagctcaattggtagagcgttcccctcataagggattggttgcatgttcgagtctttgccagggtcaccaaattatcaactgaggaaattaaaatgcatattaaatttggacaagttattcctaaaggcttagcaatggcaattaccacttgggaaaacgatgctgatcggtattctacccaaatggtttatggcttagaaaaagaagagattaatcaagtaattcatgttcttgaatggttctcttctaatggccgccgtggtgtgtatatgggaaatgctgattataatcatgaagcagttcttgaaagacttcacactgaacagaagtatgtaactcctgaattttccaagaaattctttggcgttgatgttcctgcatatgattgcacagacgaagagtttgatgcttatttagataaccactattcttgttcaaatgaagttatgtatgctattcaggcttggttgggtaatccaattgaatatgactatgatttcatgcgagtatttgagaaagtagaaatcttcaacattgaagaagaaattcgtattcctgatgctccagttgcgttccatgttggaattacgtataatcagaaagaaagcccattaaaagttgattggttgaaatacgtgaaggaaaagtaatggatattggttcaggtagttcatatccatcatgtgctttgagtaatttcgctcctcataaatttatctatgatggcgtagaatgcgcatcaatggagggattcttgcaatccctcaaattttcttcgcctgaaatgcaagcacatgtatgtacactagtcggaaaatccgctaagttcaaaggtaagaagaaacgttggtggccaacacaaacgctttattggaaaggtgttcctattcaccgtgcctcagaagcgtatcagaatttactgacaggagcatacgatgcacttagtaaaaatgaaggattcagaaaagctttggctgctacccggaatgctacgctcactcacagtatgggcaaaaacaaaatttctgaaacgattttgactgaacgcgaattctgtaatcaactttatcgtttgagaaatgctataaataatcagtaatataattatcttgttcagtggtgaaatcggtagacacgaccggaatagcttgtttgaaaccctggttggtacccaggtgagtaaggcgcaaaccggtgcaacagacctaagcgtgcaggttcgagtcctgcctgaacaaatatttgcgtcgatgttggaattggtagacaaaggagacttaaaatctcccgggattaaacccgtacgagttcgagtctcgttcgacgcaccaaattgtgctctatccaattataaatactcctatattgtaggagattggaatgagtatttgcaaacattgtcataaagaatttgacatatctgataaacctaaaggctggatggctaatcactctagatggtgtgaattaaatccgaaaagaaagaattacggaaaagaatcagtagcagcaatgaattctgcccgaattaaaaacggtaacttaaatcagtatgtaaaagctaaaaatttaggttatacttttactgtatcggatgaaactaaacaaaaattgagtatagcttctaaaggaagaataaaaccaaaagaagaatgtattaaaatttctaatgctcgcaagaaatggatattagaaaatccagaaaaacacccatggaaaagaaatgataaatttaaatcaaagccatgtgagcatcttaaagaaatcttaattaacttaggtatttcatttgtagaagaatatcaaccaattaaagatagaggtttttctatagatattgctattcctgataaaatgatagcaattgaagttaatggaaatcagcattattctgatcctaaattaggtatattaaataactattacaaagaaagacatgatttaatatctaacgcaggatggaaaatacatgaaattcactatgcgaatgtttataatgaaacgttcgttgaaaaattaattgctcttatagtgtaatggattagcacacgatcgttctaaggtcggtagtctgggttcgagtcctagtaggagcgccaatttaactttaaactttaaattgccgatttagctcagttggtagagcgcttcacttgtaatgaagatgtcgcgggttcgactcctgcaatcggcaccaaattctggtatgtgatagctcaaataggtagagcgtgaggccctggtgctgaatggcttgtaggttcgattcctacccataccaaaaattaatgaggaaaatatgaaagtatatgctgtagtaaaaaataactggaactgtgaatatggctatgaagaatattctttgcctcttaagatttttcatactaaatccgaagcaacatcatatgcggaagaacttgaagcaaacgattcctattatcagtatctagttgaagaatacgatgtaatgtaattcgaagggaaacttgcgtataccctcgttgagtcgtcagatagaagagaatggttcgtccattgccgctagtcggttgttccctgtcgcaagcataacctcctgacgctatactcctttggatgagactgatgcctccgagttcaaaggaatgaatttagcaggtcatctgccagtaggtgatgctgtcgattctcagagccctgtcttcggacggggctttttagtatacaataatatcaaaactacagcccagataccttctagaggtcgtctgggcatttctatatcccaagctgtataaatccattctactctctagaaagtccttccagattccctaaaattatttgaaaatttgtgcacaaagttgtttacatcagtggtcaactaggttactatagctacatcgaaacaaaacagagtaacggagaataaaatgtctaaattcaactttatccaaattgaacgtggttataatcaatatggtactcctgatcgttatcgtgcagtttggattaaaggtgaacatgagaatgcagtgttcaacgtggcagaaacacgtgaactgaaagatttgattaagcatgttcgcaaagattggcctgctgttgaagagtactacgttcgagtttaccatgaagaagctgctacggttcaaatggctatcaagtttgctaaaaccgttcctgctttggttaaacgaattgaagcggtaattaactgctaataattttggggagttataatgaactccccacctactgaggaaattaatatgtatcaggataagttgagattagtagcgcaaacttattttaaatcttttgccaggctgtttggtgaaactccaaattttccatccggtgaagaacgaatggctgctctgaaaactatcgagaacctggtgatttcaacttacaatgagtttgccgatgacccggcggttaatcgtattgttgatatcgcagttttggataaaatggaagaaatcattaatgcatacaaatgaagttccaaaaacccttgctgatattcgtcttgaagctaaaatagccatcgagcgtttaattaaagcaactgtagaagaaggcaaagagtctgtacttattctcggattagaatcatacgttactgattacatcgagatattcgagcgcagcaaaaatgaacagggtctaatcattaaaccatatgtttatgattggattaatccgtacgaataaaaccaccataactattgaaaggaaataaaatgtctattctgaaaaaacttgttgaattcatccgttctaaattcggtacctttgttgcacagaacacttctgttgaagaccagtacaccactgcagcaaatcgtattattgatgaaatcactaaactgcgtaccacgcatgttaaatcagtaaatgaagaaaagcgtctgctgaaacttgctgacgaaaaagaccaggcaggtgcttccaaagagcgtgaaattcgccgcttgatggcagaaggtatgaatgtagaaacccacgctaaactgggtcttctgtatcgtcgtactgctaaagctttacgtgataaagctgccgaatataaagaaatgcgggcccaaattgaagaaactgtagttaagcttgatgaccaacgtcttgatttggcagtgaaactcgaatacatccgtgagactcgtaatgcttctgctctgggtattacctctgctgatgacgtgattgaaatcgctgaactcgctaaagtagatgtacaagacatcatgatgaaagttgaaaccttcagcggtactcagcctggtattgaaaccaccactgctgatgtccaggaatatctggaaagtctgaagtaattttaccggggccttcgggcccctaacttggataataaaatgttatatgaatgcgctggagatattccaatggcaacacctcaaattaaagaattaattgcagcaggattcccaaaagaaatcactgatgttcttgaaaaatttgctcatcctgatactcggcccgagaattggaaaactcgctataacgggtataacaccacagttttgccgcgggctatcgttcttaaagactattacaagctgaaaaacttaatttctaatatttcgtctatttccgatggagttaagcttgtagatatctttgcacttcggtacggaatttactcttttaacgattctccgtcaaatctaacatcagctcgtgctaatgccgatggatattttacctctagctccacaacgtatacagtagttatcgagattatctataataaaactagttatcgtctcggtattaacatggttaaatacgtgacatctcaggatgattatatcaattatttgaattactgcgtcaatgaattgccacaaaaagtcatgggtatgtttgactctaacaacatggtaggcaaacaattaatcattgatgaatttatcaaatactgccgtgagagggtgcagaaatgagtaacttatatctgccaagtgaacctcccgtttataattatgtctataaatttgaccaaactgactatgttctaattccaggaatggtctgtgctgctggaactatgataactcttatcataattgacgtaatgaatttggctgaaattagcagtacatcattagtgaatgtaatattacttacatggggattaataggtttacttggtctaggattaattgaactatttcgttgggtaaagtatgttaagcataactgtgaacgaaaggctgaatggaaagaacagtgcaagaatttaactcttgaatggaaccgcaaaaagtcgtttgagtttattaaagaggtgagaagaaaatgaatgaatgtaaacctgacgggttttggaaccaagatgggctggcgccagcttttggaatcgtgacatggattttatattgcgcttttgtaattgttggagggacattctttggattgaacgtctcagagtttatgattatgcttttatttttaggtgttttcgcattcagcctcatgtggatgctaattatcgcgttgattaattgctgcacatttttagcttaccgtatgaaatacaagaagtggaaagaaaaagaagatttcaacacctggattaggagctgtcgcaaatgattaagacttgttatcgtggaatgattaaagataatgatttcttgtatttcttcctatttctgcttatcttattttccttctcgacttttgttggtgttggagtattttgggggttctacttgttctctccagtatttggcaatgcgctgtattatttaggttggatgtcaggcgttggaacttggtttgcaatgcttgctcggtggttgcaattcgtttcccaacgacagcagggtgtatttgataagcccaaagtaaagaaagaaaaatctaaagatgattctcgtaatgaaactttatcctggattaaggagatgaaataatggctgttgcagtgcatgtaaaatttgaaaatggtgatactcgccttctgtgttacagtgataatgaatcactgagcggtatcgagatttcactcaaagaagaactgcttggtattaatggacctatctgtgatttctcggtagaaggttcatataactgtgatggtgtattagagtctatggtctatactgccatggaagatattcttgaagaaagttggaacgaatgccaatgaaagagctaagtgcaggaatcttattctttaccaatgacaaacggcttttcatgggtcgtatgacaaatacctatgtccaaggtagaggttctaggtgggatattccgaaaggacatgttgaacctggtgaaacaccaaaagaagctgctatccgcgaatgcaaggaagagactggatttactgagtttgaccaagacctcttatatgaccttggacgacatgattatgccagcaataaggatatccatttgtttggatatatgctccctgtgagcccagaaatgttcagaaattgccgttgtacagcttaccataaagatgaaaatggaattaattttcctgaaatcgatgcatttgctttaattaaaccaagccaatggaaatatgtaatgggtccaagtttatacaaaatcatggcgcaaatgtatagcacatctcggtgaggttattatggaagaagctattgaattaggcattccacacatttataagcatgaactacgatttgttcgcgacggaagatggattagcatatttcatcctcgagataagttgtcacgtacactaatgaagtcacggtatgtcttcagtgatagtgagtatgcaaaatcgtcgtattacatggcagaaaagttatgtccaggatttaatgaaattccagaggacgatagaagagattatgtgtggtggaaaggtaaatggacgccatacgagaagtgtagccttgaattattcatagccaagtgcagggccaaataaatactcctataatttaataggaggtccttatggatatttttggcatgttgcgtatcgatgaaggatatgacagcaaaatttataaagataccgaagggtattggactattggtattggccacttactgactaaagacccgtcaaaatctttggctatttctaatctggacaaactggtaggtcgttctaccggtggccaaattactcaggctgaggcagaagtaatttttgccaaagatgttgagaaggcaattaaaggtattgttgctaatgctacattaaacccggtatataatgtattagatgatgttcgtagagctgctctgattaacatggtattccaaatgggtgtgtctggtgtagccgggttcccagcttcaatgaagttattactcgctaaaaaatgggatgctgctgccaaagaactggcaaattcacgttggtatcgtcaaacacctaatcgtgctcgtcgtgtaattgaaactatgcggaccggaacttggtctgcttatcaaggaaaataaatgaaaacctatcaagaatttttaaatgaatcccgtttagcaacagttggcgtaatgactgaatctgttggaagtaatcttctgaaatttaaaaaaggtcagaagatgaccgccacgttagaagatggtacagaaattgaaatggatgttgttggatataactacgtagtagacggcaagttatataataagagccatgccaagtttgattcattcgatgatttcacctcttcaattgaagatgagtcttctcgcaaagcagtagcatctggcgatgcacgctctttaatggcatttggtcatgagcgtattaaggctaagcagaacaaacctggtgaagataactttgcattagtaggttatcagtctggtaaaacttctaacggttaccagcgtactgttaccatgtacatgcgtaatggtaaaattgcgttcgtaaacgatcgtggcgctattcgttacgctaaatcaattaagtagtttacattgagacggtaatgtggtatagtagccttattaaatgaaggctactatgacacgcattagcttaaaggatataaaatgaaaacctataaagaatttatcaccgaagcttctgtaggaaaggtccaaggcattaataaagatgagtggacctaccgaggaaatggctttgaccctaaaacagctcctattgagcggtatttagctacaaaggcttctgactttaaagccttcgcctgggaaggacttcgctggcgcaacgatctaaatattgaagccgatgggcttaaatttggtcatattcaagatgttgttgctagtaacttagacgcagcttttgttaaagccgatgcagaccttcgccgttggaatttaaaactgttctccaaacagaaaggcccggtatttgtacctaaagcaggtaaatgggttattgataataaattggctaaggctgtcaactttgcaggcctcgaattcgccaagcataaggcagcctggaaaaatcttgacgccatggccttccgtaaagaattcgccgaggttatggccaaaggcggatttaaggcagatttagatacctctaaaggtacgtttaaagacgctaatgttcagtacgcttacgccgttgctaatgcagcccgtaattaaaactaattcctaataaagccgaacacgacctctcctcatgaacgtcgagtcctctgagtgaagtagctttccctacctgtaataaggtcgagcgcaagtgcggtaaggggtttacatagtgtgtcgatggattaaacatgtgccaaggaatggccccatttaatttaaaacttttacctttctgttggatttaaaatgaaaacttacaaagaatttatcaccgaagcaaaagcaccaaaagtattccaaatcggtgcacaaggaaatttagacaaagaatacgttgacgccatcgtaaaaagcattgttgcccaaggcgtgcaagtagatgcagttgaatttactaaaggcagcacctttaatattgttgtatctaaaggttctttggctaaagttaaaaaggcttggggcgttatggcagcttacgaggtagatgattctgctccaggaccaaaagtacgaatgaatacccttaagggaggccgggaatacgtttagacttattgtctatacttatcaaaatattacacggactaagcacgcgccaaggaatggcccctttaactggaatctaaaatgaaacacttaactcccatttatttgaccctgatgcatgctttcagagacgctgcagacagacgattgaataatcccaactacagtttttatgagccgtcttgccttatgcgagagtacggtacccttcgtctagacggtggaagacaaaccggaaagactgcagccttatgtcaattcgctaccgattggttgcttgaagatggttcggttataatcttatctactcgatacacacaatcatctgaattgatggaaggtattctacgagaatataattcatcgcatttaattaataaattaccggctaacgagatagctaaatcaattgttccgatgacaatcagggaatttctatccaatgattcctcctataagtttaggggaagaaagtttggaagagcattaattatcattgaagaaccaatgaaagttccagatatgatgaagttctatgatatgtaccaggaagctatcagatggtctatgcctaatgataccttgcctttatttttcgtgataggaatgcaatgatgacacagacagaaattgttgatatgattacagtaatggaaaatacaggatttgccgatatgaagcaattaataacaatggttacggctggcaacctgcttgagtacaagcgctacaagtttctgtctggtccgttcaaaggcgcagaattcatttctaatgctcctaacacgaagtggatgaatcgctatcctaattttagaattgagtttatatctggcaagctcaaaggcgtgattagttcaagcttaatcacatatgaccaacgcattcaagagaaaacaatgcaatggctgaaattgttataaggtgtcctccacacctagtcgagagcttctgtgaatggttcagtaattctggtgagcaagatttttatgaagctcaccagaatggaacttggaatgaaacaaccaaacagtgggaagaagccacaacgtatataggcactcgcggatatggagttgacgagcctattgaaattgtggaatacgataaagaaactgacgaagaagttacttatcatgaagataaaataacttatctagaagcagctgcgaagtttcattcagacgaatggaataaaatgagtgtaattaccgcatacatgcgtggttggaataaagaatctaattaagaggaaatatgaaagcatatcaaattcttgaaggtgaacttaaaggcaccatttacatcgaagatggtgatgacgcacgagtaatcgtttcaaaagttcttaaagaagatactattacggatgctgaaactttttatggctacaaggctcgtgaagtagaaattgaataccagccaacggtaaaaattgaaggcggtcagcacctgaacgttaacgtgctgcgtcgcgaaactctgctggacgcggttgagcatccggaaaaatacccgcagctgaccattcgtgtttccggctatgcggtacgcttcaactccctgacgccggaacaacagcgcgacgttatcgctcgtactttcacagaggcactataatggcaattgaagatatcaaaggatataagccacataccgatgaaaagattggtaaagtgaatgctatcaaagacgctgagacccgtcttggtcttatctttactgctcttgaagaagaggcattaattaattaccaagtgtcagtcaatgaacctgagcaggtactcgatgaagcatacgagcgtattgcccagattcgtacagcaaaacagaaactgaaggaagcttctatgtgggcttgccgtgcagtgttctgtccagaagaaaaatattaaaaagtagtttactttccttacgggccatgatactatggccctacaaacaaaggagaatgaactatgtcaactaacccagaagtattcattcgcagaactaaactgcgtcgtaagtttgaggaagcttttcgctctttgaatttatcagttcgtgcccgagctaaggctgagggcaaagagcctttcttcactaagtactctgatcatttgttggaccgtgctatccaacgtgaaattgatgaagagtatgtattctctgttctttccaaaattcctaatcatcttaaagaaattaatgaattcttagcaatgccttggcttccaattgacccaaaagacattgatgaaaacatcgagtataagccaatgcggttagaaattacggatggaaatctgtggctagggtttactatggatattccaagaccgggaaaaggacctagtataaagtgtcgtatggcattcgttaatgataaacgtttgaaaggtaaaatcagcacaaaagttatacacattaattgaggtaaacatgaaaaaagcgcttatcggtctaatggccttgtgttcaacggcctttgggtctgagccaactttcagtaatgttcaacttgacaacttacattacgcatataattttggtgagcaatatcaaaaatccggaaaggaaaaatctccgcataaccgatatgataataacggcttaggatatataatggctgctatatcatggaaagaatcttcggcaggagccaatttaaaagcaggaaaggggcatcattcttatggggtatttcaaaattacttgcctacggttaaagccagagctaaattagagggcaaaaaccttagtgattctgaaataagaaaaatgcttaaatctagacagaattccgcggaatgggcatatattgagctttcatattggttaaatatacataacggcaatatgcgaaaagctcttgctagttataacgcaggatggaatgtcaaaagaggaaactcttatgcgtcagatgtcctagagaaagctaatttcttaaagaaacataaaatgctacatacaaaggtggaataatggtaaagtacgccgcgcttcttggattggtattggcattctctgctaatgctgaaaattcaatgacagattcacttcgtatcgctaaaacattttgcaatacgaactctgaatgtgttgatatattagcgcttgaattagattcagcattcagcgatggagtaaaagattcacgtagcccggcccagtggacaacactaataaatcgtaaggctaagagcatgaaagatttatgtgtcaatgctcctaacgaaaatatatgtttaatgtatcgtgaccaattaatggctcgttatatgtcaggactatcttcaaaatgaaaaaagcagctattttattatgctgcgcattttcagttaatgcctgggaaaagctcccaggctatcctgaaactgtgcttgcggcgcaggggactaaaatagaaagtaatggcccattcaagaacaacattgaaatagcatttgttcctagcagtagaaaattgctaatgtcattttataattatcaagataaagatgaccaggtaatagttccacttgtcgaatataacgctcgtggatgtggaatgcagagtgacggcgtttctattgacggagtaatgcaccctaaagaacaaggcgtgttaaaccctatccttaactgtaacaatgctatatttttaagagtatacaataatcttaatgaatatgcaacttataaaattccgtaggtgaataaatgattactggatatatcaagggtaatattgtagagttattcatgaagcatgaatgcgatattgctcatgggtgtaattgctttactacaatgggtgctggtgtagcaggacaacttgctaaagcatatccgccgattttagatgttgacatcgatgaagaccgttattatgacaacaatttagctaagcttggaactcatacacgagctacccacaagaatggcactgcatattgctataatctatacacccagtatgcgccaggtccaaatgttgattacggcgcaatttttaatgcattccatgagctaaattctggtcgtgttgtttataatcgtcctctatacattccaaaaattggagctggtattgctggcggtgattgggaactaattgagaaacttattaatttagcaacccccgatattgacattacggtggtagaatatgaagaggctaaatgctaaatctgtttgttagaggtaaatagatgattactaaagagcaaaaaactaaactgtggcagttgattgatgattatgcaggtgctgagcaagtagtagctattagttccatttacggaaatggactaccagaagaatacgatgaactcattcgttctaagaaagctatttctgattttatggagactctttaatggctcagctttatttcaactatgcgagtatgaacgcaggcaaatcggctaacctcctcacggcagctcataactataaagaacgaggaatgggaactctcattcttaaacctgctattgatactcgagattctgccaccgaggtaacatcacgtattggtctacgtcatgaagctaatacagtagacgaatctattgacatacttgaatttttcaagtgggcacaaacacaacgtgatattcattgtgtatttgtagatgaagcacaattcttgactgctgaacatgttcttcagctatgtaaaatcgttgacttgtatgatgttccagtaatggcatatgggcttcgcactgattttcgcggcgagttattcgaaggttctaaagctcttctttctgtagccgataaacttgttgagctcaagggcgtttgccactgtggacgtaaggctacaatggtagctcgtattgacgaaaacggaaatgctattaccgatggtgaagtagtagaaattggtggtgaagacaaatatgtttctctttgtcgtaaacactggtgcgaactggtaggtgtttataatgaagccaagaacgtataacactatcctgatgctaattatgggtatgctattcatttggattggtgtagcagcatctatacaaagtgatagacgagaagaaatgcaaaatcgtcttaattccgaatgtaaagtattggcacagggtaaagactttattgctaatacgaatgggtgttatattaaacatgagtagcctatttgctatagcgggtggtatagtactagtactcgtgattgggtttttactatacgtaatattgctttcgttattggtttaatatgaaaaaatatgtgatgtgctatcgttgtcttcatgtatatgattacaacactgctccaaagactgctaccaagcgtcttaaaaccaaagaacctgaatgtccaaaatgtaaatgcaaggtcatctattcatgaatattaaatttttcaaatcaggattttactatcgttgaggtaatttaacttaacgaggtaataatgtctagaacaattcgccgtaaaggctggcatgtagtaaaatcttccaaatggaacgatcagaataataacgaatttgcttatattaaaagctataacaaatacgttaaaacagttaaagataaagaaaaccagcagaaatatgtagaattgcgtatttctgaaaacagggaaagaccgttagaggccaagaaactgatcgctaaatcaaagcgtgatggattctggaaaactctgcgctggacgcgctatgcaatgccggttccgcgtttatttcataaagccgaaattaaacgtgcattgaagtatgatgaagaatataactgggacgaagcaggtgctagaactattgagcaaggcatctgcgaatggctttgggattaagtaacacatacttatataaatactattactaactgatgaggtgtatatgaagcatttgtcacataagcaactccgtaatttgaccatttctcaattagacgaaattcgacttgaggttgggcatattatttcagcacttcgtatttcttataaagaaactgattctgaagcggactataagcgtatgcgttctcacgaaagatacctcgatgcagttaaggctgtacttcagcacaaacgtaatactggacaaaaataataggaggccgtatggcctttaatcacatttgcttagccctggtgttgggctgcgggatttcattcccagctgcatcacacgacgacatttcggattataactcgtatgttgagggagctctacaagtttatgctaaatttaaagagcctagtaagcaagagtctgaacagttctatgctttcatacaaagtaaatggaagagcgagtcttgttctaaagattgtgattctttaggacgttcagcaggtgaagaatacgctaaccgtatgaggatacaactcgataatgaagttcaatgattttgtaaaggacggtaaacttactccacaagatgaattcatcggtttacttatggcgtctcaggcgtattttcattcagcgcattttgataccaaatcgtatgccagacataaagcgtatgaagttttctttaacgagattccagatttgatagatgcttttggtgagcagtggttaggattctcaggtaagagttatacaccggctttaccatcacagaaagagctgccaaaggacaccattgaaatgctagacctcattctagctaaggccgatggtatctacaagtcagttcctgccgccctccaaagtgttctggatgacattacaggtctatgctacaagactaagtatttgttatcattgcagtaataccctccgcctccttcgggaggcattttcttttcaaaaagttgtttacttcccttcattacatgatactatagacatatcaacaaccaaacgagaaaaacattatgattaagttaaccactgagcttcaacctggaaaaatcttttatcacgtgtgtggtgttaatcgcactgaaaccaaaaccggcgaaataacgcgttacattgttgcatcaggcacgtatgatgtagaacttggtcttcgtggtgtgtattcgcgaaaatctcctttcttcaaggtgatttgtgaatatgaaaactatgctggccaaactgaaagctattcaactgagcgttctgcacatgatatgggcgtattcaagccaggtgaaaaacgttcggttcataatcttaatcgtgggttttggacacgtgaagaagccgaacagttcattaaagagcttcaagaagacaagttcagtgacccagatgaccaagcgtatgcagacagattgactcctattgaagattttcgtcgacagaaagaatttgcggattcttatcttgattcctgtgattacgactactacgactttgatgatggcgaagaatgagaaacgttttacttatcatctacattgtggtacaataccagcatccgatgtttacatataatttggtgcaaatgattctggagagtttgaaatgaatggatggggtccatcagatgacggatttgcaactcgtgaagctacaatagctgacgggattgaatgggcccgtcttcagaaacaactccaagaacagcgggaatccgaagagttctgtgttgattgtgatgaggaaatcccagtagctcgtcgtctgttggttaaaggctgtcaacggtgtgtagaatgtcaaggaaagtgggatatagtaatgacttctgcctataatcgccgtggttcaaaagattcacaattgaggtaattatggaaagtattcttgatagtaccaatttagataatccgtacagcgatgtgcatgtaaaggttgtgaattcgtatttcactaaaaagttgagtcgtatcgtgctaaaacaaagcaatgatataattcatcttgatactaaacaaattgattcattaattcaattcttgatagaggcaaaagatggcgagtaaattagtatgggacggaaaatcccgtaaaggcgatgcagtaattgaggacgaaagtccatacattaatgatttgcatctgactaccgtagagctatacggttctacactcattgaaattgagcgcaacggtactatcttgatgattgataaatccgatgcagaacagctcgtaaaatatcttgtaactatgattccgactatgaaggactgataatgaatattaataaaaactcttggcatttcaaaatgaacctgtggtttaaatctgacaacatgtggaaaatgccaaaaactctatgtggatacttctggacaacagttcttcatgttgtgttttcttcggcgattattacattcatcggttctgttgcatggatgttcggttggccgattgtggcagagacaggaattctctcttggataggtattagtttatccgcgttttggttaaacattatagcagtaccagttggcgcagcggttatagcagcatttgtgcttttgtttgcagctatagcttttggatttatttttggtttagaaaaatttaaacaatatcgtatccagaaaaagtataccaagaaactcgctcgggtaaaagctggtcttccggcagaagccgaacctttggtgttcatccagtatttaaaagctcgtaagcggaaagtctgcccaatgattgattatgtagaaggtgaacctagtgaagaatgatcaagtttatattgtgaacggccttcgggccgtatttcgtgctaaaaccgaacgtagtataatttctacatatcctattgccgaatttacttttgatgacggcgaaaagattacggttaaatttattcctttgactggcaagtacagcggcaaagataacattgatttagacatatattatgagggcgggtcatggaaattgaactcgtaactactaagaaaaaacttagtatgagcattgtgaaacaaatgccattagcttcagcggaaaatattaaatttgctatgatggacccagaatcgcgggtcctgggatatatcaatgcatttcgttggaacagacttgacattcaggtggcaatcattagcacaggaattgattgggcattagttcctatgtatgaaacagcattacgcgaagaaacctgtcgtgagcagcatcctgatggacaagagtatcatactcatgaggtagtgtattattacaccagtcaaaaaattggtaatgtttatcgtacatcaaaaagaactacagataaaactcgagcagaagaagcagtcaaacgttctaatgcattagttaaattcgctaaagggaatcatatttacttatgaaaacaatcgtaaaatcttattttggttcgcatctatacggtacttcaactcctgaatcagatgtggatttcaaagaaatctttgttcctcatccgcgtgatattctaatgtgtcaggcgatgaatcacaccaatcgtaatactaacaacagcgcaaccaaaaataccaaagatgacattgaccatgagctgttcagcttaaagtatttcttcaaactcgctgctgacggtgaaactgtcgcgttggatatgcttcatactccgccggaattggtagttgcatctgaccttcctgaagtatggaaattcattcaagacaaccgagctcgtttctataccacggacatgaaggcttatcttggatatgtccgtaaacaagcgggtaagtatggcgttaagggttctcgtttagccgatttgcataaagtcctggatgttatcagagatgttcctgaatggaaatatgacgatcgtcccaagcagaaaggcattaacgaccgttggaaagttaaggacatcgccgatcgtcttccggtaggtgaattccttgagtggaccacctttacagaccataaatcaggtcagcagtatttctataatgtgttaggtcgtaaattccagacaactatcacagttaaagaaatgaagtactcccttgagaagcttgatgctgaatatggtgaacgtgctcgtaaggcagaagctaacgaaggtgtagattggaaagcactgagtcatgcccttcgtggtggtcttcagctgcaggagatttattcatccggtgaccttaagtatcctctagcacaggctcccttgattaagaaaatcaaagcgggtgagttaccgttcaaagaagttcaggatattttggaaacgaccgtggacgcagttgaacgcctggctcatcaagccgagaagaacggactgcctaagaaagtagacatgaagttctgggacgatttcgtcgagaaggtttatcttgaaaaccacaattctttctacaaataatacaatgaaggtcttcttgaattatggaagacctcataaaggtagacggtggtacttggaagcagtttgcagagagactggtcgtagagagaatgctaaattttctgctcgtcctactcgaaagcaaatccatcgttttatgtcatgggccggagaaactctccggttctcactttactgggctaaaatatgattttactttggagtgtagtagtgccaatcgttgttgcaataatttactttgtcgtgggttggtctgtctgtaagcatctaatcaaaaatggaaccatcgagaaagcaggagagtattggttttatctcatcttttggttccctgcgtttattgccggagcgattatcatgttcttccgctgggcaggtaaacttccaaaacgtatagcagaaaatgctatcaataagcatgcataactgaggagccttcgggctcctctttttgtttcaaaagaatgcacaaagtagtatacaagcacattaactaatgatactatagacctgtaccacccaaacagataaaacattggagaataaaatgaaaactttagaaatcgtcgtaaacaacattgataaagcctttaaagctgctgaagctcatggtgtagagtttgaaccaatgatggtaggagaagcgttctctaaacttgctatcatccgtggtgaaactgataacttaatcgattttgtagatgacttctatctcggttcaaaggtccgtccttactacatcaatgaaattttagaaaaataattaaaaagtagtttactttggagctgtagaatgatactatagctccatcaaaacaaaacagagtaacggagaataaaatgtcaactatcaccatcaagaaagggatttacttcggcaaagagatttcaggtacttatgagttactcggtgagtggttcccggatagcttaagtgctgaagactctcgtcagggtgatggtaaagtctttgttgaactgaatggcaaaaagcgtggtgtttgggtattcaaagatgatatcacaattgatggagtagctgctaaaattgaagttgttgaatccgttgatgaaatgaaagagcgtatcaagaaacgctttaacgtcatgggattaatgactaacggcttaattcatgggaatattcgttctctgattatctccggagcagcaggtatcggtaagacttactctttggataaagcattacaacatgcccatgatactaacgctattgattacaaatcagtgaacggtaaaatctcaggaattggtttatactgccgtctctgggaatcacgtgaagcaaattcagttctgcttattgatgatgtggatgtattctctgatatggacattcttaaccttctgaaagctgctttggattcaggggagaaacgtaaagtatgctggagcactgcatcttctttcttggaggataaaggaattcctaatgagtttgagtttgaaggtactgtggtctttatcactaacgttgatattgaccgtgaattagagcgcggttctaaacttgctccacatcttcaagccttggtatcacgttcggtttatcttgaccttggtgttcacactaatgaagagattatggtccgagttcaagatgtaataatgactacttctatgttacagaaccgtgggttaagaaattccgaagttattgaagttttggaatttatgaaagataacgtaaatcgtctgcgtaacgtgtctctccgtactgctctttatattggtgatttcgttgcgactgaccgtaaaaactggcgtgaaattgctgaagtaacaatgctgaaataatttaaacgggaggagaaatcctccctaactgaggaaaatataatggctactttaatttctaatgatgtaaaacgtgttttgtttaaaggcggaatgtatatcgttgatactcctaaaggtgatacctcttcctggactattaacgagtggattaattacattgatgaaaatggagcgtgggtacaatgagtttagcagctattaaagatattgaatgttggttaaacaatattaaagtatatccgcctggtcatatctttgcgggtaaacctaaaggcaaagcagagaaagcctgtgaagcaatctgtgaaaaactttataagtttaactttggcgacaagaaaaacgtattagctgaagtacattcttcttatcatgaactgcgcgtaatggtaaacgtatttcgtgctcctccgttcattgagctaaggaaagaatatgctaataaagtatttgatactttccttgcaaatgtgcaggatgcagtaaagcatttagacgaaatgcataaacaacaccaagatttaaatgcctattataagccttggcgtaaatcataccaagagcttaaaaatcgtattgaacttattcgttatgaggtgctaaaatgaaatgggtaatgacagaaagtgaagcctatgcagcgtatgtttcaccagacgatcgccgcagtgagttgtttggttattatggttcatattgcgttgccgaagaagcagttaaggggcagtcttggtggggctcagatggtacagttaatcgtaagccaacggaactaattacattcaccgatgaaaatggcgaatcatggacttttcctaaaagcgctgctattagtgttcaggaagaaacacctgaagctaagcgtaaacggttggaaaaaattaaagaagccgctttggctaaattaaatcctgatgaacgcgaggctctcggattatgaacaaagaatttagtactgctcgtatggtagatgcttttggatatccatgcaacggttatcgtgaatttattcacccggaagttgaaaatcaatttaaagaagttgtaagaaatattttgctcaacgcatttaaaactcaaggaactaacccgagagatttaggcatttatcttgaagaagccatcagagacgtacaaaagagcgtatcggctaaacttcattgggctgaagaaaatattgcgtggtcaaacaagaaacgttctgatttaaattggcccgctgatcgtgaacaaatcgtcaattatgctaaagggtaacccgtgtttaacactttagagtcgatatatgcaaactatgaaaggcagttaaatgctgcccgagcagaatacaagagaggtatggaggagtctgtagaatgtcttaaagatattcagacgtttgcccagaagacccagaacctcatcttgatggaccgtaaacaggtctcattggctgaagagctaaaagcctctaagatgattatagaagacaataggaaataccaactgaaattgcttaagcggcgacaacaccagtcgccatggtttaacagtgatttccgatctttttaagggccttcgggcccttttgttgtttacatcttagaaaagccatgataagatagcttcgttaactaatgaggagattgaaatgaaagcacctacttggaacgaacttcaagaaatgttcaatactgaagaagcttttggaactatttctgaaatggttgagaatttagtagattctccttcagaagataatcttctgtgtttagcgcaatttatcattgaaacctacatcgagagtcaaaaatgacagtatacgtagatgtcttgatgaatcatggttggaaaatgagaggtcatcaggtaaagaactgtcatatgtttagcgacaatattgatgagttgcacgctatggcagaagccatcggaatgaaacgttcttggttccaggataagcgagttccacactatgatttgcgcgatgttcgtcgcaagcaagcagttgctctaggagcagtagaagtatctcgtagagatgcagttctgctttggagaaaatttttcacaaagtagtttactttcggcgaggctgttgataagatggtctcgtcaaccaaactggagaataaaatgaaaactttaaccgagattatctctgcacttgttgaagaaaatcgtgtagcccgccaagcacaccgagcgaaagttgaaaaacgcgccgaggagttgaatgctggatgggcgaagacccgcttcggtcgtgaatactttgataaagtggtagctcctacttggggcaaagacgatcgtcctcatgctccctttgatggctatctttgggagaatgaattaggtgaagttgaagcttatcacgcaggcagttacttgccgtatgttacagaattggattcactggataagcctgagtataccggtgaccacggctggtggaaaatccgcttaactcaagaagagtacaaagaacttcgggagtatggttatcctcttgaagtacgcattccgtataaagagtggaaactgcaagacggaacagatgttgttatggcagaagttagagctcataagagcatcttagaggctatccaggaacattcaaaagaggtctttgataatatattcaatgagctgaataagaataaaggggatgcaccggaaggacgagtgactgtctctggtaccgtaacgtcagtaaaagtttatgaagactattacggcgtacaatgtaagatgatggttgtacttgagaatggagctacggtttacggctcccttccaaaaagtattccgtttgaatacagaggcaaagtacagtttactgctacatttgaattagcgaaagatgataaaactcatgctttctataagcgcccaagcaaagttataatgcttgaggaataattgttgtataatgggttcagggagattttgagatactctttgagcccagtccaaaatagaggaaaagataatgaataagaatgaattaaagatgtttgtagccggtgaatttgataaacataatggaaaggggttgtcaaaacgtgagaagcacgtaaaggttttggcagctttacatgatttaaatccagctgcttataacgtagcaattgctggtaatgtagctcggcgtgtgctaaatagcatggcagcgcatgaagccaattatgctggttttgttgtagaaaacattcgtcgttctcgctggttaggtgcaatgtcagcagagaaacagctcaaaaagtttgctatcggcaatgctaaaatttacggtcagcgttatagctttgcggcaggggcgtttaaaactgaagaaagacatgaccgtagcgctgctcaaatcttctgctctgaatttaatgcaaacctgcgtcgtattcttaatcgttcaatttgcttacttaaaggcgatgaccgcgtgaaataccaggcatcttctactagttctagaaatcctaagggtgtttcatttattcgtgccgaagagcttgacaatgtaactgtacgaattcatattaatagtcatttgtccagcggaaagtatccggctcgggcgcttttagcgcaagttcgtactgcattagaacatatggatgtagttaaaaaatcatgctgtaaacagcaaggtgaaaactcatctgttcttgaagtacatttggacccatttaagatttttcccaaaacattgagcaccaccccagttattgatgaagatgtagcacatatgtatctcaatgttgttaaacctcttccattaacaccagtaaatcatattgaaatcgctaagaatagtattactgccgaaatggaatcagttaagcggtttattgatacaaaagaagctgaattggctaaacatgaattagctatggcagatttagtcaaatcgcttaacgaatacaaagagcgttatgaatctctcgagtatgcccggagcttactgtgaaaaatcaattaaaagaagacatggtcgttgatgataacgaccttgaaattgagtttgagtatccacctgtacctgaatttaaaattgactgggatgcctgtcttgaaatggtagaccgtcgagaagctgcagctaaacaagttgtgccttgtgaaaaatgtggtagtattcaagtacagcttgtcgattggacaaccgatattctgaaaatgaaatgtcggacttgtaagcataaatttgagagaaaattaaaatgattactaaaactattactggtgctaatactaagttttttgtcgagtatgctaataacctcataaaagacaaaaactttgataatatcattgcagatatgattcttgacgcatacgaaagtggcatcgaccctatgcagcttaaagaatatcttcgagcgacaatggattttacagttcttaacatgatgcttagaactgatactgaattcaatgaaatgattgctctgcgtaatgaaggcaagttcaatttgactgatgacgaagtattagcgtgtgctgctcacgaagcttggaagaaggtgattaaatgaaaaccactggcgcgctttggaaagaattttataacgatgaagccttctgggaaggctattatcatgatgacactttaatcctctttgatgatgttgaagtagaagaatatgaagacccttcacctgatgcggtagtaaaaattgaaagcggatatgtttacaaaaccgatgatttcttcacttcccatgatttgagtcttgcaactttctttaaacgttggaaaaagaaacagaccgctcgcactatagtagtcactgttgataaagataactttgacgaagtatttgaaactatctctaatattcctggagtgaaaaaggtaaaatgattgacattaaattagatacttatgcagtacgccagttattcccagaaggtacagcagcccgtgctcaactgcaacagtcagtaatcaataacatcgttaaagaaatggtgttaaaagattcccagaataaactaaaacaagcagtacaatctgaagttaatattgctgctgtgactattccagatgtccgggcagaagttaagaagcaagttcagcagatgttccatactcgtggttggaacgaaatgtccgctaaagaagaaatgtctcagatgatgcgtaacgctgcccaatcatgcgctaaaaatgctattgatgatatggttcgtcaaactattgatgacgctgttaagcaagctgaaggtcgtattaagatgtctattgaaagagctaatctccgaattcaagaaatcattgttaatgcaatgaataagaatttcgctgatcaaattaacgctgccattgctgctaaattggcagaacacttcccggtaactgctaatggataaaattgatttcagcaaactaaaagtgccacgtatgggaattcctgatgatattgccaagcaattagctagcgttcaaccaatgccagataattgcatcaaagatattctcgatgcgttagatggtaaaacattagttataactactaaggctgaaaatggctcgtaaacgatatatggaagaagccgaacgagtaatgctactcatgtattcggtttattataatgagactggtcaaattgctaacagttccaatctcaaaggagctatgacccgtggaagaaattttgcccaagctgcaattgatggcgaagtcactaagcgtcttggaatgactaacgtctataaagcgtataaccacccgagttggaaccaagttcaagctcaagtatttaaggaaatagaagaagatgttcacggtttttggttacgacagcagcattcataagtgtgtattttgcgataatgcaaagcgtctgctcgatgttaagaaacaagaatatgcattcatcaacgtaatgccagaaaaaggtgtatttgatgaagtagttatcagtgatttgcttcgtcgtttgggacgtgaatcacaagttggattaactatgcctcagatttttgctcctgatggcacacatatcggtggttttgatgaactccgtaaattcaaattcaatgcatgattatcgtggaaccctccttcgggagggtgatattgtagctctttattatggttacggtggattggaaactggtgaaattaagcagattaagaatcaccgagcgaaggtagaggtaacttactctaatggagctaaagttatgtctaaatggaaatatggcgaatgcatggttaaattatgattagcatgaggaagaactatgagttatgatattggtgatttaaaagctccacgcatggtaactatttcagcggaagagcttgaacgcttgcaagcaattgaagaactgttgtgggaaattgagtgtgcgcttccatccggtttagaaagctggattgatgatgaagacttacagaagctgcgaggttaaaatgactaacgctgaattagtaaaagaaatcaagcatatcgctggcgtcactggcggttgggacgacaactacgatttcgaatatccgcctaatgcaccagacgatgatgcagaagaaatctttgttttaatagaagatggagattggacccaagagcacaagtatcaagaccgttcgcagatttggtattacccagcgcgtggtgttcatttcatggtatcagaatcccgttcaggttcatatcatactgattggtattataatcctcctgaagtagatatcgttactcgccatgaaaaagtggttactcgtactgaagttgaatggcgtattgaatacgattctgttaatgattctgaaccaacaccatgcaaagtagcaaaggtttaaaaccatggtatgcggctcggtgggaaactgtcgagccagaggaagatgctattcctgaagaagattataatacttctgaacctaccataaacgaactacttgattatgaggacaaagtgaatgggacttattggtaagcagtttgaagttattgagaatgatgatgaactgagcgaacaatttcctatgttcattccgggatttaagttccaagtcatttctgtagttaatgaagatgaccttgaaatgtgtggaattactgctgtaattgatttgctgacaaataaaatcattactattaacgacccaactccacacggcgaatcttggttctggtgtttctacagcgaagatacgatgcaccaaattaaagaaattggtcaaggtgaagatgttcctctgatttctgaaattaaacttaaccatttccaaggtgcaatcgttccaattaccagagctctttatgcctttgctggacaggaaaattgtgattcagaagagtatgatttaatgcaaaaagctgcggattacattgtcgcacttgaacaacgtcttggagttcgccatgtctaaatcgtgcattactaaaactattacagtaaaaattctcgatttcgctgatattcatcgtgttacaagagaaattttacgcagtcattggtatgaagttggcgatgtagtagaatttagtggaggctattacgacgatgacatcaatggaatggcttggactaaaatgagtcttcttcatgaagaaactaattcatatattgagttcaatgcggatgattatgaaggcatctatgctttctgtacttcattctgcatcaaagaatctaatcataatgtatatagtagttactcgttaatttaactataaatactcttatctaatcgctgaggtaagagtatgttattaaccggtaagttatataaagaagaaaaagaaaaactatatcaggcacagaacggattatgtccttgctgcaaacgtcctttagatgaggatattcaaaagaaccacctcgaccatgaccatgcgttagaaggtgacaatgcaggaaaggtcagaggcttgctctgtaacctgtgtaatgcggcagaaggccaaatgaagcataagttcaaccgttctggtttaaaaggtcaagatattgactacctcgaatggctagagaatttgctggtctatctccgccagaatcgtaaagacagtaatattcacccgcaatatgttgccgatatggctaaacgcttttcacgtcttggtaaacctgagatgattgctgaaatggaattgcatgggtttacatacgaggaaagtgatggaaaatcacaacttgcttcaaaatacaagaagcagcttcgtaagagtttaaaatgaatatcgaattagaaatccagggacttattaataaaaccaacaaggaccttttaaacgagaatgctaacaaagattctcgtgtttttcctacccaacgtgacctgatggctggtatcgtatctaaacatatcgccaatcaggtcattcctttctctgtaatggaagcacacaaagaaggtgttatccattttcatgatatggactacagtccagctttgcctttcaccaactgctgtttggtagatttgaagggtatgttgcagaatggctttaaacttggtaacgctcaaattgaaactcctaagagtattggagtagctactgctattatggcgcaaatcactgcacaggtagcatctcaccaatatggtggaactacatttgctaatgtcgatttagttctggctccttatgtagagaagacattcgctaaacacgtacgtgatgctcgcaaatatcaagtagcattagtaaaagattatgctatttcaaaaacagaaaaagacgtatttgatgctttccaggcatatgaatatgaagtgaatactttgttcagttcaaatggccaaactccgtttgtgactatcacatttggtatgggcacgtcatgggaagaaaaattaattcaacgagctattcttgataatcgtattcgtggattaggacgtgatggaattactccaatctttccaaagcttgtgatgtttgtagaagaaggcattaatctacgcaaagaagacccgaactatgatattaagcagcttgcattagaatgcgcagctaaacgtatgtatcctgatatcatcagtgctcgaaataatagagcaattacaggttcagaaactcctgtatctccaatgggctgtagaagtttccttggtgcttggagagactcttctggcaaacccgttcttgatggccgtaataatctaggggtagtaacactgaacctccctaggatagctctggatgcaaattataaaagttcagatgacagtaataaactgttcaaactactggatgaacgtcttgatatttgtaaagaagctcttttaactagaattaaatcccttgaaggtgttactgcatcagttgctcctattctttaccaggaaggtgcttttggtgtgcgtatgaaacctgatgatgaaattcttgagctattcaaaaatggacgtagttcaatttcattaggatatattggcattcacgaatttgatatgcttacttttaaaggaagcggtaaactcgtcctgaagtacatcaacactaagctaaacaagtggacagaagaaaccggctatgcctttagtctgtactcaactccggctgaaagtctgtgctatcgtttctgtaagattgaccaagccaaatttggtgatgttaagggcgtaactgataaaggatggtacactaacagtttccatgtgtcagtagaagaaaacctgtcgccttttgaaaaaattgaccgtgaagcaccatatcattctattgctaaaggtggtcatatttcttatgttgaacttcctgacatgaagcgcaaccttgaaggtcttgaagcggtatgggactatgctatcgagaagttggattattttggtgttaatatgccagtagataaatgcctttcttgtggttctactcatgagatgacacctactgaaaacggattcacgtgttcaatttgtggtgaaactgatccaaagaaaatgaatacaatccgtaggacttgcggctatcttggtaatccttctgagcgtgggttcaatcttggtaagaacaaagaaattatgcatagggtaaaacatgttagagaaaccaatgaagcaagttgattggaaccaacttagcgaatggggattgatttggaaaatcaacaaagaggttctgcatccgcttggaattgctataacccgtgaccccgaaagtggattatcggctggggctattcaaactgatgaaccctggaaatatgatgcagaagtagaagcacgtaatgaggtaagattcaatgaatttcgacagaatctattcaaatctagttaattctgctgaacacccatctaagccccgtcaaactaaagccgggtatgaacttcatcatataattccaagaagtatgggtggttcagatgatttagacaacttagtatttttaacttataaggcccactatactgctcaccatttattggctaaaatatatggtggaaagatgtatgatgcatattggataatgagtaatagtaagcatagaaaagttacttcttcacaatacgcgtatgcaaaagctaagaaatttgaaaatcagcgtggcgcaaaaagaagcgataaaactaagaagctaatgagcatagctaggtctaaagtaactcttcctgatgattttggaaaaaggatatctgatgggctaacaggaagaactttgtctactaatcataaagagcatatcaaaaatagttctagaaatcgctttaacaccaaaacggttattggctattcaccagacggaaatacaatagaactaactggagcaactgaaataagaaatgcaggattttttcattctgctgtttataaatgttgcaaaggaattcaatctattcataagggatatacttggaaatataaagatgaattatgatagaatttatccatgcgatttcgttaacggccctggatgtagggtcgttctcttcgtcactggatgtttgcataaatgcgaaggttgttataatcgtagtacatggaatgctagaaacggccagttattcactatgaatactgttaaagagcttgcatcccatttaagcaaatcgtatatccaaggtcttaccttaaccggtggtgacccactttatccgcagaatcgggaagagatttcaaatttagtttcttgggttaaagcaagatttccggagaaagatatctggatgtggacaggatataagtttgaagatatcaaagatttagatttgctacaacacatcgatgttataattgatgggaaatatgagaaatcactgccaactactaaaaactggcgtggttctgacaaccaaagactctgggtaagaaatggttctacctggacacatgattgaggaaatttatatgctgacttacaaaattatgtttactctgaaccacatggctactgaactgtttggaccagaatttctggctatgacagcattcatcttaactatttaaggaaaattatgaaattcattaatgctattcgtaaatttatttctaatgttattgcgctggttgcattaaccgcaggtgctttcgtagctattccatttattgttcttattatcatcgcagattggattaatcctaccaagaaagatgaaaagttatctaatgaagaatttcagaagcgtgttaatactctgactgctaaactccaacaggtcatgaaatgatagaattattttattgcgataagtggtacaagtttaaagaagactctgttgataaatggctaaataacgcgtcgtcaaaagatgttgaattctacaacatgcttaagtttaaaccatttttggtaacagctctgacacaggacgggtctgttgaacgagttaagacattcaatggtgttagcatagatgctgatgattttgatcagtggtgtatacttaatgatgctgaccgttgctatctcgaagaagccactgttgacaaaatttatcctatgactacagcggataaacttgaattaattgaaagattgatttctgagattaaggctgaactatgatagaaatctatggcatccctgaagaagtttggagatgccctggatgtaaagcagttcgtgacttgctcgataagctgcaacttccatatgagttctataatgtaatcaacgaggttgacggtcagccggtttatgaccgtccgttgattgagtcacttgctaaacgcatcgggtgctatccatcgctttctattcggtatcctgtcatttttatggataacgttaagcagtatgacattccaacatttaaagccaatcttattgctgctgggcatgacccagatatcatagaagattaaccggttcctttctaaggtcatcttgaccaccttctgtatatttctatacccttcatttagaggttcctatgggacctctcttttattttaaattcatttcacaaagttgtttacaagccagttgatgagtgatactatagctctatcaacggataacagcataccgtttaactcgagaggaaaatatgaactggttaaattggcaagaagctctagaagctatgagtaaaggatgtatcgttaagcatgagtattttactgatgacgagtacttctatatgcgtaatggcgctatccgtgacgagaacggatatgatatgactcgctggtacaagggtgagtcttggcaaaacgaacattggtacatcgcatgaaaacgtttaatgtaggtgatatcgtccgtaccagaatttgggatgggcttcaatttgaagtagttgtctacgtcggttcagagggggttctgcttcaccgaattaacaatctgattgagtggcaacttgaacgcttcgtgaaatatcatgaattaaatagctaccactgtactgtagctccggttgctagtaaagaatactacgatatgctcgaagagctaaaatctctcaaagattgatttgctacaggagatttgatttagaatctcctttgtcaaaacaatcgttactgaggaaattaatatgtcccaagcaatcaaaaacgtactgaactcttttgcttatgataaagtatctgcaatgctggaagaaggacgttgtgtaactccgtctttgcttgatcagtgggaagttgagcttcacggtacgatgaaagaagaaggccaaaaaattggtaaagcccgcatccgtgaattagtagttgcttatcttctgtctgaatttggcatcaaagccttcggtgtagaaccaatcaccccaggtattggtgaaatttctgaaaccactattcgcaaaatgaaaaaccagcgcaagaaaggcttccgcgatgttaaagcggttaaggcggcgaaatgatttcatatatcgtatgcgcatctattcctaccgggatatggcatagaaggattaaatgtatcagagcacattctgaacctgatatcagtcaggctaaacgaatactcaaaaatcaattggatgaagatactgatataattattagagtatttccaattgattcatctactctagaaaaccaacttccatctccatcagagatgtggcaagaaggtttaaacgagcaagaactgcgagagtatcttgatgcgtaaagttattctatatacagaaatttttactaatcgttgggtatttgatagtattttgcttgctgataccaagtttgctgatgacattggcagagctagaaactagcatatgaattagcagaaaaatccccaacatttgtacgtatttcatacattgtaacaacttccgattacgtgtataaagtatcaaaagaagcattatacagattttgtaatgttatgatttcttctggaaaagcattaaactataatcaattggtggaaattttaaatgactgaagaacagattgcagaagttggttttcttggatggttcatatctaaaacgcctgatggcagaaacacgattgaaactcctaacggggaattcatcattgaagaagattttgacgcgttttggatttatgaacgctctggtgagaatgaatacacatctgtagatgctttctctaaatttgaagatgctattgactcggtgaaagcatggctaaagtaaaccaaattatgattgtagtagaaggcattggcggatttactatagattcttatatgggtgtttggtttgacaatgaagagggcatgtattgggaaacgcatgcctctatgttaaatgaaactcattatgaaagtttatactcttcattcatggaaatgatgcatgaagtagatgaatctgattggtttgaacttagtttggttgagttcaaacgtatcatggaacagctgttccaatgctatcgtattatgaagggtgaactatgaaaattcaattgactcttacacatgaaaatattaaaggtgtgttctgtcttgaaaatagccaaataacttttgcacaagatggaacgtactggtatgctgaaaccgacagtatcgctgactatggaatggaacgtgtatttgaagattttgaatgcgtaattgaagttccatcagatttcacatataacgatttttatcgtatcatgatgaaattaattgcatgcgctgaattgattaagtaatgctttaatcctctcgcttcccaaatttgttataatagatattattaattgaagcgaagaggcaatatgagtaattatgtaaataacaaggaactgtataaatcaatctgtgcatggaaagagaagtgtcgggagtctgaagctgctggcggccctcgagtagtaaaacagaacgatacgatcggccttgctattatgctgatcgctgaaggtctgagtaagcgtttcaacttttcaggatacacccaatcctggaagcaagaaatgatttcagacgggattgaagccgcaattaaaggcttaatcaacttcgatgaaactaagtatgataacccgcatgcgtatataacccaagcttgtttcaatgcattcgttcagcgtatcaaaaaagaacgcaaagaaatggcaaagaaatacagctattttgtccacaacgtgtatgattcacgggacgatgatatggttgcgttagcagatgaaacctttattcaggacatctacgataaaatgacgcagtatgaatccaccgcttataaggcgccagggtctgctaaaaagagcgaacctacaagtgatggacctaatctggaatttttatatgaggctgaagattaacctcgacgggtttttagaagatgtgcaagacctagacgctatcccttatttgctaaagatgtatttaagggaggtgcttgatcttgatattcacattgacccgaaaaatccacatgacgctgatttcagatcagattctgctataattgaacatagttataattggactgatactgaattcacatttgaaataaattaccatccaaaggaataacatgaacaatattacccaggaagagcgcgacgaactgcagcagaaactaatggaagcggcagaagaacaagctattgctcgagccaacaaaattgttcgtaaaaaccgtcgtgaaattgagcgattaaaagctcatgctggagacgcggtattagacaacaatttccctgcttacaagtatgctattgaaaaactgcgtactattttaaaacaaccttttaccgatgagattattctcacctgttggaatacctctcgtaaatctgtttgggacattctaaatgctggtacaagtaaaatttaaacgtgttcgtaaagacgcaggatttactttgaacactgctaccggaacaatggcagtaaaagtagcagataatcaatatcgtgtgttaggttctaccgaaggatgtaagctaatagataagaactctcttgtctgggttgacaccttccaagttaaacggtggtatgaatggtaaatgaagagaactggggattcattgatttagatgaacaccctgattttattactagtgaagagaattgggatgtatgacgaatttgatgggttctaatcctgggcatgattggccggaaggaaattacgcgtgtcggtgtagtaattgttcagaacgttatacaggaccaaagcgtagttacttctgctataaatgcgataccgccaggagagaagcacccgctcccgattatgaagcaattcgtaatgctaagatagatatgctcaagcgctttgaagaagctaagcgtatatgcgaagctgcgggttatgttgtatacaagaaaatttaaagggcttcggcccttttgctttattacgggaatggtaaaatatccaaaattaacaacaaaggtcaatatatgaagattaatattttaatggctcgcggacttgagggatgcggcgtaaccaagttcagtctcgagcaccgtgagtggttagtaaaacatggccatgaagtaaatatcatttacgctaaagataaagcgtttactcgtaatagagcacatagctataaagatgtaactattcctgtgtctcttgcagatgactacgataagactttatctctgcttaacgcatgtgacattcttatcattaactcagtacctgctgtcaacgctccagaggcagcgattgataactataagaagctcatagagaacattaaacctgaagttcgggtagtcgtatatcaacatgaccatagagcattgtcacttcgtagaaatgctggtcttgaagaaaccgttaagcgtgctgatgtactgtttagtcatagctcaaacggcgattttaataccgtgctaatggaagaatattttccaagcggcgggttgagtttctttgatgattctgactcagctcctccggtttataactttcaacctgctatgaacatcaaagcaattcgcgataagtattggaaagacttctctgccattgattttgatatccatcgttggattggtcgtactactacgtggaaaggctatttcttgatgtttggctttcatgaaagtcatctgcgtcccgcaggcaaaacgactatcttggaagggctagaacgcagtcctgcatttattaacatcaaagaacgctatgaaattgattattgccgccattatcatcaggttaaaactgggccaggtctgaatcctcaagttcttgaccgatatgttaactctgaaatgcttgagcgtatgtctcagtctggatttggatatcagctgtcacgtcttccggataaattccttgagcgttcactggaatacacacatttagaactaggcgcttgtggaactattcctgtgtttcataaagctactggtgatgctttgaaattccgggttgatggaaagccgttgacttctcatgattctggcattttgtggttgaatgatgaaaataaaaatgaagtctttgaacgaatgaaacatctgtcatctgaccagaagctctatgataaagagcgaaataaagcatttgaattcctggtagaacaccaagattctgagcattgctttaaagaacaatttgagttaatgacaaaataagtaatgggccttcgggccctttttgctattcacggaataatataaaattaaactctactagagaggttatatgaaaattattcactcaggcgattggcatttaggtgtccgcgcagatgacccgtgggtacaggatgtacagcgacacggaattaaacagcatattgattatgccaaaaaacatggaattaaaactatcattcaatacggtgatatttttgacgttcgtaaagctatcactcataagacaatggaatttgctcgtgaaattgcagagtctcttgagaaagaaggaattaatttaatcacggttgtagggaatcatgatgctcactacaagaatacgttgacgcctaatgcatcaaccgaagttcttggtaagtataagcatattactgttattgaaaagcccgtgactatggattttgatgggactttgattgacttgtgcccatggatgtgtgaagagaacacatcagaaatcatgaagcatatcaaagaatcgtctgctgaatactgcattggtcattgggagcttaatggcttttatttttataaaggaatgaaatctcatgggctggaaccagatttcctcaaaaagtacaaacaagtatggtctgggcacttccacaccatatcaagcgcagcaaacgttaagtacatcggaacgccttggacgcttacagcgggtgacgagaacgacccacgcggcttctgggttcaagacactgaattatcaacctttgatttcgtccctaacgaaatcacttggcacagaaaactgatttatcctgtcacagggaaagttgattttgaagagtttagaaatcttgcagtgcgaattattatcactgcggtcgatgaagaccttcctaagtttgaatcagaacttgaaaaggtagtacatgaattaagaactgtttctaaagttgacaactcggttgagtctgaagatggcgaagaagtagaagttaaaagcttattggatttaatggaagaatatatccaagcacttgaagacctgtccgcagatgatatcaaagccttaaaggttatgtctaaacagttatacattgaggcacaaaatcagtgaagacttttaaactaaatcgtgtcaagtataagaatataatgtcagttggccaagcggccattgacattcaacttgataaatgccaaaagaccttaatcacaggtaagaatggtggtggcaaaagtactatgctcgaagctattacttttgccttatttggtaaaccgttccgtgatattaagaaaggtcaattaattaactccttcaataagaaggactctgtagtagaactgtggatggagtatgacggtcatagtttctacattaaacgtgggcaaaaaccgaatgtctttgagattttacgagatggcaataagcttgatgaagccgcaagttcaaaggattttcaatcctactttgaaagtctcatcggcatgtcatacacatcgtttaagcagattgtcgtattaggaacggcaggatatactccgttcatggggttatcaactgctaatagacgaaagctcgttgaagatttgcttgaagtgtctcttttggctgatatggacaaactgaacaagacacagataagagaaatcaatcagcaaatccaggttaataatgttcagcgtgaagcgttgactaatgaaattaaaactcatcatgagtatgcagaaaagcagaagaaactttctggtgataatgtagctcgtctgcaagcgatgtatgatgagcaagtgaaagaggcacgaggatataaagcagaattagaaactcttcagagagaactgcttgagttagtaattggagacgacccagcagagtcaatccaagaagttcaaggtaaaacatttaaaattcggtctaaaattgaatcatattcaaaggttcttggactgtatgataaaggtggtcattgcccaacgtgcttgcaggatttgcattctaatgacactctaatcactaagattaatcatcatgttgaagaatgtaataccattcttggtgagttaaagacgcgccagagtgaactggatgaactagctcgcgagtataacactattcgtacgcgtgcaagagacatcaaaaatcaaatgagtaatttgaaacagatgactatcactgctgtggaaaaggcacgtcgtattaaagcagctattgataaagcatcccaggagtttattgataactctgacaagattgaattgctacaagaggaattagataaaattatcctcgtcaaaactaatttggttatggaaaaatatcgtcgtggtattttaactgaaatgctgaaagactccggtattaaaggagctatcatcaagaagtacatcccgatgttcaataagcaaattaacagctacctaaaaattatggaagctgattattcgttcacactgaacgaagagttctctgaaacgattaaatcgcgtggacgagaagagtttagttatgcctcgtttagtcagggtgaaaaagccagaattgatatagcattactattcacatggcgtgatattgctgaaaaagtttctggtgttaaaataaactgtctgttccttgacgaagtctacgattcggccaccgacgcagaaggtgttaaagcaataactgctattctggataagatggtagatgctaatgtgtttattatttctcaccgtgaccatgacccacaggcatatggccaacaccttcaaatgaagaaggtcggacgattcacggtgatggaatgaatgagtttactacgggccaacatctgttggcctttcctgaagtaaagcgttatgtgttagttaatttattttctgatgagcaacatctcgtaactgaagaaatgttacgagatgcttttacgggaaatgaatataatagagtcatgtccaacaggaatcccggttggatggttgaagattattacgattaaggtaaatataatgattaattttgttgatgtgaaagatatccaggttaaaaacgtacgtgcagattccaacccgaataaccaaaatcgtattcgtaagtcttgggttctggctctgaccgaagaaactaaacaggctatcaaggataagattaaagattccgaagctcgctttgctttctataaatctatcgatgatgaagtcgcagaaaaatggattgaactgatgcgtaagcattacaatgaatcaatcaaggctggtgctaaaattgttactgatcgtcacggtggcgaacgtctagaaaatgattactgtgtagatgctgatgagcaactcgttgcggcaggtcagattgttgcagaagaattaactgctacattcgcagcttgatataattatcctgaacttaattaaaaggtattgaaatgaaattctctaaagaaactctgaacattctgaaaaacttctccaccatcaactccggtatcatgctgaaacctggcaattttatcatgactcgtgctgttaatggtacgacttatgctgaagcaacaatttctgataccatcgatactgatgtagcaatttatgacctgaacagttttctgagcattctgtctctggttggtgacgatgcagatattatcatgcaggaagatggtaacctggcaattaaagatgctcgctcaactatcttctggccagcagctgacccgagcacaatcgtgttcccgactaaaccaatcccattcccggtggcaaacgtaattatcgattttaaaggtgaagacctgcaacagctgatgcgagtatctcgtggcatgcagattgacacaattgctatcaccaatgttgatggtaaaattgttctgcgcggttataacaaagtagaagatgctgcactgacccgtccgaagtattctctgacactcggtgattatgaaggtgacggtaactttaactttatcatcaacatgagcaatatgaagatgaccatcggtgattataaactgatgctgtgggcaaaaatgaacggttccaagaaacagactgccgcaaaatttgaaggtgcatcagcctcttatgtagtagcaatggaagcagacagtacctttgattttgagtaataacttcggggcttcggccccatctttaatctgaatgaggaaatataaatgaaattgacagtaaacgaagcagacttcatgtgggaacagaaatatcgtccaggcactatttctgagtgtgtacttcctgctgaagataaagaaattttttcagctttagtagctaaaggaaaaattcctcatttaattctccatagcacttctcctggtactggtaagactacagtagctaaagcattgtgtaatgacattaatgccgaaatgatgttcgtgaatggttctgactgtaagattgatttcgttcgtggaccgttaactgcatttgcaagttctgcttctattgcaggcaagcagaaaattatcgtgattgacgaatttgaccgtgcaggtcttgcagaatctcaacgacatctgcgttcattcatggaagcgtatagcacaaactgtactattatcattactgcaaacaatcttgacggtatcattaaacctcttcagtctcgttgccgtgtaattaattttggtaaaccatctccatctgatgttaagccaatgcaaatcgagatgctcaaacgttgtctcgcaatttgtgaaaatgaaggcgtggtagttgaagataagaaagttgtagctgctttggtcaaaaagaatttcccagaattccgtaagaccatcaacatgcttgatcattattcttctaagggtgtgattgatgcaggtatcttgtctatcgttctgaatgaccgtggttcaattgaagatgtcatcgaagctattaaaactaagaacatcaaagaactccgtgctcttgctccgaaatatgcagcagactatacttggtttgtagataaactttcttctgagctgtatacaatggttactggcccaagcattatccgaatgtatgaaatcatcggtgaaaataaccagtatcatggcatagcagcttcgattgaattacatttggtttatatgcttattcaacttgttgtagagatgcagtggaaatgatgagtttatttgaagatgatgatcagtataacgagcaccaaatagcgtggttaggtaaagactggacgaaagtccaggaattatctgattcatataaagaaaaagcagaaaatcaattcttcacaattatcgggtctattaacgaaaagcaagagcatttgaatatctcgacgatggattattcaaaattcatggttgaaaacgctctttctcaacaccctgactgtatgccttcggtttatgttatgaaccttgttggtcaagggttatctgaccaagcacactataactatatgatggcctctgttcctagaggtcgtcggtatgggaaatgggctaagttaacagaaaacatccaggatgcattgattcttcaagttataatgacatattacaaggtcaatgcgattgatgctaggatgtatagagagaccctggaagctaaaaacaagcttaaacctgctctcaagaaaatgaaaggtcttgtgactgatgaattggtcaagacaatcacgaaaaacgtgaaagaacagaaaactcttaagaaaacagcattggaatggtaaagatgattgaaattacactgaaacagcctgaagacttcctgaaagttaaagaaactctgactcgtatgggaattgctaataacaaagataaatatatttatcaatcatgtcatattcttcagaaacaaggacgatactatattgtccacttcaaagagatgcttaaacttgatggacgtccagtaacaattgatttagaagacattgctcgccgtgattctattgcccaattactggaacagtggggattgcttatcatcaatagagggcaaactctacatgaaatgcagaataattttagagttatttcattcaaaagcaagaatgaatggactcttaaatccaaatatacgatagggtgttaattgaattatagaaaaatctattttcaacttattgagcgggcaaaaacccgctcagatttatctggatatacagaaatacatcatgttattccaaaatctttaggaggaactgatttaaaatcaaatttagttaaattaacagctagagagcatttcattgctcattggttattaactaaggtttatgatagtaataaaatgatattcgcattttggaaaatgtgtaatggaaataatacaaatagatatgtatcttcgcacggatatcaaagtgctaaattaaaatttagcaatgctatgaaagaacgaaaactttccgatttacataaaaataaaataagtgattctctttctggtagaaaactttctattactcatatacaagctattaagcattctaaatcttttgtttcacttgaaactagaaagaaaatgagtgaatctgggaaaataaaaatttttacaaaatcacatcgtaaaaatttaagtttagcaaaaattggacacgctgtatctaaagaaaccaaacttaaaatgtcaaaggggcagaaaatctcgcagcggaagtatccgcattggaattattatgatgagctttttgatatctggaaatggctaaattgcccaggtagaaaggctttcagaaaagaagtttataatattggatatccggatgtagattatgcatcaatgataagaaattttaaagatgaaaaataaaggccttcgggccttttactttataaaactcggagtataattatcccacctaaagactaataactcggtctataaacaaaggaaacccatgaaagaattttatattagcgttgaatctctaggcaatgacattgtagaacgttatatcgattctactggcgaagaacgtatgcgtcgtgttccgtattctcctgtgatgtttagtcattgcatggaagaaacaaagtacaaagatatctacggcaagtattgcaagaaaaatacattcccaactatgaaagatgcccgcgattggatgcgtcgtatggaagatatgggaatggaagcaatgggtatggatgatttcaaactcgcgtatatcagtgatacttacggttcagaaatcgtctataataaaaaattcatccgaattgcaaactgtgacattgaggttactgcatctcaattcccagacccaatgaaagcagagtatgaaattgacgctatcactcattacgattcggttgatgataagttctacgtatttgatttactgcattctctttatggttctgtttccgagtgggacaagaaacttgctgctcgtttagattctgaaggcggtgatgaagttccacaacatattcttgaccgcgtagtatatatgccgttcaattcagaaaaagaaatgatgcttgagtacatcaatctttgggaacagaaatgcccagcaatctttactggatggaacattgaaggatttgatattccgtacatcatgaatcgtgtgaaacagattcttggtgagcgtgcgatgaaacggttctctcctctgaataaagtttcatctaagattatcacaaacatgtatggtgataaagaaatttattctatcatgggtgtgactattcttgattacatggatttgtataagaagtttagtttcactaaccaaccgacgtataagttggatttcattgcttattatgaaaccaagaaaggtaaattagcatatgacggtccgatcaataagttgcgtgaaactaatcaccaacggtatatttcgtataacatcatcgacgttgaatcagtacaagcgattgatgctgttcgcggatttattgacctggctatctcgatgtcttattatgcgaagatgccataccaaggtgtaatgagtccaattaaaacctgggacgcaatcatctttaacagtctgaaagaacaagacaaagttattccgcaaagtcgttctcatgttaaacagtcatatcctggtgcgtatgttaaggaaccagttcctgctgcatatcgttatatcatgtcgtttgacttgacatctctgtatccgtcaatcatccgacaggttaatatttcaccagaaaccatcgttgggcagtttaaacttcatccgttgggtgagtacattaacaagactgctcctcgtccgtctgatgaatattcatgttcaccaaatggttggatgtatcgtaaagatgtagatggtgtcattccagttgaaatcgcgaaggtattttatcagcgtaaagagtggaaaaataaaatgatgggtgccaaacgaaatcaagaactgattaaaaaggttctgaatgataagaagtttggaactatcgataaattcgcagaagttaatgtctatgaagatttctctgatgatatgaaagcagaactgctgacatataccgaagagtgtcttgacaaactgatgtttgaatgtaaacacgctgaaatcttgggtaacactaaccagttaaaccgtaagattctgatcaactcactttatggtgcattgggtaacatttacttccgttattatgatttgcgtaacgcatcagcaatcacattgtttggtcaaatggcaattcaatggattgaacgtaaagttaatgaatacctcaacaaggtatgtggtactgaaggacattcgtttgtagtagctggtgatactgactcaatttacgtttgtgttgataaggttatcgagaaggtaggtcttgagcgtttcaaagaaactaacgatttggtcgaattcctgaaccaattcggcaagaagaaaatggaaccttggattgaccaatcatatcgtgagatgtgtgaatacatgaacaacaaagaacatttaatgttcatggaccgtgaagctatttcttgtcctccgttggggtcaaacggcattggcggattctggaaagcgaagaaacgatatgctctgaacgtgtatgatatggaaggtactcgatatgcagaaccacacctgaaaatcatgggtatggaaacacagcaaagttctacaccaactgctgttcagaatgcattggaagaatctattcggcgtatgctgcaggaaggtgaagaatctttacagcagtactataagcagttcgagtctgaatatcgtgagcttgactataaagtaatcgcagaggttaagaccgccaataacatcggtaagtatgatgatggtgcaggatatccagataaaggtactccatatcacgttaaaggtgctttagcgtataaccgagctaccgcaggctttgaaggtataacaccaatcatggaaggcgagaaggtgatggtcatccctctgcgtgaaggtaacccgtacggtgagaaatgtatggcatggccatcgggcactgagctgccacaagaaatccgacaggaagttctagtgtggcttgaccacagtgttctgttccaaaaatcgttcgttaaacctctgacgggtatgtctgaagcggcagggttagactatgaagagaaatcgtctcttcttgacatgttcgatttttaaaaaagttgtttactttaccacaaggatgtggtactatagctctcgaaataacatactgaggagattacaatgaaatcgttacttgctgttattgttgctcttacactgactggttgtcaaatgccacaaggtgatatcgtcccggcttcttctgttggacaggtgcgagcaattggcggtactgtaggatactatcgtgctagcaaccaggtctctgctgaatcgctcgcggttgagcgtcggttggcgaaagaaaacgccaatcctaatcgtcagctatctgcgatggaactcgacatgattgagcagaataagcatgaactggaagaaattaagcgtctgcgtaaaactcaaaaagaacgtacatgcactgctcaagcggcagcagtgaatgaccagattcgtttaactgattttgctaacggcggattgagttataatgagcataaacaacgtatggagcagttaaaatctctccaaaatcacatctacaacaaatgcatgtctaactgaggagattaacatggaagcagtatttggtttaattattcttttcttcatctattttttgccgacctttgtagcttgcagtcgtaagcataaatcacggggtggaatctttatcacaaatctagtattcggttggtccattatcggttggttaattgcgctgatttggtctgcttctaacgcacagcagaatacaattattatccagcaagttaaataagaggtctcatgattgtaactccaatgacagtacaagatatccgtcaagaattcgctgatgctttgctcaacaaagaatttgtgattgataagacgggtgtgaagactattgaaatcgtaggtgcatcatttattgcagatgaaaacctaatttttggcgcagttaatgatggatatattgctcgggaacttgagtggtataaatctcaaagtttattcgttaaagatattccaggtgaaaccccagctatttggaaagcaattgcatccaagcatggtgagattaattctaactatggctgggcagtttggtcaacacaaaactattcacagtttgctaactgtgcaaaagaacttatcagtaatcctgattctcgccgcggaattatgatttatacacgacctcaaatgcagtatgattttgagcgcgatggcatgagtgatttcatgtgtactaacaatgttcagtatctgattcgtgataataaagttcatgctgttgtaaacatgcgttctaacgatgtcgtctttggatatcgtaatgactatgcgtggcagctctatgttctggaacagttaaccaaacttctgaatgcatcaggtaaaaattattcagttggcgacattatttggaatgtcgggtctttgcacgtgtatgagcgtcatttctatcttgtagataactatgcttatactggtgaaactcatattgcaaagaaagactataaaggtgagtggaaatgattcagtttgtaattccaagttataagcgtgccggggcagttactgccctgactatgtttcctgaaggttatgttccgcatcttgtagtacgtgaatcagaaaaagaagcatacgaaacttggcacggtcatgctgctaaaatcgttactgtccccgatgatgtcgatggaattgcgggaactcgccgtctgattactgaaatgtatgcagggcaacgaatttggatgcttgatgatgatacgaccattcatctgactgaaattcgtgaacgcgacgatcgtcgggttccacttggtgtcggcgaggcaatgagtcaagaggtatttgatgatatggtcaaatacgtcgagactgccatggattgtggttattatcatggtcatgctcgcttgccgattttcaaaattacatcaagctggggtcattatcgtgagaatagctttgggttcaccaatactttctatgatttgactaaacttacagcagaagatattggttacggaattattgaccttaacgaagatgcttatgcttttctaaaattaattaacatgggtcatcctcatctggctttgtttaagtacctcgttaaatccggcaaagtgcagtctcctggcggttgctctacccagcgtgatactgctcgtcagaatagagcccttgaacaactgcatgctgctttcccaaatcaagcccgttggaaatctaaagacggtgaaagacgtggtttattcggtgataacgaacctctgaaatcaattcgtatgtgtattaacactcgagtgaaatctcaggccttccatgagtttggtaaggtagaaccatatctgtgagggcgaaagccctccaaggacctcttatgaacatctatgataaatctgatgtagctggtaacatattcaaggctgaagaattcagatgcttcgtatgtaaatctgatgagtttgttcacgaaggaactactggctcagatggaatgcattgctggtggcatggcatgtgcgttggatgtaaaatacactatgaaatagatatggaaacagtggtttataacaccaagaagaaatggaacttctgttaatagcttcaagaacaaagtaatataattactctatcctttaacctgtgagaaaaatataatggagacttatggaatataatgaatgtctgacttaaaatctcgcctgattaaagcatccacttctaaaatgacagcagaactgactaaatcaaaattctttaacgagaaagatgtagttagaactaaaattccgatgcttaatatcgcaatcagtggagcgttggatggtggtatgcagtccgggttgactatcttcgcaggtccatctaaacacttcaaatctaacatgtctctgacaatggttagtgcttatcttaataagtatcctgatgcagtctgcttgttctatgattcagaatttggtatcactccagcttatctgaaatctatgggtgttgaccctgaccgtgtaattcatacaccggttcagtcggttgaacaattaaaaatcgatatggttaaccagcttgaagctattgagcgtggtgaaaaagtcatcgtgtttatcgactctattggtaacatggcttctaaaaaggaaaccgaagatgctctgaacgagaaatctgtcgcagatatgactcgtgcgaaaagtctgaagtctctcttccgtatcgtaactccttacttctctattaagaacattccttgtgtcgcggttaaccacacaatcgagactatcgagatgttcagtaagacggtaatgactggtggtacaggtcctatgtattctgcggatactgtgttcatcatcggtaaacgccaaattaaagacggtactgagcttgagggatatcagtttgtcctgaacgccgagaaatcacgtactgtcaaagagaaaagtaagttcttcatcgatgttaaattcgatggcggtatcgatccatacagtggtctgcttgatatggctctggatatcgggtttgtggttaaaccgaaaaatggatggtacgcacgagaattcctggacgttgaaaccggtgagatgattcgtgaagaaaaatcctggcgggcaaaagatacgagcagtacggaattttggggtcctctgtttaagcatgagccattccgtgacgctatcaaagctcgttatcagttgggtgctattgattcaaacgctgcggttgatgaagcggtagcagaaatgattaactcaaaagtttcaactaaggttgatggtgttaaacttcctgagagtggttcagtatcagctgctgaagttgaagatgaattagagaacttcatgaatgaagactgagtttgatttagaatctgaactcgagaaatttgaacaagaatctccctcggaagagggagacttcgagcgtcaagaacgagtgttcaagaaaagccatgaaataatccaagaagctatgaagaccgttatccaagaaattgtgataaaattaaatggtcaatcacacttggtttatgttcataaattaaatatttctccttcgggggaagtaactattgagtttagtactccatctgaagctcataaggatgaactttatcctcatgtggaagcttgtgttaaacaacaaatccagagtgcattaaagaccaagaaaaaatcattatggaaaatcttttaagaggttaaagtggtagaaacaatcttagctaatctgatttacaaccaggctttctttacgaaggtttggccatatatggacaaagagtacttcgagcaaggacctgctcagacggtgtttaacataattaagaaacacgttaatgaatacacagcaattccttcaaagactgcgttatgtgtagcactggataattcgtctataactgaaacggaacatgaaggcgcaaagaaacttattgataagttatctgatgctcctgaagatttgaattggttagttaaggaaactgaaaagtacgttcaagaaaaggctatgtataacgctacgtctcgaattattgaaattcaggctaatgcccagcttgagccaaataagcgagataagcgtcttcctgatatgggggctattcctgatatcatgcgtgaagcgttatcagtatcgtttgatagctatattggtcatgattggatggaagattatgaagctcgttggttatcataccagaataaagctcgtaaagttccgtttaaacttagcattctgaacaaaattactaaaggtggtgccgagactggtacactgaacgtattgatggctggcgtcaacgttggtaaatcattaggattgtgttcattggctgcagactatcttcagatggggcataacgtcctttatatttccatggaaatggccgaagaagtttgtgctaaacgtattgatgctaatttgcttgatgtatcacttgatgatattgatgatggctgtgtatcatacgctgaatataaaggcaagatggaaaaatggcgtagttctagtactcttggccgtttaatcattaaacagtatccgacaggcggtgctaacgctaatacattccgagctcttctaaatgaattgaaactcaagaagaactttaaaccgactgttatcatcattgactatcttggtatttgtgcttcttgtcgtattcgtcaatatactgaaaacagttacacgttagttaaagccattgcagaagaacttcgtgcgttggctgtagaatctgaaactgttctttggaccgcggctcaggtcggtcgttcagcgtgggatgcttctgatatggacatgagtgatattgcagaatctgctggtctacctgctacggcagactttatgctggctgtgattgaaacccctgaacttgctcagatgaagcaacaattaattaagcagattaaatcacgttacggtgataagaacatcaacaataagttctttatgggcgtgcataaggctaatcagcgttgggtagaaatcgagcagcaaaacgacccaactaagcctaatccaagcaataccgtccgagaaggtgccggtgcacagaaccgtgtagccgaatctaatcgtcaagaacgagtatcacgttctaagcttgatgctctggcagaagagttaaaattctaggtaaattttatgatttttgtgtttagcgcggtccgtgaccagtcaggtcactcttttgtcgtaacagccacagataccattcatcgaggcatcgaggcatataataaagcagacctatctgtatgcgactatggagaggtcaaggtgtataacagcgatggcatctgggttaactcggcaacatatctacctactaagaatctgacctctgacactttgttgaaaaaattgttcaaaaggtagtttactttctccaaaggccatgatactatggccttactgaaacaaaacgagtagaggaaaacatcatgtggacaattgaaaaagcattagacgtagtctttaagagtaaagatgaatcagcggaaactgtaccgcattgtggtatggtagttggaagcaaagtagttaaatctccatatgctaatctgcgttgtgatggcgtagtacgaaaagcattagatgaaggcgatacagttttagtagttgttgagccattcaaaaacactgatggaaatgtgtcaatgttagtatacgcaaacggtgattatcgcctgatttctgctcttaacgtacaagctgcttgaggaaaccaaaatgaaaaagattgtacttgctttagtgttcgcagtatcaagttgctctgcagttcctgctatggccaactatgacaaagacttatgtgagtggtcaatgactgctgatgagtctgaagtagttcagcagattcgtgcagatgttggtcatattgtggaaaacgtagacccgagcaaacaatcagaagtgcaagcagaacttaaagacgacggcgcagcacttaagttgaattatgttctttactgtgatgctcagtttgataacttcaacatcgttaagtggattttaggatgattacatacgttttagtaatggcgctatctacgggttcaggcggaatgtctactgaaaagatggcattcactggtaaagatgaagccgtgattaagcaaaagtgtgaagatacaggcaagcagtttatgcttatcaaagacaatccaaaatcaatgtctccgacgctgtatcctacatataaatgcttacgtattacgcatgaataaatagtaggaggctctatgaaaacatacaaagagtttgttactgagatggtcgcaggtgatgcaggcggcaatccacagaatattgcatcaggtaccacttccggggacatcgtcaataaaggacccgaaactcttccaaagaaacgaaaagcggataaagacgctgccaagaaaaagtgataaaatggccttattagtttaaggccagaggaaatattatgtcttgggttgataacgagtatgcaattcgcgcaatatctcacctacctaaatttagacacgttactacatcttcaacattcaagttaaactgccgttgcccaatttgcggtgactcacagaaagatatcaataaagcccgattctggatttttgatgcaggtcaaggattacgctgtcattgcttcaactgtgagtataacaagtggctatcgcagtatcttaaagataatgaacctgacctctatcgagagtatcttcttgaaaaaagaaaggaacaagtctttgataagccaaagactgtagaaccgtctgagaaaattaatgcaaaactccccgtaatagaaaaacttaatttctgcgagcgattagatagacttccgaaggaacatccgatagttaaatacgtgactgccagatgtattccaagcacttcttggaaaaggttatggtttactaaccaatggccttctcttgttaactctgttaatccaggaacctataagaatgagacgaacgaaccacgtttggttattcctatcttcaacaagaaaggagagattgagtcgtttcaaggacgagcactacgaaaaaatgctccacaaaaatacatcacaatcaaagcccatgaacacgcgaccaaaatttatggtctcgacactattgatgagtcaaaactcgtattcgtcatggaaggaccaatagattcgttgttcattgataacgctattgcaatcactggcgggtctttagatttagctcaagttccatgccatgataaccgagcatggattatggaccatgaacctcgtcatcccgatacaattaagcgtatgaaacgtttagtagatgctggtgaaaaggtagttttctgggataagtcgccttggaaaagcaaagatataaatgatatgattatgaaagagggggcaactgcttctgaaataacggattatattaatcaaaatatatcgcagggtttaatggctaaattgcgtcttgacaaatatgcgaagatataggggccaaagccccttaaattaaagcaatcctccagtcataataaacgacacaactttttctaacggcatcggaggaagaactagaccgtgtgtgctagctaatggaactaccacataattccatgcagctaaagcagcagtggcgattccgacgtaaagatatcttccaaatcctcctttgtctttacattcttgtttcacttcagacatgaatcctcctgctatttatgttaagtgatataatatttatctaatttaattgaaaggaaaaataacatgccacatttcaacgaatgtagtcaactgatcgctggtgcagataaagctgaagctcgatacgcaggtatcgtccgtaaagttggtggtgaccctctgcaagtaatgcttgatatgcaaaaatctcttcaggttcgtcttgcaaatgacaagcctggtactaacatgcatcctgatgaattggctcaagctggtgatatcgtgcagtggctgcgtaatcaaaaagattacattgatgacgaattccgcgaattgctgacgtctcttggcggtatgagtaatggtgaaaaggcggctagtgctgtgtggaaaccatggaaagctgaccacgtcaagatgcaggaaacttatatcaaagacctgtctgataaagaccagcttgaaatcaaatttgaaatgattgatatcctgcactttgttctgaatatgtttatggcgcttggtctggattctgaagaaatctttaagctgtattatctgaaaaacgccgagaactttgctcgccaagacagtggttactgatggccaaaagaatatctaagcgtcgtttaaaaattatcagaaaacaaaaagaaagggccttagtattggcccttcgagaagaaatcactcgagaaattgataaagaaatattaaaggtgcttaccgcagctatataaatactcctgtaaactaaataggagattaaaatggcttacgtaaatatcaaaacttttgaccatacaactgctgatggtgaagttaaaggtacagaagtatctgtagcttttaaggtgtattctgattcacatcgcattgccaatgcacagtatcagattttcccatctgaaaaagctgcctattcaacagtagttgatgatgctgcaacttgggcaaccaccaacgctaaaatgtttgaagctagtgcagaagtataaaaattaaggactcctccgggagtccttttatgctatactgggaatagtatattatttctactaactgaggagaacaaaatgatatgttatactaagccctggtatcaatcaccattaaagaagtctcattttgattgttggtacagaggtgtaagagctgctgcgttattgcttaaagcagctccagctttaattaaagtaaacgataaatggtttgaagacaataacatgactgaaggagctctttgtggcaaacgcaaaaatctataaagtaagcttacaacgcgcagttcaatcaagaaatgacgcaaaaggagctttgcgtctagaccaagatagaatttttactgttgctctatacagtacgttcgacaaagatttcaaagacttagttaataaattcgaggcgtttggttggtgtccttctgaagattatggcattattaagactgctcatgtctttgacgtagatacagttccaggaagtcctgtttctatactgcatgctctccacttgaaaggatacaccaatgtatgtcatgaaactagcttatatgaatatgaaaatgacataatttcaagaggcaaaaagattatcattgatagcacagattctctaatagaattcactaagttagtttggttatatatgggcgcagattttatcaaacttgctccaagcccgctgttgcaaaaagcagctgatggatataacagcagcggttgtctgtatcgcaatactgagtggttcatgtgatggatttgtttgaaatgatggaagagcctcaggaagaggttcaggttcatccagtgatttctaaggacatcaaagacgaataccgtataattatacagaagtatggtattaaagccccagaagctcttctagatgaactagcttcaatctggtctgacccgccgccctggtctccgtgggcaaaataatttcacaaagtagtttactcttctaaaaagccatgatatgatacctctcgtaaccaaaatggagaatatcatggctatttcattaaacccatctatttcagtaaaattatcaaaggttattcctatcgaagaaccaattcgttccattgatgttcttaacttcgcgcgagaaagcaaaggattacctttatatgatttaagcgtatgggaagcattagctaatcgttttgactgcaaagaacagtcaattctgtggcagtgcatgaacaataagattggcgaagaatttcataagaaacttgactctatcgttaggcgccatcaaattgataacagagacactctctatagaggtctatcatgccgtgaggctaaagccttttatgaagctcttattaaaggagagcaatttgactttggaaaggtggcgtcattcacaacagatgaaacgatcgcccgagagtttgcaggcaaatggcattactcgacctttgtagtcattgaagtcaataattgccagcaattatttgattatcataccaacatgaaatcacttttaattactgccccggattctgaattcatgcggccaaatgatatgccaaatgatatgattgataacattgctcagcgcagaagcgctgacatcgagatgattgataaagaacaagaaaggatgttaccgatgggaactaagttcaaagtggtaggtcataacaaagttaaaaaatctggtttacttatggactactttagtgttactatagcttagtcaactagtgattatctataactagggacctagacccattataccgtccgtaagacgaaagcatttttgaggaaaacataatgaaattcactgctgaaaccgctaagatttatactcgcctgattacaactttgggttctgcccagcgtcggaacaaggagttcaatcttaccccagaatatctgtttaacatcatgcaacagactcattgcgcatactcgggtgaaaagtttggaaccgtcaaaggaaaccatcctgacagcatgacgcttgaacgctggaataatgatttaggatatgtagtagggaatgttattcctgtcaagcaaaagtataataccttacgtggaaataacactattgaaggacttgagcgaaaagcgaatgaaatcgcagcacgcatagttcgctcttctgattctgttaaacctacaagtgataaagaagcttctcgcttggaaaagattagcgagtatgaaaaaactatcgcatcaattaaaactaacttacgcaatcgcgaaaatcatctttctcaatttgtaaaaaaggaaaagaacggaactgcaacctcggcagatttagaacttattaatgcattgagaactcgtatcagcggtggtaagtctgaattagctaaagttgagcgtaagttatctgctattttagcgtcagttccgaatcgtccgtcagatgctgaaatccgtgtacaatcaatacggttaattgttaactcacttcgtcggttagaaaaatgctcaatgctagataagttaaaattgaaaaaaggtcttccattgactgcgtccttcttccaacttttgagaggtaaaatgtaatgcaacactatggatatgtagtagcgtataaggataaagacggatttgaccatccagtcacaactgacatgtacgatggagaacgatgtgtggtcttcactaatgaagaatcggctaataaagcacggattcgtacaatgtcggttttaacagacaaattggcaaaggggaattttactgggaaaagcaaaaccaaaggaatgctttggtggaaaacaactgagctagtgtatgaaccacttagcgatgttgagcgtgaaaaactcaaagcaaaaattaaaaatctacatgtagtgagggtaaaagtggcatgattacgtttgaccagttaaaagaaagtcaaaaagcgatttttaataaagtcattgaaatggtcaaacaaggagccaaaggtcaacatatcacaattaatggacctgccggtacaggtaaaacaactttaactaaatttatcattgacgctttgatttctcagggtatctctggcattgcgttggcagcacctacgcatggggccaaaaaggttttatctaagctcagtggaatgcaggccagtactattcatagtcttctgaaaattaacccgacgacatatgaagaaaacgttctgtttgaacaaaagaaagttccggatatggcatctattcgagttcttatctgtgatgaagcttcaatgtatgaccgtaaactgtttaagattttgatggcaactattcctgcctggtgtattgtcattgccattggcgataaggctcagatacgtccggtagaacctggaagtaatgaacctgcactgagtccattcttcacccacaaagatttcttacaacttcatttgaccgaggtgatgcggagtaatgccccaatcattgaagtcgctactgaaatccgaaacggtggttggattcgtgattgtgtagttgacggccatggcgttcgtggttttactaaaggaactgcccttaaagattttatgctaaattattttagtttagtgaaatctccagaagatttatttgaaaacagaatgcttgcattcacgaataaatctgttgataaactgaatgaaataatccggcgcagaatctatgaaactgatcagccgtttgtcgtaggtgagattgttgttatgcaagaacctcttaccaaggaacttaaatttgaagggaagaaattcagcgaaattcttttcaataatggtcagtttgttcgcatattagatgcaattgaaaccacgtcatttttaggtgccagaggtgttccaggtgaatatctggttcgtcattgggtattagatattgaaacctatggcgacgatgaagagtacgctagagagaaaatctgtgtcatctcatccgaagaagaaatgaataagtttcaattctttttggcaaaaactgcagatacatataagaattggaataaaggaggtaaagctccttggtctgagttctgggatgctaagcgtaagtttcataaagtgaaagcattaccagcttcgactttccataaggcccagggcatctcaattgacagaagcttcatttatactccatgtattcacatggcagatgcttctctcgcgcaacagttattatatgttggtactactcgtggtcgttatgatgtattctatgtgtgaggtaatatgtttgaattgaaattagaagaccttcaaacaatgattgttggcttacaagaatctaagtttgaagcaccagataatgttaagcgtgctattaacattaaaattgatacagttctgaatgagcttcgtgatatagcggataacgctaatgctatcacttggtttacaggatatgacccaaaggtgtatctgagcgaatatattggttgccagttacgcgaaattaaatttatgctagaggctcaaaatggctaaagactttattattgattttgaaacattcggaaatgtgtcaagctcttctgtgattgaccttgctctaatcacctttgattctgaccccgaagttttggaaagcttcgatgaattggttaaacgtggtcatcgtatcaagtttgaccttaaatcccagaaaggtcatcggttgtttggtaagtctactcttgagtggtggaagaaacaatcagctgaggcccgggctaacctggcctcaacgccagacgatttatcagtaattgctggaattaaagaagcccagcaatatctgattgataatggaattcacccatgggattcctttggctggtgtcgtgggcagagctttgactttccaatttttgttgattgtcttcgcgatgttcaacgagcccaaggaatttccgaagaagaaattgatacatttaaagaagaaccatgtaagttctggaatcagcgtgatattcgtactgcaattgaatcgctgcttctgactcgtggattaacgactactcctctgcctaaaggtacccttgatggattcattgcgcatgatagtatccatgactgcgctaaggatattttaatgcttaaatatgctcaacgttatgctctaggcctaagcgaagcaccaagtccagaagataccgatccactgagtttacccaaaggacgtggctaatggaagattttgaattcgacgaaaactttgaagagtggttcaaccgggaaatcctcccggaaatctctccgacgatggttctggtagctaaggctatgatggctaaaggatgggaagctgggtatctgttcggcgttgatgttggatgtgaaatttctcaccgataactatttactttatgaaagagccgttatataatggctctacattaacaaactgagagaaacacgatgaaaaatttggttgtaggtgaaaacgttaaggttatcggtggaaaacacgctggaaaggaaggcgtaattgttggaatctttaaccgttctaacaaaatgtcttcatatttgcttcaactggaaaatgaagacaaagcagtgtattcgctgcaaaaattcgtagttgctctcgaatcgcgcgatttgcttgattctatgtttaacgaaagctatctgcgcaagtgggtgcacgtgaattcacttgacaatgttattacccaatcggtgagttctactaattcagccactaatctgtcgctgcataaaaatgttcttgtcactgatgagtgggaagaagacggtaaaactttagtaaatgtagtatttcaaggtaactatgcggttctgcctaaagccgatgtagagccgacagaatcgcaacgtcaaggtttagtataaaaagttgtttactttaccacaaggatgtggtactattatcttatcaactactgaggagaataacatgaaaactgaaaacactgtaaaaattactgccgaagcttttgaagacattctgttcaatccggacttaatcgtcgttcagaaagagaaaaccttcggtaaagaagagcattggacctggttgtatgtattcgcgaatcacggtgatattgtcccagttcgtacctttgctcgtgtaatcacagttgatggcccagaatacatggagattgtgtaatgaattttaaagaaggtgtacagtacaaattcgtcaatgatgaagctgaagaagaattttcttcacgctatgaggttaatgaagactttgtgtatgaactctatgaaaatggcgggagttttactgttactaaagttgaccgccaaaataatagagtatcaggaattatgtgggctaatggcacagaatgtgatgaagtcggcggtgaagaccttgtaatttttgatagcgaattcaaatactttactgaagttggaacttctgcgaatgtaattccaaccgatttggttatgaatctttctattcataatcgtggtcaagcaatcgctgctattgcagcactgcagagtgcatatcaatgttaaatttagctcctatttttgaagcatcaaaattatcttatcctattcccaaccgtagcattgggaatgtcatgctgcaactttcttcagaaactggagaaatgtgtgattggattaatcgtccatggcggcagaaagaagaatttgaaggcgagtgcgcagatgttattaactgtgtagtagatgcactttggcttcatttcagaaatcgtcataaaaatgatacccatgtatcagatgatgaaatctccatgatggttactcgtgcactgaatgagcaaatcatggtcaaaacacaaaaatggaaggatgctgttaatgccaatgtatgattacaagtgtgaagtctgtggaaaaaagatagaaattatgcgtaaaatttcccaccgtgactatactgttaactgctttaaccctaagtgtgaaggccaaatgaagcgagtggtttctgctccggcagttcactacgatggattaaagagtggtgattattaatgggaactaaagcacgcattaccattaaacccggagaaatccgggttattaaagtaggtaatataacttatagggttaaattaaaatgaaaaagattttaattacagcgcttgccttcatgatgattggatgcactgacgctgataacgcaactcgcgtgttagataacgcgggatttactgatatccaaattaccgggtataagttcttttcttgctcagaggatgattttcagcacacaggctttacggctattgggccaacagggaaacccgttaacggaacagtgtgctcaggactttttctcaagaacagcacaattcgttatgaataaatgaccttcgggtcatttagttgtttacacggacatcatgttttggtattatagtcttgttggccagaggagaatattatgattattggaatgacaactgcacaaaggcgtgctaaacgccatttaaaaatagtagagcgggctattggaaaatacaggtttgcttggtggccaatcaatgacgtaaatggtcgtactatttggatgcagaaatattatgaagtctgtgaagagtggatttcacttaatgaaaacaacgagtaccggattgaacagtactacggaactcgatatgcatacgctaacgttagtgatgctcaatggactatgtttgaacgacagcggccacgatatcccgagtataaagcggttaaaggaggccatgaggttcttggtaaattgatgtatatcaaagaagaattacttgctataattaatagttgatataattccttcactaaccgaggaaatgtaatgattaagaacgaaattaaaattctgagtgaccgagaacatatcattaagcgtagcggaatgtacattggtagttctgcgtttgaagcgcatgaccgttttctttttggtaaattccaatcagtaaagtatgttcctggtattatcaaactgattgatgaaatcattgataactctgttgatgaagctattcgtactaatttcaaacacgcgaataagatttcagttgatgtcaaaggcaacaaaattattgtaacagataatggtcgtggtcttccgcaggctcccgtagtaacacctgaaggagaaactattccaggaccagtagctgcatggactcgtcctcgtgccggtggtaactttggtgatgatgctgagcgtaaaaccggtggtatgaacggtgttggttctgcattaacgaatattttttctgtgacatttgtaggtgcaacctgtgatggaaaaaatgaaatcgttgttcgctgttcaaatggcgcagagaatgtttcttgggaagaacacccagctaaagataaagaatttattaaagacaagactggtactgtcgtgtcatttatcccagatttcacccactttgaatctgatggcttaactgatgttgaccaatccatcattcatgaccgtctgatgacgttagcagtagtttatcctgatattgaatttaaattcatgggtaaacgggttcagggcaagtttaaagcttatgcccacatgtatgacgaaaatgctgtagtgcaggattctgatacttgtgctattgctattggtcgctcagatgatgggttccgtcagctttcatatgttaataacattcacaccaaaaatggtggtactcacgttgacctagttcttgatgaactgagcaatgagcttattcctgcattgaaacgcaagtacaagcttgaagtcaacaaagcccgaattaaagaatgcttgactgttatcatgtttattcgtgatatgtctaacatgcgatttgattctcagactaaagagcgtctaacttctccttggggcgaaattcgtagtcatattgatattgattacaagaagcttgctaacgctattatgaaatcagaagatattcatatgcctattatcgaggcaatgttagctcgtaaacttgctgcagagaaagctgcagaaactaaagccgccaagaaagcgcagaaagccaaagtagctaagcacatcaaggcaaacaaatatggtaaagatgctgacacaactttattcttaactgaaggtgattctgcgatcggttatctacttacaacccgtgaccgtgaacttcatggcggatatcctttgcgtggtaagttcatgaatacatggggaatgtctgctgcagatgctatgaagaacaaggaagtatttgacatttgcgcaatcactggtttgactatcggtgaacccgctgaaaatactaactatcgaaatattgccatcatgactgatgcagacgttgatggtgttggttcaattttcccaagtcttttggcgtttttcagtaattggcctgagctgtttgaacaaggtagaatccgctttgtgaaaactccggttattattctcaccaaaggtaaagaacaacgttggttctattctcttggtgaatatgaagaccataaagatgatttcaaaggttggaaacttcgttatattaaaggtcttggctctcttgaagaagatgaatacgagcgtgttattcaagacccggtttatgatgtagtcactcttcctgaaaattggaaagaactatttgaattaatcatgggtaatgatgctgcaccacgtaagacatggatgagtgaataaagaataaatagtaagggtactattgcccttacttagaaggaattaacatgcaacgttattggattactttgatctcaggcgactatggatatctgttcgctgaaaagaaacctctgcccggaacttgggttactatctgggtggaaaacattgatggttctaaacatgaggtttatggtcgagttagtagggtgtggtaatctaagggacctccgggtccctttttctttataagaatggatttatatggctttaatcaagaagtgcttggagatgattctaggattcttgcttaaagttatagtgatataatttccctaaatcactgaggaaaatattatgaaacgtagttacatcccatcagaagaattattcaacgatgctatatatcgtgaatatcgtatcatccagcggttctttgacatccaagcagctgaggaattcaaagaacgcttcaaagaaatccataataaaatttttacaactaacaccgctactgctgaagagttacttgaagtagcagaaatcattaaacgacacaattgataggaataaaatgaaaattaaatgtgatgatgaagtaattattggttcttctgacgctgacgattcaacgtttaccattaaagcttcaggtaaagcttttgacattctgtcaaacaaactctataagtataaagttcgtgctgttgttcgtgaactttctactaactgtgatgatgctcataaactgaacggtaatgaaaatcgtccattttatatcaaggctcctactcgtcttgacccacgatttgtaattcgtgattatggtccaggtcttaatcataatgacatgatgacgatgtataaaacgttctttgaatccacaaagaataacagtaatgatttcatcggtgctcttggtcttggttctaaatctccactgagctacacgagtacgtttaacgtagtatcatatcataatggtaaagccaccggttatactgtcatgaaaaaccgaggtgaacctactattcgtccgatgtttgtcgatgatatgaaagaagacgaagaaactggtcttgaaattacagttccggttaaagtagaagatattgatacttggcattatgaaatcgcatatattttgcgtacctttggtgctgtacctccaaaggtagattctcttcgccgtgaaattgaatatttcccagtagataaaactgattggtttagcgttaatagttcgtatgaaagctatggtctgtacgcagtttatggaaaaatcgtatatccgatcagcggtgtagatgttaaggcagattggttgcttaatcgctatggtaaggtttatgttcatttccctcttggcgaattagacattactccatctcgtgaagagctttctcttgatgaagaaacaattgccaatatccagaagcgtgttaacgctcttgaagaagaggtaattaccgcagatattaaagcgtttgaagcgtatgaatctgaccgtgaattcttgcgtgagttcaataagctgagttctaaggaacgctctattcttcagagccgtggtattaccattgggaaccgcgatattaaacaagtagttgcgaagtataatctcgataaaattcgttcatattatgtagacaacgaagtatcagtttatgtttcatgcgatgaacctgctcgtcgtaaagtatcaagcagttcttggcatcgtcataaccaagtaaacatttctgatatttgcggggttgatagaactaaagcttttgttcttattgatgataaagcgggtaagcgtattgctacggttcgtgctctgtgtaaatctgggttagttccaatctgggcacacattaccgtaatcaaagacaatgaagatgaattgcatgtcattgatgagctgaagaaaatcatggatactgatgaagttgtagtattccgtgtgtctgaacttgaagcccagagaaaagctcttcctgattatgacactggtccaaaagagaaacgtccaaaatcaccaaatgtttctctgcattggattgataaagacgggtactgggaagaagaccgtcagactttagtatcatctgaaattgctgagcttgaaggttatgcaatcggtcgcaatcgtgatgaaatccacactttcccagataatgtttggtggtggaatatgagcatcacagatatgcggtctctggcagaagcgtgtggaattaagaaattctatgcaattcgtccgggtgctatgaaagccgcagcaaaagctgatggattgctttcatttgaccgatttattatcgaccaatacatcaagtgtattgataaggtagattatgaccagtacatgccgtcaaatgctactggaaaccgtatctgtggaaatattgcgcattacgataaattgaatttcttgtcaagtaagtttactgcgtctggaatgaaaaatccgttcctgacaaaactaaacaaaattgctaaagtttgtcgtaccagtaaaatcaaagatgaaaacgatgatttagctttatgcaataaaatttataataaactgtctggtgatgctgagacaatcttctataaaaagattgaacagtttaaagatgattatcctgtcatcgcaagtgtcttggatacttggcggactgacagcaaactcgtcgatgatatcgtaaaaatcatggagctccttgacggagcttctactcaaaattctgaaaataaaggtgaataaatggctgttacctgtctgtctgaaatccaaaaagatgcaattgttaaaaactttaaaaacggtctgtacactaagaaagagctcgccgagaattatggtgtttctcgtgacaccattcggcgtgtgtttaaagagcgtgaagctcgagctgcagcggcagctgttcctgctaaagtagaagctccagttgagcgtgaatttaaatgggcagcaagttccaaattcatttcaattaccgaaggccgtactacttataacgctgatagccaacatcctgggtttaaatctgcactgcagaaacttgtagatggtgatatcgctggtgctattgaccacattaacctggaacaaggcatcaagaaattcgttcaaggtaacgtccgaattgaagatggtactttattctataaagatatcgagctgaaatccggtctgactgagcgtatcgttcgagctatggaagatggcgaagactttaaacgttatctgcctttcctggaaaacctgatgctgaacccgtctcgtcgtgcagtttatcgtctgtttgatttcctgaatgcaaacgatatcgacatcactgatgatggtcacttcattggttggaaagtagttcgttccacttatatggactgtgcttcaaacacgtttgataactctcctggtaaaactgttacgatgccgcgtaaccaggtagatgaagacgatcagcgtacttgttcagcaggtctgcacgtctgctctaaatcttacattggtcactttggtagtggttccgaccgtatcgtttctgttaaagttcatccacgtgatgtagtatctatcccggttgactacaacgatgctaaaatgcgtacttgtggttatgtagtattagaagatgtaactgatcgttggggttcagaacttcgctaattataaggagccttcgggctcctcttttattatgggtgaaacatgattaatccatttaacgtatctcattccaaagttgttaatcttcgtggtactcatcatgcagctacagtattttgtcatcatgtagtcaaacatgaaggtgatgttcattatgcttggttgcattgtgacgaacttgttgagcttggtgatgatttcgtcgtagaaccagacacatgtaactacgacgatcgtgtttattttggtgaattacatataagaggaatttatggcgttgatgaacaaagctctccagagattgaaccagttgcggacatttaccctagatttgaataagctaaggggtgaagcaaaagtaaaaatcattgatactgctagatatagcttagatatcgacccatctcaagacagaattgatgttcttaaaagatgtagaattgctataccggcagagtatgtggtagcggattttcttgatggatacgtaaacgatcaagttgttgaccataataacaacgatccgtatgaatgggcctgggacgtactagctcatccatactaccaaggcgttagagtagaggttaagactcacttcgttcatgaccgagcaaatcataagccatggattaacgttacaacaggtaaagatggtccatttccggatggcagtggaataaatctggggcccatgtttaaacataaagtcgcagactgtataattatattcattgccgaagaagtgtcccagaatgtcatacggtacacaccaatgtttgccggcggtatagaacacctcatggaagtagtaaaaccctcacgagttggagctggcgggtatatcatgcacaaattttaaaaagttgtttacttccgggattggccatgatactatggccttacaaactgaacgggagtaaacatgagcaatatcgtagaaaaattagtatctgctaaacttgcccgccgcaattatgatttgggtaagttagcagaagaatatattttagaagaagccaaaaagttctttgctgattcaaaatatgtagttcattatcagtttgagactgttattgaagtaaaacctcaatcttctcgtttgatttgttctgcatttaaagtaagcagtagaaagcgcaaatacgatattgctatagaaaataccgaaacaggaaaaatccacgttattgagattaagcatcaaatagctggaggaactgcaatagattcggttgcaatacatttagaagacaagccgcatttggttgaagttacaaataacaccgacccgttttctttaatcgtggcagattttcttccaaatattgaatacaacgataattggaagaaaaaagaaaaatttactgaaaattcaaaagttgtatcacgatttaatgattttgctattaatcataatattttagtattattaatatctgaacctgatgaatcattaaacttatactttaaagaggtacttaagaccttatgttaggagcaatttcatacactggaaataagcagaagttaattaaagatttacttcagttgtttccagagtatacacgatttgttgatttattttgcggtggtctgtcagtatcgctgaatgttcctggaccagtgctaagtaatgatattcaatccgaaataattgacatgtatgttaaaatgaaatcctgttcttgggatgacgttatgaatatcattacagaaagaaatctaggtaaacacccggaacatgagcaagcatactataaattgcgtgatgaatacaattcatcacatgacccactattgctgttagtattacaatactacagctttagcaatatgatacgtatatctaatggaagatttactgctccatttggccgtcgcgaagtcaataaaaacagcaaaaagaagtttttacacttcatagaaaactcagataaaattgagttcagcagtaaacactttactgatgttgaactaaaggagggtgattttgtttatgcagaccctccgtatttgattactgtagcagattacaataaattctggtctgaagaagaagagcagaagttatatgactttcttgatgactgccacgcaaaaggcctaaagtttggaatgagcaatgtgttcgagcatcaaggaaaaactaatactatgttaaagaaatgggcatctaagtataatgttcattttttggacaaaaaatacacattcaactcataccagataaagggcaaaggcagtacagtagaagtattcatcacaaattttaaaaagtagtttactttcttgttctccagtgatactatagtcttgttagctaaactggagaacaaaatgaaaaagttacttacgattctgaagaacatctttgtagtattctgccttatcgttactttcattggtgttttcgcatgggatttggttaacgtttggattaatgcatttatctgaggaaaatataatggttcgtaatagttttgatcgtcactttaacttaatgagaactgttgttctgtcctttatcgttgcggtagcgcttggaattgtcgccgtgttcggattcggaatttattttgccattaatgcgattgatattattcaaactgatggccttaaatccttagtagaaaccgtatgggaaggtcaaaaatgaaacgacacatcgtgtatcgtctgcttgctttaggtcttcttgtgttttgggttggtggtgtaacggcagtagtatatttttggtagtagaaggggcttcggcccctcatcggagaataaactttaatcaactgaggaaattaacatgcgtaatattatgacttttgctgatctcgataacgctggtgcagaactgatcggttctattcgtaacggtgattgggcagcaggtgctccatctcgtgaaattactgagcgtgaaggattttatttcctgatgctcaatgatggcaaagcaggttatatcggtgcatctgctcgtttctttgtagctaaacaacgttcaaaagcaggatttgagagtgttctttctcacatccgttctgggcggtctcagttgggtcgtacccttcgttcaaactgtgtaacatatggtgtgttctggattcctgccaataaaatgaaaccactcaccaccggttatggcaaaggtcaacttgcactggcgtttactcgtcagcattcaagcgacgcgcagacctactctgaactgaatcgtattctgaatgataactttgttttctctatgcagaaatactaatgagaaccttcttcgtgatgggctatgtgtttctgatggccttaatgatttgctcaggaacattcatgtggtatggccttgtgcctaccactaaagtaattggaagcattgcgttcaccgcagcatttattatgtttgagcgcatttgtaaaattgtaggagtttacaaatgattaagaaactcctaattgtggcagcaatagctgccacctttctattagttatgtactatggaatgatttacggaatgatttatattgtgcttttcatttccgatgttatagtacaaatcggctcactaatctggtaggtacaatggatatttttgacactctattaaagcaagcaggttctatcgatgatttggctaaagcgtcaaatcttcgtcatcgcgatttgaaatctatcattgataatgaagcaaaagagtatgcgatttacactgtagaaaaccgtgctattccgaacttgattgatgggtttaaacctgtacagcggtttgttattgctcgcgctcttgatttagctcgaggtaataaagaaaaattccataagcttgcgtctgtcgccggtggtgtagctgatttaggatatcatcatggtgaaacgtctgcccaagacgctggtgcactgatggcaaacacatggaataacaactatcctctattagatggacaaggtaacttcggttctcgtttggttcaatctgctgcggcaagtcgttatattttctgccggatttctgacaacttccgtaaaatctacaaagatacagaaatcgctccggtgcataaagataaagagcatgttccacctgcgtattatcttccggtaattccaactgttcttctgaatggtgttcgcggtattgcaacaggttattcaacttctattcttccacatagttttgaatctgttttggaatgcactaaagcagcacttcgtggcgaaatgatggaacctgaagtacagtttcctaaatttaacggaaaaatcgttcaaactgaagacggttctgttgagctgcacggcgtgtataaagaaacttcacggaactcgatctatatcagcgaaattccgtacaagtttgaacgtgcttcttatgtagagaaagtactcgaccctctggaagatgcaggatacatcacttatgatgatgactgttctaagaccgggtttggctttaaggtgaaattccgtaaagattatgctctgagcgaagaccctgaacagcgccatgctaaaatcatgaaggattttaaactcattgagaaaatgagtcagtatatcgtagtcatcgacgagaacggtaaactgaacgataagttcaaaacttcaggtgagttaattcgtcatttcgtagaagtccgtaagacattcactgccaaacgaatcgagcataaaatcgctgaaactaagcaggcgtttaatcttgctcaggcaaaagctcaatttatcaaagaggttatcgcaggtaacatcgttatccaaggtaaaactcgtaagcagttgactaaagaaattgaacagaatgaactattcaaagaccattctgaaaaacttgtttcaatgaacatctatcacatcactgatgatgaagcgaagaaacttgctcaggaagcaaaacgtctagcacaagaggttaagtactgggaaaagacaacgcctgaagccgagtatctgaaagacctggaagaattatgatagaattttatttgattgtaggctctataattgtagtattaggtctagttttattactcctcagttaatctaggggacctggaggtcatctccaggtccttctatataaatctatatccctccaaaatccctccttagaatgccccaaattattttcacaaagttgtttacaagctggttagcagatgatattatagtctcataccaaacaaattgaacaaaacagaatggagaatcacaatgtctaaagtaacttacatcatcaaagcttccgaagatgctctgaatgaaaaaactgctgctatcctggttcaggtagctaaaaaggatttcatcacttcttctgaactgcgtgaaatccttgaagaaaccatgaacgcaagttctgttaactcaaacatcggtgttctgattaagaaaggtctcatcgagaaatctggtgacggtttaatcatcactggtgaagcacaggacatcatctctaaagcggcagttatctatgcagaagagaacaagcctgaacttctgaagaaacgcaatactcgtaaagctcgtcctctgactgaagatatgaatgagcacaaagacctgatgatgaaacttctcggtgagatggaagatatcttacctctgaaagaacttactgtttaccgtagtaactatatcgcagttctggaaaaacgcaccttcggtattcgtagtcttgaagttaacaacaaaggtactttccgcatcttcggttacaagatttctgaagagcatcagaaacacttcactgacctcggaatgtcttgccgtgtagctgcaacaggcaatacttacttagatatcgcccgtactgctgaaaacattgaaaccatcatccgctctattaaggaactgtaatgaataagtttaaagtattgaatgaacttcagcgttgtgtagaaaaagttaacttgaatgctaatatcccaactgattgttgggatgtatggttccgtgggcactttatcggatacattgataagaaattcgcaaaatgctatgctatctacaatgcagatggtaaacatatcatggatgtagataattaccaaaaggcactagctaaatttgttccaatggcggaagctgttaactcaatggaatggttagagaaaatgcagggtgaacctgttattcgtcaaatcggtattcgtgaaaagaaaagtttttggcagaaaattaaaggattctttaaatgactgaacaagaaattaatgatttgattatgaatcttgtgaaagatattaatacccgggctcttcacaaataccaaaacggtgaagcatggacaattgcagactgtaagaaaggtgcagaccatggccgtgaagttattaaaacctttaacgaaaagttggtcaaatgtgtaatgtaaatagcgaaattccagaaatctgctttaaagtagctgattggtgggatggacgattacttcaacgtcgtatcgtttgtgcagcaaatcgttttgaattgaaaactggtggaacaattgtagttccaggcactcgccattattctgttgatatggcgaacgttctagatatgttccgtgacaaattagtttctgaccatgtccatggagacaatcaaggatttgttgaccagtggggcgagtacttcacacgcgaagaagcattaatcatcgctacacatgcaggtcaagttaatacagttcgtcctaaatcaggacccgccaatgaattattctcagaggatttatactaatgattagtacattaaagaataacattacgcttttaaaaattcaacgtaaatcgctccagcgttcgttagaaatgatggacgataattggggtacatataccaatgaagccgggtttaaaatggcagatagcaaattcatgaaaactctcatggataaggaatacatctgtccgttcagtcatccatttaacggtggcgctaaaccgtttcttgctgaaatgtacaaagtaatgacagaagaaatgattaaagatattgactattacatcaaggaacttgaaggtgcaaaatctagtagctaaacatgattttaataaaggcggagcacacaaagataaaaagcgagccgcaaatgaatccaaacgtaagcaaaaacacaaaggtaaagacaatgcgcattctgaataattctaaatgtactactttaactattatttgtgatgacctagaagctctccacaagaaattaggggaccattctggattagtagcagatatccattctgaactagtggaagacctccagaatgttggatatggagactggatggtacatgattggaataatggtacctttactgtagctattatcgctaatgttgaacctgaagaagttattgaacaatttcagaaatgtgttgatgcttatgacattggagattatctatgaatactgaagctttacgcagagaagatgaagccaaggcatatcataaacgcgttgaattgctttcagcaattaaagtagaatacaccttgcaagttaggcttaaagttcttaactcttgggctaatgacttagaagtaaaacatttagagcaagcagtaatgtctacgtttaaccaggacacttctaagccattcagtttgtcagccgacttttacacgtatggaattattactattaaagcaaaggatagaggtgacattataagtggagttgagtatatcgaaagcattttaggtaatcgcggagaggtagttttagcatgagccataacttagagtctgtcgttgaatcgcaaagatatctcgaagcgttaatgaataaaatcgcgcttggaagtctgattgacttgtcctttcaagaggcaattgacgtatgtcactggatgaatcgtagggttcgtccaattggaaaggaatggtatttaacggctaaagtaaaagatggtcgctacgggctctggatgtcctctggtgctgagtatatcactaccaaggaagatttgaattctcgttgggaattggcataaactggtttacaacgcggtatcaagatgatactataatcacataatccattatgttgtaggaaaaataatgactaagtttgaaattgtccaagaaattgttaccgttgcttctattctgactaagttcaatgctgaacatatcatggagaagcgagatgaatttattgcgttcttgaatgaaatcggaatcaagaacgagcaggggcgtcagttaaatcagagcaactttcgtaaaatggtttctgagttaactgacgaagagaagagaattctcgttgaagaatacaacgagggatttgagtctatctatcgaacaatggctatgcatagtaataagtaatcacttagctcttccaagagctctaaccgcctgaccacatatcgatgttagtctttcgttagataatgcaggtttggaattgtaccagtacatttcaacagtcccagcataaacattgtctaaattgaaatatggacagctaaacatatacgatatttcaggcggttttctttttgttggtaagaaaacaaattccttatccgtccaaaaatatctacccgataaatgcgtgctatattcagcagttgttttgtcgattggatatcctcccaagtttttagaatctaccgtgctaggtaaagtcccctcataagcaattaagtctacgaagtagttcaagtttttaggtctgaacgtaaagaccgcagaaaaatctgcaccacttgagatatgtactatctggagttgttcgagtgctgtgttatcaaatcgggcatccctatccttttgaaccagtttatcatacttgtcataagtgctgtcgacataagcagtaataagactatctgacttataaccagcaaatgccaacaatgctaaaagtatgacaacaaaaacacgggaaaagagaactcttcccgtggctccatctttgaacaatagctcgagcaacccaagaaacatatcaaaaaatggtattgattgtttgcttgccatattgctctccttacagagctatttattgctctagcatatgcttaatatgctgtaaatgacaattggaaagttcgtccatcattggcgtaaagccaatcccaaaatccgttgttgtctgtacagttatagcaacggcggcccatataatccctagaactaacaaaatgccattgtctgccgtcttcggtatcaacccgccagttaacgttaaagtttccactgccttctagaacaagggcatcattatatccgtcccatctactaggctctgccaatccaaagacaaccaaattaaacccagtttcccaaattccagataaagacccacgagcgtctagttttacgttccacgaagcgctgtttttagttatccaagcaccacgcactctagcacccgtagctgggttgttgcctgaaatagttatactagcgttccagacatttcttccaatcatgcttgacatcataaatggtgttcccaaccttaattttgctccagctgcaatcattgaagattctccggttacagccttagctgagcttcctacattaggacctgttactgccatgatatctcctcaaagatggggccgaagccccatagcattatttagatttaagttcttcaatttctgctttaagctctttaacagattcgactaataacgcaattactgcattatagtttaaacgaagtaatgcatctttatcgttatcagttgtaactgcttcaggaagaacttcctgcacttcttgtgcgataaggccagctgatggtttagtatcaccatttggaagctgtaaatcataaacattaccagatagcttcgacactttatcaagagcgttatcaatcttagcaatatttgatttcacacgacggtcagaacgaatttcaacgtcccagaaattaccaacaccttcaacgcgtagattagcagcactaccccagatttttaccccagtatctgtaagtgctaaccactggtcaactccagaggcgttatagaaatgccatccagcgcgaacatattcacccgactgccatgcgttaaagctatcgaaaatcgtatcaccgcgctgtaaacgtattccatttacagtatttgcattatctgtgtttcctggtgctaagtgggctaattgcagatatccatcatttctgaatacaagctctcgaccactttggttacggataatcatgtcaccattttggccgttagaccaaataacgcctctggtgttaccagctgaatcgcggaaccagtagttagagtttgtaccagctgaacctgcatcacagtaaacattaccgtttttagcaaaaagaccaccagcattggttgtgtcagcggcgactaagtttccgctagaaactttaagactgctactaacatctaacccgcctcttagagtacttttgccatcaacttctaactgccatgtttttaatctggtgccagttacgtcaaggttaccagttacagtaccacctgctaacggaagataagtatcaccagcattgctaatagcagaagcaaccttatcatcaacatatttcttgttggtggcttggttattctgcgtaggagcatcggcaatttgcacatacttggtagtaggaacaataataccgccgttggcattaataacacctgcaacagttgctgaactagaaacagttaactgtctattaacttgggcatttccgtaaacggtttggtttccgtctgcatcaactttaaacacatcagtataagtctccgaagccggattacttatagcagttgctgatgatttagcaacagtaaatgtttttcctgaagcaaagaccagtttagaacctgcaccagattttttaacgaaacctaagtcagaatcttttcccatcagaataaaactattatcgttagtattctttatgttttgagaaacgatcaagcttctgcccatcgtggcttcgccatttacttgcaagcttcctgaagacgtcagaactccaccaactaaaacgtttccatttggctcaaagcgggtttcaccagaagaagtatctgggcttcctgctctgatgtggatgttctgaccactagcagaacctaaaacgaccgcacctgcttcattagctcgtaatacgccagtcgcagaagtagaaccaaggttcagtcttccaactaatctagcgtttccgtttgcggttaaatcgttggtaactaaattaccgaatgataccgtttgtccttcaccaacgccaaggttattacgggcagaagctacagatgttgctccagtaccgcctaaattgattggttgaacaccagcaacaacctctttccacgcagaccatgagccgttttgtgcgtagcggatatatgtaccttcaacaccgccattctttgtagtaaaggtttgtttacatgaccaatcggtatcagaaaccttgcgtaaagacagaacttcaagaacaaagttaccatcagatgtaggtttgttcgatatattatttccaccgccagaagatacgcatttatataactgacgagtacctgggtcggttcttttaatgacaagactattaaggtcaatggtcttatcagaaatatcaactgcctcttcagtgccgcgataggtctgattaaaaactaaatccccttctacatcaagaccgtcaggtttaactctgatgtacttggtaggagatggagtagcaactgcagtttgatagccaaattgcacgtatccttcaggagtaactttaagcattgctacggtagcaccgctaccaactttacgagcaagggtcaatctgctgtacttgtctgagttctctgaacctaaatcaacaaaagttccgttagggttttcgacttttaagttagcgttaatagtcaagttaccggtcatggtatcaccagtcttgcttacttgcttactatcgccagtggtgatatcatttttaatagaagtcaaatagttgttaaggttaccaccaaacatcgaaccagatgtaatattcccgtctttggttagcattgctgctccaccaactttaactgctacaggaacatcaaagcggccgtcagaacggaagctaaaatcaccagcagaagtgcctccagtagtttttgcacgaatattaatctgacctaagtcagcagtattcggagttgcccaaattacaccacgttcgttgctatctgttctaaaccacacatgagcatttccgcttcctgcattaacatatactgatgcagttcccggcccagaagcgtggaagttaggagcagttaaatcgcctgtcatggtgtcgccggctttcttaacttgggtatcgtttgtcagattaccaagtccaacgtcagctttagatggtttatttgcagttccgtaaagcatattataatttactcttccacttgctaaaccgctatcgtttatagcaaatactctgacgttaccagttgcataatctatattaagcgcagccattgtgtcagaagctcttccgtaaaatccggtgccatgggagtaataaggagcccctgtataaccacttgctgtgttggctctgaatactgtaccaccaagagccttaaggcgagtcattaaatcaacgtcagacgtaatatttaccagtgattttccgttaccaccgacaccaaatgcaccaacttccatcacgtttccgctggattcaccaacatcgcgaacagccgcagttctaaggcccaggttgtttcgggcatctcctacattagtagcacctgtaccaccacggttaaccggaagagtacctgtggtatcaccgaaatctggttttgctaaactatcaaaaatctgtttcattgaaacaagaatgtttccagatggtgtagtagcaccagtatcttgaccagtttcatagataattactttaccgctatcttggccattgtatccagcagtgttcaacactgtaacataaaggccattgccataacgaggaatcttagcataaaaatcaaatgacgcatccgcatcagtagcagaatcgtttttaacaacgtaatactctggaacgttcgttttagaaggagacccaacccggcgccattcaacccagttatctaaattgctggtgctccaggatgttaaattgcgaccagataacgtgataaaatcaacataatgtcttccgtgcccagaatcaatgccaccagtaatcattaaatctaactgtgaagacgcatctcctgggtgtttaattgtagctactttaacccaacgtggagttgcagcagttgcagcagaaattacgtattgccacgcctgacggttgttttctacattcgtcagaagagtgccggatttaccaggacctcttccgttcatggcgtaataaacctggtaatttctgaaggtcaaattgctatcattagttaattgaagaacaccagagcctctcaagtttttaatgtatgcatcattagcacctacacccatttctaaagtaagagtagacccatttgaaatttttacggtcttattggtagataatcttaaatcgccaggaagagtcgtattaccagagccgtcaagcaagaccaattttcgggcttcaacgttgcctgcaccgcgttgtacaaattgaatagtttcagcgccatcatcaatagtaccgatttcaagaataccactgttgcttgtaccaccggcaccaatgtaccagccatcattagtagcgcatttgccaacgatatgacgagttatttcaccgctcaaatcagtagtttcaaaactaattgctttattcggagaaatagttacgttgtcttttaatgtagtagttccatcaacgctaagagttccggaggtatctaagaaaggaacccctttacctgcaagctgaacaacgttatcggcttcatctttagtgtaaatggcaagagtacgcccatgtgtattcaacgcgatttcgccacgggctacgatatctgcacctggtgctttattctctgtgctagttcttttaaattgtatttgttttaagttttgatcggccatggctacctcttagtatgtgccaaaatctattgttaccccgcgtgaaataacctgatctaatctaggagcatattcaccggatgttgctttatttactataactacgccagcttcagctctaagtacaccggtcatggtatcaccagctttcctgactgctgcgttagctacgttgctaacagtatttattctatcatcaacatattttttatttgttaagtgagcattatctgtgggggcttgacccgctataacaaatttacctgaagcaacggaaatgttacctttagttttaatatcgccattgcgtagattaaagacgatagttacaccttcagtaccatatgaagacccaaatcctaacccataccatgtttgtatttttgcgttaactgtggtataatcagccccatctcctggacctggtataaactcagctgacccgccgcgagcattaaggcttaagccttctacaaaatgaacatttttagcatactcgccaccacgagcttttgacacaaagtcgttatcatctgcttgaggtttatctatctcagtataaacctttttacctctataagttagggagtttcctgccggcacaagaggaaaagtacctgcgtgccaaataggatttccaccaactgttgaacctgcttttaaatcggccatagtttatcctcttatatattttctatttatacgaaaaaaggaagcccgaaggcttccttagtctgatgtttctctgaacgattgaactggaataacaccactcggatcgacttttgaatttggaagttccataatcatagtggttcctccttcaacgcctttattcattcttacgccattcacgccaaattcttgaacaacactgttaagtttttcgctgtgtgcggtttgaacaaatacaaggtttttgattttagaatcaccaactacggacgtttttggatatcgtgataccacaatagtaaatccatcagcgtctgtaggaacagcggtaaatctttcaaatcttagccatctatcagctccattttttggaatttctaatgatacgcttgaagataataaagatgtacctttgaaccatctcaagttagccctagtagtagaacctgcatcaagaaggcttttagatgcatacatatcacacactaaaaacaccgaatccccgggagataatccataatcagcgattttgcttatagattcattttgaactggatatcgcttatattcatatccagtagaatccgagtactcattagtgtcttcaatggaacgataagggcagcctgtatatcctacatcgccaacgttatcatacactgtatcgactttagctctggaatcttctttaactacaccatcatttccgtaaaatgactcaattaatatacgtccttttgctgctccgagcactccaacatatgcagagtttggaaatgatttggaaaagtcagaacctggccaagaagcagaccacttgtttttaaaccatctgtctattaacgggctggattgaaatcgttcatgtgtcattataatatacaatcccgaagttaatccatttgcatattctacaaacgctttgttattagcgttgttatcatcagtggtaacatcaaaagttttaaagttaataaaactattgccgttaacctgaacgacattaatccccctccgtaaggaggaggtcatatcaaaggcaccattaatattcaattctggcttattaggaacagcattagaatgcgtagcataagcttttagccaatacttcacagagtttgcctcagagaggattcgtgtttccacgaaatcctcgccgaaggctgccattaaaattggttcagccattaatcacctacccattcaaatttgagagtttggtttggacggtctggccagattttaactggaccaagcttaatccattccaggacttcaagggttttaacctgagttgatactgagctcggagcaccaatatcagctgcagtcggaggagtagcagacgtgaacactcgcatccaatcatcaaacttattaaggtttggattataaatcctcatccacacagtatgcgcgaaacgcttatccgcagtttcggttgtcggaggataaggcgtccaaagctgataagtattgtttgtagttacaccaacctgagttaaaacaccaccagctgcagttttttcttcatatccggtcactactaaagtgcttgggttagcagggtcaatcggtgttctgattggaaccatataaccgcgaagaccttttagtttagtagcgtctttaatttcagcagtccaagaaccttgtcgcaatacagtatcattagtaggcacataccacgattcagaacccgtaatgacgatagcagaactgcttaagttaagattaccggtcatggtgtcgccagctttcttaacataacgaccatcagctaatcttgcatagtttttggtagttaaaattggatacgatccagttgaatcctgtgcaaaaatttgtgtatcagcgtcacgggaacgaataaatgcggactgtgattgggcaccgaatattgaattcaatccctcgacagcaagcatctgaacgtccttaaccataacagttccgccaactattgcatttccagaagacctcagagttttagttgacacttcgttaggaacttctaacgtaccgttaccgccaaatgtgtaggtctggcttgcagcagtagttcctgttccgtttttgacacaaacttttaagtttccggctgaagctgtttgaggctcagcataaattataccacgctcgcttccgtctctattttgaaaacgaacatgcacatttccagtatcagctgttggagaaattttaacttcaccaccattagcatatataatattctggacagaaatattattgctaaatgcagtatcctgactaaatgtccaagctccagaaatagtctgcgctatatcgcgacgagcatatttgtctggggtttgaccacctagcattccggtgtcataggctttaccaagacgaggtaagtaatgtttcaacgtgaggttcaattcatacggagacactgcgacgcccttagaggcatacccgttatccggaagagttgagccattggtatcattacctttccacgttccatcgcctgtagatagcctcacggtccctctaacgctgtctgtagcttgccatgactctgttacctgaatagtctgtttcaagtaagcaggaggaacaattctatcacttaatgtgcctgcatcaacttgtgcctgtgtagcatactgagcaagaccgatagctccttcagttgctgttttagcatgtagcgtggcagcagtaactattttcttggcgtcggttccagttctaacctcagcagcagtggcaagagtggttgtacctctttgagaagtacttgcttcctgtatgttgatggtataatggtcccagaggttcccagtaatagttaagccagaactagtattaacttggatacgatcagtattagcaaatttatcgaacagtaatttagggtttaccattactgtacttgaagtaccagcttcaaattcaccctgggcaccaggtgtcgcgaagcgagcaataccagtacgatcgttagttgctgtacggtcatttaatgttttaggtgtaactgctttattagtcacgccgccagcattaacttctgtctgtgtagctatttggattaatccaatcgctccgtcagtagcaacttttttatgcaaagcttctggtgtaacgactgtaggaatatttgaagaagccggagttccgtttctaacttcgctatcagttgctaaccaaactattcctgactgatttacagtagctttatactcacgaagagtttttggagtaactgcatttttgtaatcagaatgatcgaatataccggtgccagcagaagaacgatcagcagttgtgttaggagcaccgccagtttttactaattgaataacacctaaccgtgaatcagatgtagtgcgataaagcaacttcttaggagtaacaattgtaaaatcgtctgttcctgcatccattttagcattagacgcaatttcagctaaacctctacgggtttcagtagcagacctttcgttaagctttttaggagtaacgattacattatccaagtaagaagcagttgttgactgattaacttcgctggaagttgcaattcttgctataccagtttgggtttcagtagaacgacgtccgtttaaggtttctggagtaattgctaattctttttccggacttgactccgcgttagcttgagcctgtgtagcaagagcaataacacctaatcgtgctctggtagtattgtctttagcatcaacacgttctacggtagggtcagattcagttacaatccaatagctttttccggatgctttatcttcaatatatgcaagcccaagaacaggaacatacgatgtagttccgttaaaggtaattgaacttgattgcacccatgctgcatcaggtggatactctgaacgttttggaaattgtagtaaattcaaattacttgcgatggtatcaccatcagaagctttaattactacagtctgtcctttgcgcatataattcattgcgattgtgacagtatccccaacagctacgtctgtaggcaaagtaacgttaattgttttaacagtattgttatctgcgccaaatacagaaatatgctcattaggcattaaagtaacatcagaagtaattattcttactcgggtgcgtaaatcattttcaaaaatacgccagattttgtcaatcgagtcatataccaaaaacccattacctgaagtacgtacttgaacctctgtttgtccaggagtcccaattgagatagttgggtcaaacgtacgcacagtcatatggttaattggcgatgtaccgtcaaggtcagtaaaattgatgatatcgtttgaattagcgaacaacggcagagtaataaaaatctctgagttggaagtataacgacgaactacgttatcacctgactgtacctgggttggaacaatcccgttcggaactaccattttagcagtatcgccaaaatcggttaaacttgcacgccatgcaccattactaaacgtaagcataatttgtgaatacggacgtgtaagtcttacctcacgcagacgcgattcaccaaatacgatagacgcaccagtatcttgtgctttaattaagattccgttatagccaggacggccaccaatatcacgaactacgatggtatcgccttcatctggtgctaacggaagcagtaatgtagcattacctgcagcgttagagtcaacgttgatgaactgaccagattgaatttcaaactctcctttacggacggtataaatccagttcgggtcaacacgtaaagaagtccaattcgcctggttaaaatctccagcaggctttggaatatctttatttgcaatccagatacgacgtccataagtcacagcaaaatcagtgagatacccacgcgtcgggtcatatttttggatagtgttttcttgaataacgtactcgacggagacgccgtcggttttaacgttgcggtcagcaagtgccacatttataactttatttccgcctgcgtccaagccgttcgttgcacggaaatgttgtttcagtaaatcgctcatagagtctcctatggggttatgcttcattatagaagtatttataatggctgtactaactaattgaacgaggttcaaatgtctgatttaaattgcttattcgccgaagaagaccaagtaaaagaaggtgtcattctgattgacttgtcgcaaatcgcaatggcgacaattcttcatacgtataaagaaggcgataaactaaccactcctatggttcgtcatcttattctttctactttaaaatttaatgcttttaagtggaagaaagatggatacacaaaaattgtcatttgtgttgataatgcaatcaacggatactggcgccgggatgtagcatattattataaaaagaaccgtgctaaagcccgtgaagaatctaattgggactgggaaggttactttgaaggtcttcgtactgtaattgatgaatttaagcagtatatgccttattatgtcattgacattgataaagctgaagccgatgatagcattgctgtactgaccaaaaagttcagtcttgaaggccatccagtcatgattgtttcttcagatggtgactttactcaattgcataagtatcctaatgttaagcaatggtcaccgatgcagaagaaattggtaaaatctaaaactggctctcctgctttagattgcatggttaaaattattaagggtgataagaaagataacgtagcttctattaaagttcgttcagatttttggtacacccatgttgatggcgagcgtactccttcaacaaaaatgacgtttgttgaagagtgtcttgatgctggcgaaaacatcaaagatttgcttactgaagaacagtataagcgtttcttggaaaaccgcgtgttaatcgattttgattacatccgcgaagacattgttgctaacattttagattgttataataactatcaactaccgggtcgtggtaaaatttatagctactttgttaaatccggtctgtctaaattaatgaaagaaataaacaacttttaaggtgaatataatggctaagaaagaaaaagagcaagtagtatttgatgaagcagtacacggacaggctctgcgagatatgattaaggaagcctcaggtaataagctaaaggcagaaagctatcttgagcttaacaaagacattaaagaccgcgccaagaaagagcttggtgtagaaggaaaactgtttaatcaactgcttgctctgttccataaaggcacacgcgatcgttttgaaactgaaaaagatgaagtggtagaagcttatgactctattttcgcttaaagatgagggggacacatccccctccgaatccattaaccagctgctagataagcaagctaatggatttgctatcgaatctatggtaacagaacttggaatggggtatctcgaggcaacgacacaatggctagaagaaaattctattcctgagggaaacttcagtagatatattccacctgcaatcatagaaaaaattatgtcagaagcattagaagaaaatatgcttcgaccatcatttagtcaaacacataaaacgaatagtctggattttttattatgattcgtctacgcatgccccaaaacaataatagatacgttaacggtaagagcgtttatcttttatatttaatgctcaaacaacactttgccggtcgttatgatgttgttaagtataattgggtcatgcgtgtctctgataaagcttatcaaaagcgcagagacaaatacttctttgagaaacttgccgagaagtatacgctaaaggaattgactctgatattcatgagcaatcttgtagctaatcaagatgcttggattggtgatatcagtgacgctgatgcgttgatattctatcgtgaatacattggtaagttgaagcaaatcaaaactacattctcggaagatgtaaagaatatttactactttgctaagaaagttaatgtagataagcttcatgatatttttgaatataatgagaaagtcggaacatcttatgtgttcaaacttctgcagtcaaacgttatatctttcgagacattcatcatgcttgactcgtttttagatataataaatacacatgatactgcaacggataacttagtttggagtaattactccactaaattaaaagcttataaaaaacttttaaacgttgacggtgctgaagctaagaaactctttattagcataatcaaatcttgtaaagaaattagtatataattaatctatcgtccagttgcaaggacccatgttgcaacaacaactgttaaattaaaaaggtaatcatatgttcaagcgtaaaaatcctgctcaacttcaacaacaactggctggtctgaaaggtggttcttctttctctaatgaagataaaaacgaatggaaactgaagaccgataatgctggtaatggtcaagcagtaattcgcttcctgcctggtaaagatgaaaactctctgccgtttgtaaaactgatcaatcacggtttcaaacacggcggtaaatggtacattgaaaattgtacttctacccacggcgattttgattcttgcccggtttgtgctcatctgagtaaaaacgattcttataacagcaacccagctgaatataagcttctgaaacgtaaaacttctttctggtctaacatcctggttattaaagaccctgctaacccagaaaacgaaggcaaagtattcaaattccgtttcggtcagaaaattatggacaaaatcaacgcgatggttgaagtcgatgttgatatgggtgaaactccggttgatgtaacttgcgtgtatgaaggtgcaaacttcgtcatgaaagttaagaaagtcggtggtttccagaactatgatgaatgtaaattccttggtcagtccgagattgcaaacatcaatgatgaagaaactcagaaattcctgaccgaaaatatggctgacctcagcgaaattgtggctccatctcagtttaaatcgtttgaagttaacgaagccaaatttaaacagattatgggtacagcagctcttggtggtgccgcggcaaaagcagcagctcaagccgataaaattggtgatgacctggattcctttgacaaagacctgtctgattttgaatccaaaccgacctcttctcgttccgcagacgatatcatgggcgatgctggtgacagtgttggcgatgacgatctgaatgatattttgaacgacctctaatataaagggaccttcgggtccctttttctttatcccctccaaaaatattttcacaaaattgtttacaagccagttgatgagtgatactatatctacatcgaaacaaaacgagtagaggaaaacatcatgggtaaattaaacattgatatcgtggcagaaccttacattaataaatcaggattttgtactgatttgatttttgaagatggttcacgtttttatgacactgaccatggtattgattttgatttagttattaaagaaggccctggtggcggttggccaaatattgacctccgtggttctaaagaagcagttcgtgcttggttagaagcaaacgagtgggaagatattgatttgatgatggaagactggaaagagtaattacctttggggacttcggtccccactttgaggaaatgataatggcacaggttactgtagaaatatatgattatgaacacttcattgaaaccattgaaaaatacggtttgattgaagttagtaacaagtctgccccatggggaggaaacgaaatcactgtagaaggtgatactcctaccctatggttatggcttgaacaagaatattttcctggcatggatgatgaatgccgtgaagatacattaacgacttttagcgggtaaattatgaaactgaacacagaatatcgcattatcccaagtcttgctgccgagtgggacctttcatctagcggaaatcgccggatgcgcttgatgattgaagaacatggtggttcgttctttcctactaaaatgctcgacgaagataatagtttcatcacagaagtaaaatttaaagatggaacaactgctgacgctgaaggatttggagacgcatactttgaaatcgctgattatgaattcaaatacttcgaaccagtatatgaaattggtagtgcaatcaaacctggtcctactcgcttggacttgatcgttaccccagaaaatgcagaagaaatgattgacttgatcaaaaaagttttcaaaaagtagtttacacggagctatgcttgtgatagtatagctccataatctactggagaataaaaatgaaacttcaacgtcaaagcatcaaacttggttctgaatatcgtggtaaatggaatttctgcatttgcgataaaaacccagaagaattagagcgtgttgaagaagtactgtgccaaatggaagctccattcactatgggtggtgaaactgtctattggaatgattactgtgataactgcccgtgctatgaagatgggtatggctcaggcttctggattcctgttgaagatgttgaagaattcaaaaaagcatttaaacttgctaaggccaagaaatgattgaggccgaattagtagttttgttaatttctgttactgccgcttttattagcggcattatattaggattatttttatatgtctaaatttagtgtaacgggatatccgcgtgttaacattcgctgccaatttgacgaaatccctggagtaactcatattgagctcgtatttgaccctcattcgcgatgcaatcaggtttcaggtaaaattgattcagcgtatggcgaatttttaattaatgaccaggtgattatttcagctctttctggtgaacaagcgggttcgttgtatattctgaaaaaggaagtatttgaggaaattgcagaagccataaaagaagggtttaaaactcttcagagcatgattaaagctagtgggtacaagtcatgtggattttaactgactgggattgtaagtactgcggcggtagcctatggcaattaggtggccggtgttttaagtgtggaatgagttgaattttgctgaggtttaaatgattcaaatagtttatgcatttgctcctacaaaaactgtagacggcaaaaatgaaaatgctttcggtttaggcgatggtcttccatggaaacatatttcccaggacatgaaaaactttgctaatcgtactcgagatactatcttgatttgcggagcaaagacttttatgagttttcctaaacctcttcctggtcgtaagacaatcgttgtccaagacatgagtcgtgcgttagcaactgctaaaaatggcttatttgcagatgcttatgtaagtgaattagaatttatcggtttcttgggtggtgacattatggccgctcatacttcttacaacagtactatcacttttaatagagaccttaattattctatcataggtggtgccggaatcatccagaaggcatatccatatgcagatagggttatccaaacaaccatcagaaaaagtcatagagtgaattctgatgtcactctacctgctgaatttgtagcagctcctacttggccagaatcaggattcattactaaagaaaatcactggtatcatattgatgaagtgactaacatttcagaggtggtctatgagcgcaaactatgatatcactcagctatcagaagacaaagttcaaaagaagtggaaaagatttccatttaagcatggtattcatcttctagtttttagttataatggtcttagcacttataacggttcaactacagtatataaccgaaatggaaatatacctattgaaattgaacgtgattataagaagatgttcatcggaatgtcacatggcaatgtgatggtcaaagatgatgtagtgtctattattggacgatttgaaaagcgtggtgatcagcttttctttactcctcttcaggaaaaatttaatgcgtgaataccaagaattaattaaagacatttttgaaaatggctatgagacggatgaccgaactggtactggcactattgcgaagtttggtacccagctacggtttgatttacaaaaaggatttcctgccgtaactaccaagcgtcttgcgtggaaagcatgtattgcagagctgctttggttcttgcaagggtctactaatgttcatgaattgcgtcttattcagcatggttcattactagaaggtaaaacggtctgggacgacaattatgaaaaccaggcaaaagacatggggtattctggtggtgagttaggacccgtgtatggaaagcagtggcgtgatttcatgggtgttgaccaactaaaattggtcattgaccgtattaagcaattgccaactgaccgtcgccagattgtgactgcttggaacccggttgatttggataaaatggcattaccgccgtgccatctgctttatcagttcaacgttcgtaacggatatttggacctccagtggtatcagcgttctgtagatgtattccttggcctccccttcaatattgcgtcatatgcagcactagttcatatcattgctaaaatgaccaatcttaagcctgggcatttggtattcactggtggtaatactcacatttatctgaaccatattgagcagtgtaaagaaatcttacgtcgagagccgaaagagctgtgtgagcttgaaattaattattggcctccagtaaaagataaagaatttcatgaattaaaaacagaagaacaattagcttgggttacaggaatgatgaaaccatctgactttgttcttgaaggatataaatcccatccaacaattaaggggaaaatggctgtatgaatattcgatttgttcgtaaaggacaccagtctaaaacaatattaggcgagatgtgtgatgcattctctagtgatttgcctgaagttaatgacaagatagtttttgacgggaccgaacaaagggttctgtctattgttaaatcatatgaatggtctataggcaaaacacaattaatctgttggtttgaagttgatataacatgaagatatgtcgggtggttaataaataccattccgacttcgatgtaaatatccaacgcggaacaatgtggggaaattacgtcggtaaagattgcgataatcgtcctgatgctattgctgcgtttaaggacgattttattgctaagattcggaacggagaaataaagcgagagcacttagaaactttaagaggaatgagattaggatgcacctgcaaaccgcttccttgccatggtgatataatagctcttgtagtgaataaactttttaaagatacatttgaattagaggacttatgcaagtaattaagagctcaggtgttagtcaagaatttgacatgcagaaaatcattaaagtcctcgaatgggcgtgcgaaggaaccaaagtagacccatacgagttatatgaaattattaaatcccatctacgtgatggcatgagcactgcagatatccaaaagactatcgttaaggtagcggcgaatagcatttctattgatgaaccggattaccaatatgtggcgtctaatgcagctatgtttgaaatccgtaagcgtgtttatggacagtttgagccacctgcttttattgaccacatttctcgttgtgttaacgcaaataagtatgataaagaaatcctgagcaaatggtcagcagaagaaattactttgcttgattcttatattaagcatgagcgtgatttcactatgacttacgcaggaacaatgcaacttatcgagaagtatctcgtaaaagaccgtcacactggtgaattgtatgaaactccacagtttgcctttatgctaatcggtatgtgcttgcaccaagatgatggcgaaaatcgtttagcaaacgttattcgtttctatgatgcagtttctactaaaaagatttcattgccaactccaattatgtctggtgttcgtactccgacacgtcagtttagttcatgcgtggttattgaaggcggtgatagtcttaattcaattaacgaagcagctgcatcaattacgaaatacatcagtaagcgtgcaggtattggtattaatgcaggtatgattcgtgcagaaggttcaaaaattggattcggtgaagtcaaacatactggagttattcctttctggaagcacttccaaacagcagttaaatcctgctcccaaggtggagtccgtggtggcgcggcgacactgtactatccaatctggcacttggaagttgaaaacctcctcgtacttaagaacaacaaaggtgtagatgaaaaccgtattcgtcatttagattatggtgttcagattaataacctgatgattgaacgtttgattaagaatgattacatcacattgttcagtcccgatgtatgtcttggcacgctgtacacagaatacttccgtgatgcacaagcgtttcgtacattatatgaagaactggaaaagaacccagatataagaaagaaacgtattaaagcccgtgaactgtttgagttgttccttactgaacgtgctggtactgctcgaatttacccgtacatggtagataacgttggtgaatatggtccttttattcgtgatgtggctacggttaagcaatcaaacctctgcctcgaaattgcgttaccaacttcggatgttggccaagaagatggcgaaatcgcgctatgcacactcgcagcattcgtactcgacaacttcaactggcaagaccaagaagaagttaacgaaatcgcagaagtaatggtaagggctttggataaccttttggattaccaagactatcctgtagacaaagcgttaaaagctaaagaccgtcgagcactaggtgttggcattactaactatgcagcttggttagcaagcaactttgcttcatacgcagatgctaatgatattactcacgaaatgatggaacgtattcaatatgcactcatcaaagcctctgttaaacttgctagcgaaaaaggtccatgcacgctttacaaagaaacacgatacggacgtggtgaactgcctattgactggtacaacgaaagaattgaccaactcgcagctccaaactatgtctgtgactgggaactcctgcgagaagacctcaagcgatacggtatccgaaattcaacgttatctgcgcttatgccatgcgaatcgtctagccaggtatcaaactctaccaatggtattgaaccaccacgtggaccggtgtcagttaaagaatcaaaagaaggaagcttcaaccaagtcgttccaaatgttgaacacaatgcttccctttatgattatgcctggcagctcgcgaaacagggtaataagccttatctgaaccaggttctgattatgcagaaatttgtagaccaaagcatctctgctaatacttattacgacccggcgaatttccctaaaggcaaagttgaaatgtcggtaatgatggacgacttgctttatttctggtactttggtggtaagactctttactatcataacacccgtgacggttccggtaacgatgatatgattcaagactctgctgactgcgcggcctgtaagctttaataaaagggaattataattagaccacggatggttaacaccacagaataggaaatagaatgagtacagtttttaataccaagcaagtagatatcatgaccgaaccgatgttctttggttctggtctaggaattgcacgctatgatattcagcgtcataaagtattcgaggaactcattgagaagcaattgagcttcttttggcgtcctgaagaagttaacgttatgatggaccgtggtcagtttgaaaaactcccagaacatcagcgtaatatcttcactgataacttgaaataccaatctcttcttgattcaattcaaggacgagctccagcagcagttttatctgcacttatttctgacccaagcctagatacttggaaccagacttggacgttcagtgaaactattcacagccgttcgtacacgcatatcatgcgtaacctttatgtagacccagctaaaatctttgatgaaatcgttcttgatgaagcaatcatgaaacgcgctgagtcaattggtgtttactatgatgatgttatagcgaagactcgcgcatgggaaaatgccaaaaatcgctgctttaatcaagataatatcgaaattaaagaagctaaacgtgatttaatgaaatctctttatctttgcttacatgttattaacgcattagaagctattcgtttctatgttagttttgcatgtaccttcaacttccataaaaatatggaaatcatggaaggtaatgctaaaatcatgaagttcattgctcgtgatgaacaacttcatctgaagggcacacagtacattctgcgtcaacttcaaactggcactgatggcgaagaatgggttgagattgctaaagagtgtgaacaagaagcaattaaaatcttcatggaagttaaccgccaagaaaaagattgggctatccatcttttccgcgacggtggtcttccgggtctgaatgttaaaattcttcatgacttcattgactatctgactgtgtctcgcatgcgtagttgtggtcttccttgtcctattactgatgcaccaactcgacatcctattccttggattcgtgaatatcttaactctgatgcagtccaatctgctcctcaggaagttgagataagttcttatctggtagctcagattgacaatgatgtcactgatgatgttctaattggatttaaaaagtacttataaggaaaggggcttcggcccctctttattatgaatgatattgctaacgagttttcttttataaaatatgttcaacttgagttagaaccagattttaccatcaaaccaattctaatagcaaacaagttgaatgtagtttatgccatcgcagttgatgatgaactagtttacattggtaagactaaaaatcttcgtaaacgtataaattattatagaactgctattaatcggaaagaccaaacctctgattcggctaaatctgccaagatttttgaagcactaatggctggcaaaaaagtagagttctatgctcgtcagtgttttaatcttttgattaataatgaacttggcgagatgtcaatatccactatggacttggaagaaccgcttctgattaaaaagttcaatcctccatggaacacacaacacactaacaaagctaaatgaactatgttaaagtatatgataacctaatagcaaagggtaaattacgaggcaatgataaaggaaaattaaactattatactgaagctcatcatatcattccaaaatcattaggaggaaatgacgatgtttctaatttagttttattgactggacgtgaacatttcattgcccatttgctattatcaaagatacataataattctaaaatgaattatgctctttggatgatgtgtaattcttctggaaagaattttaaagttcattccagattttatgaaagctctagaataaagcattctaattatacatctaacttattctccggaaagaaacgaacggaagaacatagaaagaatttatctaaagcactgaaaggcagagtaagtcccactcaaggaaagactcatgccaaagaaacacgcgaaaagatatcaaaatctttaaccggtaaaacacaatctgaagaaactaaactcaagcggtcagaaagccaaaaaggaaagaaaaagcctttgtacagtccatgcccgcattgtggtataataacttcaaaggccattgctatcagatggcactacgataattgcaaacataaggtaaagaaatgttagagctatataaaaatttaatgaatctgtgtgaaagctcagaagttgcaaaattcttttataaagattttaccggtcctatggatggtaagttcagagtgttttcatatcactacgcaagctacagtgagtggttaaaaccagatgctcttgagtgccggggcatcatgtttgaaatggatggtgatactccaattagaattgcttctcgtccaatggaaaaattctttaacttgaatgaaaacccaatgacaatgggaattgatattagcgatgtagaatacattatggataaggctgatggctctctagtgtcatcttatgttgatgatgggtatctataccttaagtcaaaaacatctctctacagtgaccaggcaagacaagcctcagctttgcttaacagtgaagaatattcttcgcttcatcaggttattcttgagctagcgctagatggttatacggtaaacatggaatttgtttcacctaataatcgtgttgttttagcatatcaggagccacagctgtttgtgttaaacgtccgtaataacgcaactggcgagtatattaaatatgatgatttgtacgctaatgctaagattcgtccttatttaattaatgcttacggaatttctgaccccaaaacttgggttgaaggtgttcgtgaacttgaaggcgtagaagggtacattgcagttctaaacactggacagagatttaaggttaagaccgaatggtattctgctcttcatcacactaaagactcaataacgtcaaatgaaagattgtttgcgtctgttgtatctgcaaactctgatgacttgcgttccctttttgctggagatgaatacgcaattaagaaaatttctgcgtttgagcaagcttatctagattacctcggaaagtcacttgagctatgtcagtcgttctacgatgaatacagaggtcgtgctcgtaaagattatgctattgctgcacagaaagccacggttaatcagcgtcatctttttggtgttatcatgaacatgtacgaaggaactgtagatgtagataaactgcttaaagaccttgaaagagtgttcttgaagtactgggcaggatatgttccaaaagagtacgaaaaagaaattgaaatttctgaagaatagttgtttacatcctcgtcagagtgtgatactataaacttacacaaactgatgaggatattgaaatggatatgcaagcaattactttagatatggttgttaacaaatatggtactcattctgatgggatttttgtgtggaatggtaccaaaaaggtgggcttcgtcactgacctacggacgcacatggcgcgcaaggaagctgctcgtaagaagcaaaaagagtacactaatcgtgtgaacgagcagcgtgccgaagcccttcctgaagccgtagatgaaatgattgatttcctagataatcatctcgcgaagtatggtgcagaggtgttcaagaacatcacccagccaaacgttcatgctaacggatgcaaatgctatgtaatcgttgacccgatttatggcaagcatcgtcttggcattatgcatcgcgagctgaattattctgagatggcagaatatgtagaagcttgcttcaagtgttctccttcggaaagttctgatcgtcacatcctcatttcgggattatcccgtgatgatatcgtagaggttatccttaaactatgctcaaaataaacacaacttggctgttgattggcgtgttagcattatccgcaggcggattgaaatatctttcgtggcgggtagaaaatcttaaagctgacctcaaagtcgtccaagatgaatctgaccgacaagcaaaagaaatagaaaatatcggtgtttctataaaaaatctgcagacaacatataaaggctatcaggaaaaccgagcagctcgtgatacttctaacgctaagatgaataaagattctaagcgcggaaacgtagttgcagctaaacctgggttagttgaaaaacagattaatgcaagcttcaataagtttgcagaagatatccaggaggctaccagatgaaacgaagtctattagccatgggtattatcagcttacttgctggatgctcttctagtgcaccagatgtcccggttttacatcctgagtggccagacccaattcaaaaatgggaaggacattgggaagtaaaagtaattgacggtaaagcctgggtaggtatgccatttgaagagtcgcaagagtatcgcatctggatgaatgacattttacgttatactaaagatgctaacggaatgatatgttattatcgttctgaccttaaagaacctcgttgcgttaagtgatggtattataatgaaccgagagcagtatgaaacacttaaagggttaattgctgaaaatgaattagcgtgcatcgtatttggacgcgcagctgaaaattatgacaaaaatgatatactgtcaatgaataagccattgcgagcaattaaagaaaaatatcgtgctaattggggtgaaaagtctaaggctcttcatgattttattgacactcttaaggatgtataatgaaaaaattggttttgacacaaggggctccaggctctggtaaaacaacctgggctaacgaatacgtagcagctaatcccggttggtatgttttgtctcgcgatgatttgcgtgaaggcatctttggccttaataaacgtaatgattacaaatattctaagcttcgtgagaagtcagtatctgtatgccagttttctatggcgaagactctgcttgagatggaaaccactaaaggtgtcatcattgctgatactaaccttaatccaacgactatcaagaagtggcaagagctggcatatgaaattgatggtgtcaagtgggaaattaagcgctttgacgttccttggactgaattgcttaatcgcaacctctatcgtggcgcgaatgcagttcctattgaagtgcttcgtagcttctattctaagatgcatccatatgatttgtacattccagacgaatcattgccaaaagcagttatctttgaccttgacggcacgttagcagataacaatcatcgttctccttatgacttggccaaatgtggtaaagaccatccaaaggaaatggtaattgaatttcttaaaatgcttcgtaacaaaggatataaaattcttaccgtttctggtagagagtctggtactaaagaagaccctactgtttatcaacgcattacgaagaaatggttgttggaccatgttggcgaaacaggcgaacacttccaacgtaagcaaggcgattcacgcaaagacgatgtggtaaaagaagaaatcttctgggaccgaattgctgatcgttataatgtaaaacttgcagtagatgacagggcgcaggtagttgaaatgtggcgtcgtattggtgttgaatgctggcaagtagcccacggtgatttttagaggaaagtataatgtttccaaagtattccgaagtagtaaaagtatcatttacgcaagttgttgctaatcatttaacagatgagtttactccggctgaagtagccaaaatgcatgcagagtttttatctgcaatgaatgcacttattccaaacggcgaagttattaaattttctattgaccggtcaggcggctcgtctgaagttaaaatttcttgtggcgaaggtgaacacgactggtttatcgttggaattattgctaattttgaaacccaacaggttgaaacttatgttgtctgatgctaaattttcgcatgatgaatttatttcgaaggttaaaatcttcgcacaggaagtagcaaacagggttcctggaagtaaagtgactctccgacgagagtcatcctttaactatgttgatgcttatatcattacagttaataatggaaagagcaatcaacacactcaattggctttaaccggaacaggccaagttgaaatgactaacattttaggacatatctaatgactttacgtgaggctgtagaagctcttttaattgaacatgctcgtggcattaaagcagaaattagccaaaatggtattcgtctaattaatgctgttattggttctgaccaaggtgtttggtcaattccacgcgaagaatatgatgctattttgtacagtaacgttgatgttaaggaaggccaacctctttatggctatgtcttttccgatgttcttgaacgaggaaatcatccgtttccagatggtacaggcattcgtacttctcgagtagagagttttgcttctcctaccgacgagttaaaattggttaaaacaaataacacaacttatctggtgatttaaatgaaagcgtcgacagtactacaaattgcgtatctcgtatctcaagagtcaaaatgctgctcgtggaaagtcggcgcagtaattgaaaagaacggacgaattatttctactggctataacggttcaccttctggtggtgtgaactgttgtgaccatgcagcagaacaaggttggattggtgaaattccttacaaatctacgggattgcgtcaagacggaatccatgtcaaaaaagtcggattgctcaaagaacatcgagcagcccactctgcatggtctaaagtcaatgaaatccatgctgagcttaatgctattctttttgctgcccggaacggcagtagtattgatggagcaacaatgtatgtcacactgtctccatgtccagattgtgcaaaagccatcgctcagtctggtattaaaaaattagtatactgtgaaacatacgacaagaacgaacccggttgggacgatattcttcgttctgctggaatcgaggtgttcaatgttccaaaacgcaatttggacaagttgaactggtataacattaaagaattctgtggaattgaataatgaaactcagaattgttgaaattaataaacttaacctaagcggtgatgttgttatatcatactcagtagaacgctggtattggtttaaatggaaaccattagcaacatttaaatttgaagatcaagcagttcgattattaaaagaattatccaagcgcaaatctgtaattatcaaaactattaaagagacatcaaaatgaaactgactactgaacaaaacatccatattcgtgaaactctgaaagctgtgctgagcatgggcgaatcccagattgtgtttgaaaaagctgatggcactattcgtactctgcgctgtactcgtgataaagacattattccatctgatttggtagaaagcactactaaatctgctcgagcagaaagcactacttcacttccagtatatgatactgagaaagaaggttggcgctcatttgcctttgataaactgatctcggtaaatggtatgaaagttgagcatctgctacagatgatcggtaagtaatttgctttaaactgaccatgttaatataactacatggtcaaacaataaaggtaacacatggaacttccaattaaagctctaggcgagtatgtaattctcgtatctgaacctgcacagcaaggtgatgaaattgtttctccttccggtattattcttggaaaagaagaacaaggacaactgccggatatgtgtgaaatctattctatcggtgatgatgtaccgaaaggatttgttgaggtaggcgatttgactccgttgcctgttggtaatatcagaaacgtacctcatccgttggtagcagcaggtgtgaagaaacctaaagaaatccggcagaagtttgtgacttgtcattataagtccctagcttgtgtgtataaataataatatgaattgggcgtcggacaattagttacccgagcaattctaagcggtggatgcccgagctaaacctcggttaccgtccaccaaattttaacctcatttgaggaatgtttcaatgaacaaacaacttactaaagctctggaactccaacgtaatgcatggaattccggtcacgaaaactacggtgcttcaatcgatatctatgcagaagcactggaagttctgaaagggtttaaacacctgaacccagcacaagctgaatttcgtgatactttagaagcgatggacgaactgaagtatgctaagcatcttggttctgctgctcgcaaagctgttcgccactttgtggtaacgctgaagtaatttgtacgcccaccatgtgtacgcatgggtaacgtatgatgtggacgttgttggttatccccgcgtaaaacattcgaaaccatcggtgatttgctaccaaagtgcagctagaaataaacggcaagtgcatgctaccccgaggcgatggccaatcgggagtacgcctcaaggcctatacatccatcggtgtatatcttatccctgagaaatcagacccggaacctttaagctaacggtgtgcaacagataagagtttaatcgtaccccttgagggcttgcgggagctacaaccgaaagaactgtcgaaagaagttgaacctcggaagaacgtgctcccatgtatttctccaaaatggaagatgataaaatggctaaacaagctaaagcaaaaactgcagtaaaagaagttgttggtacctctaaacgcgctggctacaagcgtgggtcgaacaagcgtatcaatcagacggttgagaaaatcatgcgtcgggctcgtgcggttcttcgcgatgatgcttctcgttttggtaagccgaaagcataagttcagggactccttcgggagtcccttttttattttccacagaatgaaaaaagttgtttacttctaggctcaacaaggttactatagacctgtaccacccaaacggacaacggagaataaaatgaataccatcaacctgaatgcaactatcaagactaaagaccatgacggttataaagctcagactgtccacgagaaaatgtggattttgtctaaagttcaaggtgatatcgttccatgcatgacaccggacggaccgtcagatgatttctgctggcatatcactttaacaaactggttcacaggttctgtatatgttctgaacactccagttgttggtcgtattcgttctgaaacctacacagatgaagaagacggttactcagaagatgtaacctggtatgaaaatggtcgtaatcgtgccgatgctttaattgagcaaatgaaaaaggtcggtaaattaaacatggataactggactaaacagtaatcttgactggggcttcggccccactattgaggaaatgataatggaaaaaggtaaattctataagcttaaaaagactccaatcttgtctccaggcgctcttatcaagggtgtttttgagcaaatcggtaataatccgattaaaattaccagaacctttaaatatgcggaaaataccggattagttgaatttgaaatcattaagccagatggggaatataaacgcgttagtgtagatgaagttcgcttttctcacatgtggtgtattcttactaatcaagagtttcagcattattttgaagaaaccgtctacaaagaacctgaaccgaagaccgatgatggaagcaatgattggggcgtttggacctcaaataaaggaaatgatacctacaatggtggattgacaaaggaagaagctgttaatcttgcaaaagtacaacgcctgaatgcaactaaagacacaaaagttgtaatcatgcaaccttttgctgtccctgtggttaacgttaatattcgtccgttttaagaggaaattgaaatgattgtatcagctttctatgattcacgaaagaaaaaggttgaaaccattatcagcgatactcgcgatggtacacctgctaataaaaatggcgtgaaagcatacattgataagtattgccctcctgaatttcgtatggttgatggcgtagattctctgagcattaatgttataaatgctaaaattgaattcattaatgcaactatgccaattgggtattctgatagtgatggctcaaatgccaaaatgccgaaagaaaaattcataactaaattttgaggaaatcaacatgattgtatccgtgcctaaatctaaagctggtattttttcttgcagtttgaaaaaccacccaatggttgatatcatgtcagctgatgttaaacaacacaccgttgagtatgaaattgatgctccggatttctttgaattgcccgaatgggcagtgagacttgatgcatgaaatatcatatcttcagtacagtaagattagcaaatggaattcctggagttgtatgtgacacggctccagccattaaagcctactcagttgaaccgtggtatgaagttaattgggttgatggcaatcgttcaatccatgcagaatccgagctttatccaattactcaattaagggctgctaacgacgatgtctattaatcctcacttcggtcatatggttgcccgacgtatcaccagggaaatgctaaagactgctgagtattataatatagaattaattgatatagaaccctctgacactccagggttaatctggttcaatttcaccggtgccgcaaatagcgttgccaaatttaaacaagcattgaggaatttccccgaatgtcaaaacctgtaatcgcaaccgatgttgatggaatcatcgttaaatggcaaagtggtctgccttactttgcccaaaaatataaccttcctgtagagcatatccttgatatgatgactactgaaaaattcattaaacccgctgagctgtttgattgtgaagaagaactagctgttaagctgcttctgaagtataacaacagcgattttattcgctaccttgcaccgtatgctgatgctttagctacagttaataagctcaaagaaaaatacgattttgtcgctatcacggctcttggtaattcagtagatgctaaccttaatcgtcgtttcaatctgaatgctttgttccctgatgcatttacagaaatcatggtctgcgattatgatgaatctaaagatgctttactggaaaaggctaaagtaaaatacggcgatcgcatcgtctgctatgtagatgatttgcctaaacatattgctgcggccagcaaagtatttgaagacactgaaactcgtgtgttttatatgcctcgtggtgagcgagaaggttcagtgactgctcctggaattatggttgaagattggcatcaaattgtaacttgcttggaatctctaaaatccgttaagaaacctcagaagtctcttaccgggttgtgggaagaagctatcaaagagcagattcgtaaagagcaacatccttttaattggcctccacgacaagttccaggagattggtggaaacagcctatcattccgtttagtccaggtccgcacgttcctcctggaaacgactggtggaataacggtcgtattacatgtgataaccaccaaattaattgctaacactctgggtatggtataatggccatacccaaggaggaataatgtttgtagttcatactaaagtaggtaaacgctggttatcatgtgattatggtcatgttaatcagttttatcgttggaatccaatttggcgtgaagcgaaatcgtgtccaatttggaacgaatgcatcaataatgggtttgtttatatcgatggattaacttatcatcgtagcgtaagcgaactttcagaagaattaggtgaataatgatttttgatatcatcaaagcaattgaagatgctaagggttctaaagccaaaacccaaattctcgttgacaataaagataacgttgatttaaaacgagcttatctgctggcgtattccgggcgatttaaattctttattaagaaagttccagaatatactcccgttaaatatccaaatgttccttcaaagacgttttctgatggtctagattacctccaagacattctggcagcacgagtacttactggtaatatggcaatccaggggctagtagatttgctctctaagatgaacgagggtgatgctagtgtactagtccgtgtccttcttaaggatatgcgttgcggcgcttcaggttctatcgctaataaagtatggaagaagttaattcctgaaatgcctcagatgttagcatcagcctattctgagaaagcactatcgtatattaagttccctgcatttgctcagcttaaagccgatggagctcgatgcttcgctgaaatccgcggagatgaattagatgatgtaactcttcttactcgttccggtaatgaatacctgggtctagataaacttaagcgtcaacttatcgagatgaccaaagaagcccgagaacgccatcctaacggtgtgatgattgatggcgagttggtatatcatgtcgaagtgaaagaagaagaaaacgacctgtttgatatgtttaaagagcctgagcttcctgagctaagtaaggctaaggaattccaacagacggctcgtacagaatcaaacggtttggctaataaggccattaaaggaacaatctctgccgaagaagcagaaggtatgagattccaagtttgggattatgttccgcttgatgtagtatattccgaaggtaaagttcctggatttgcttatgatgtgcgtttccgtgcattggaaatgatgagcaaaggctatgacaaggttattctaattgaaaaccatgtcgtacataacatccatgaagctcgagctatctataagacatacgtagaccaaggtctcgaaggtatcatccttaaaaatatcggtgcttattgggaagataagcgttctaagaacctcgttaaatttaaagaggttatcactgtcgatttgaagtgtgttggttcatatgagcatagaaaacaacccggtaaaatgggtgggttaatgttcgtatcagaatgtggtcgtattcgagttaatgcaggctctggtcttaaagataagcccgaagaactgcacgagcttgaccgtactcatctatggaaaattagagattctcttccaggaactatctgggaacttgaatgcaatggttgggtaactgctgaaggtcgtgatgatggtacagtaggattattcttgcctatcattaaacaacgcagatatgataaagaagtggctaatacattcgaagctgcatttggcgtgaactttacagaggcaacaggaataaaatgaaagtattatacgaagtgattgctaaatctcttgacggacgtggtggtatttctgttcacacagaagttcttgagtttaataacattaacacattaagaaacttcaaagaaaacattgaagagtatgagtctgtaaatggactacaagtttggcgtacagtaacaataattaattaaggccttcgggccttttttcgtataaatagaataaacaaacgaggatatgtcatggaacttttaaatgaagttttcgatgaagagaatagtaaaatctatcctgtcgagaacgttaagccaaaacttaaggtaccacaggtctttttgattaaggtgccgggtaataacaatttaatgattcggttagtacaagggtcaggtcaaggtgatgcagttaagaacatcaagatgggtgataaattcatccaggtctatgttttctctgtatccgaaaaaggtaacatcggtgcgcttaaaggtggtttaggccaagacccgattggtgctattaataccatttttgagaccgtcaacaaagtagttaagcaaattaaagctgatgcggtaatgttccgctttaatccgaagaaaatgcaaggacaagataaagctattcaacgcattcttgctcggttgattactactcgcaccggtggtaggttcaatctaatgaaagatatggcttactataaaggtaagtatgcttattccattatggttcgcaaaggtaagaaactcgaagagattgaaggtattcctgaaatttcagatgagttatacacaaaggttgaatccaaagtaggtgaaatttatgtgtctaaagaaaccggcgaaagcgttaccaaagccgaagcattggctaactccattggcgaaaaagaagacaagaaatctgaactcgctgtaatgagtaaaatgaaggtgtctcgaaaagatttaatccgtgctcagtatggtaaattcgtatcgtatgttgatgaagattggccagaaaataaacgcgaacgttggtatgaattaactactaacactccagtactaaacgcagaaggcgatactgtagacctccaaaaagatatcaaagccggattagaaaaatcaattcctttttatgttgatgatatcaagcactatcgtgttcgtggcggatatggaagtaattttggcgacgcagttgagagattatttgtaggccaaatgtcgagaatgcatgacgactggaaggttttcattccttcgggttcagacaaaatgaaaatagctgagcaacgaatttcagaagttgctgacgttattgctcaagctaaaaatcctgcatctatggaaacaatgcgtaaaatcgttgaagtagctactcgtggatttgatatgcctccagctgacgatttcggagctttacgtcaataccaaaatcttgttaattatatgatatccgcttatgtgtcaattgttggcgattctatatccaaagcaattgaatataaccgtgaaatgcaatctcgtttaagcgaagaagaaaaagatgcaatacatcattactgtggttctggctattcatttgttaataactatcttattggtatggaaagcttaggcgatccgattattgacaagaaaattcgtccgctcgattctgcctttgaaaaaggtttgcgtcttgaaccaggcactcttttgtatcgtggtcagcgaggaaaatatgaagactttaaagataacattgagtctaaaatgttttatttccagaactatgtttctacttcgttaagtccaattatctttggtgcttattcaaatgctggtgattcattaatgccagacgcacctagttctgatttagaaaacaaagaaacaactatcgatgcagtatcttccgttattggaacagacaacttggaaagagttgatagaggcgaggaagttgcctatggtgatgagtttaagtttgggttcattattcacggtgctgataaaattaaggtagttatcccgggtgtcttgtcaagctttagcgatgaggctgaagttattcttcctcgcgggttggcaatgaaagtcaacaaagtatggggaactccttttagaaatggagttggtgtagcgaataacaagacattcatggtagaaatgacggtagttccgccagagcaaatcgatgaatcggttcatctctatgatggtgacatcttgatggaacaaggcaaagtggaacctcttgaagaaagcaagttcaaaggctttttaaacgagatttatttctctccagaccgttctacagataaggttagctacacacgtaccatggagctactggctggtgctatcaacctggatggtatcccagaaaaacttgcataaagttgtttacttatcacaaggacgtgatactatagacttacacaaaccaatgaggaaattgatatgaaacatgtattccgctttaacggtattgaatggtctgctgatgttaaagatgcagagaagttcaatgaagaagttcttatcatgcttgaagggtttaacgaaggtactccgacggttcttattcaagatatcttccgtaagccaactgaaccatcgtttgttgaagcggttctaaacggtaaagcagaaggtatcattcccgttaaagtagtttggactactaaagaaatgaaacttcttcgcactgagccagggtttattggctgcattgcataaaacaaaggggccttacggcccctaaattattctgcttgttgaagtagtgatattagaaattccaccacctgccccgcctaaacgagacaatcttgaagcagacgcactcaagccctgatttggattaatcgtctcaattttctgaatagccttatcttccaaccaatccatagcagcttgttttccaacagaacctgtttgcatgctacgatatgcaaacgtgacatcaaacactgctatcgtgttttctccatcatatgtaaattcgggagctccacacgctacaggcatagcccctgagaacaagcatacagtatgaggtaatccatttctagcatgaaggttaacttggatatcgcattctacgtcttgtggcaatcctcgcagaccagtcactgggtcttcaacagcatttacccaatcttgcattgcccggtagttgcttgcttctgggtccatcctaaatgaaagaaccaacggctccatatctcttccagtgatttttatgttaggagcgttatggaacttatccatttcatatgacagtctattctctggtattttagcagaataaaccatcaatcctgctgttggaaatgccatattaaagaaatcgagcagataagtacctaccgtaaattctcctaataatgactgcaccacacgttgagtcattgcgccaatcataaatgtattcacacctgatttacgaacaacttgccgagttccttgtgtcactatagttgttataccctgattgaattcacctggtgtcaatccaagccaatttccatctaaacccatattattatacagctctccaccaaagtcgtttagaagagcctgggttttactagagggtacagtagcgaatacaacagagaacatattagttctctggaaatcgatatcagccgcttgactcttaaattcttcgagagtaaacattattcaatacctccgatataaacgtttcctctattaagagtaagtatttcacgcatagtaatttcaagcgtaaacgtgcttggaaggttaggagcgattgctaacccattaaaatgaccgttcggtgttttatcaaagcggatactctgaatttggcatggaccaaatatatcctctctaccatccattgatgtagaatatccaaaattgcgaacagtccaaatagttgggttagaaactacaataacattacttaaaaacgatgttatttgctcaaacactgtgttttctactttagctccatccggtgctgctgatttaagtgttcctttataccattcatcaatagcagctttaacttcttttgcgtatgatgaatttcccgtcacaccgtaagaataatagttaaaaatttcatagatgcgaataatttgtataaggtcatctgcagacctaggagttaaatcccaagtaaacactttcgttctattatcaggcccggcatacatactacgggcagtgttataaatttgctcaccattatcggccattaatccctgtgttaaagattctatcgacccaaacaccgcagtagaagccacgttgcttaatacaccagtagcagtaccgccaccgcgcgtaacaagagaatcaccaacatcattaaatttatggctaaccgaatcaacgtctgacttagaccgtggtaatagaatattagctaccggcgcagtacttgtagtagaacttgatgaattagccattgctgacattggtgaatcgaatacagacgataacattacatctcgtctaaatgaacgcaaatcaggagtagttcttcctttaaaatcatacgctgtgaataataatccgttacgatacaagtcatgtactctcatatcttgtgcggaatcgtttccggcagaacgctcagccggaaactgcgccaccttagtggttggcgcattcgtcagtttagatttacctgaggaaattcgggttcctgattttttgatgttttcaaggccatcggccagttcttcaaaaatcattgtttttccttaagaggttttcatagcgccttgcattccaggagcagctgttgaagtctgtggaggcgttctataaacgtatgtgctattcttatttacggcagtattaacctgaataggttgcgactgtgtattagattcacgtgtacgagcagcttcacgactatccgcagcggctttaatagaagcagactgtttaacctcaggttgttctgttgcaggtatagcttcggcagttggagcaggttctgatattttagaatcaagaagcttttgcaattggtctaattcaacctttaaatcttttgcaacttctggagataatttctccaattctttatatctggtggttgtgctttgtactgcatccttagcagagtctaatcgagtggaatcagatgcgtcagttttttcaacatatgcttttgtacgcttgagttctgcctcagcattattacgagctgtgatgattttgaggcgttcgtcttctggcaagtctgcatacgctgactgctttttctctccgctcagcagtttgttatattcatcgtcatcaatctgaccggtgaatttttggaacttagcagaaagctttcttttccattcaggttgttcgtcatattctctttcttgacggtcaacatattttgctctcattttagcatcttcttcatcgagttctgctccagtaacagtttgaaatctgtctaaagcagcgccttcaatgttatctgccgaatcgttaaatcctaatgcgcgtaacattccagcaagaagcttactcattccgagcataatggtttctccgagcttatcaattacatcaaccaaacccgagccaatggcttttgctaatccaccccaatctcctttgacgaatgattttactatttcattcgacatctcgcttattgcagttaatagcggaccccattctttagcctgcttgttaaattcaacaaagttcttttcgaataatttagtccaataattaaaatgaactttaattaaatctataagcattatcacacccaaaaccatggcggcagttttcgccatttgggccaaagcgctaacagtataactaaacagcatgctgctaattttatctgttaatgaaatagtttttccaaaaccagatttaacgcttttaattaattctccaaatttcaagtcaagaaactttttattcttgtcctcagtttcctttttaggctcagctttttcctcttgatcttctgtgctaggaaagaaatccgcgtcaggacgtctgtcatcctgaggaggaataagcctttcaagtaattcctccaatggctgctgagtaggagcatccgggacttgttccgttatcgtttctaatgatgttccagtaccagttttttggacatcttgttgaacatcatgctttttagataacaagtcagcaagcttcgtgagcttatcattaattaacgatgcagtatcatttaatttcgagacagcatctgttgtgcgttctgaagcttcggcagttaattcaacaccagctgaaacatcttctactgatttgataatttcgtttgatttagtttctattacatccgaaatcaaatcagtagacgcttgctggtcgtctaagcgacgaccaatatcttctagcgtattaatctgagcatcagcttgagactcagcctttttctgtggagccgagtcagcaataactcttctacgcattgaattcatttctgatttcttagtcattcaaatatttccattacgttaagcatgcctttgattggtccttcaggtccatcaatggctatagcgtttactaagtcatcagcccactttgttacaaaagctggaagcttcataaagtttatatccattggttttccatctactgattcaagaaattcgctcaaaattgaatctactgaacctagtttggaataacgaggaggagctctgaatttgaattctttaccatctaacctttgagttaatcgctggcaaatgtaaaccttattcaaatcgtaggtaaaatcatctttaacaacagtttcttttattctgttgttaaatgctaataaatgtaatacaacaatatcagattcggctgctgttaatcctggacaaattgaatccaaaagaagattcatgttttcatctggacccttaacatctttcatcagattatggtgctttaaccccagttttggaattgatatcgtcttttcatttattactattttcttaataggaagaatcacgtttaagttcatttttcaccttaatcaaatctacaggttcaagggcagagccgtttgtgaacatatataagttagttatagatgtgttatttgatatttcatggataacttcatctatataaaagtcagttctgaactggtcctttaaatcaacaaagttgattttcattcctggagttagttcaaaattaccgtaacacttagtttgagcatacccgtcatattgagccatcgtagaaatgcgtaaggcttcttcatagccattcctaaaaatcatgtcagaatatccgcctgacctattaatgaatacgctgttttggccttctccattaataattcgggtaacatctttgtccacaaatgagtgtgcataaaatgttgcgtttttcatgggatttctattatatctatttgatttaacaagccattcaaaatcccacgccaatggatattttaatcctgctgcaaactgacctattgtttgaggagctccaaacatgaatacatttgggtcctgggatatcattgattcatagtccatcatgttaatcccggtgatatcttcccaggcaaaaataaattggtcgttatcagtagaaatgcctacgtttctaacgtatcgtaagtaatctttgagagtactagtccatggaactcgtgggacgtaagcgttaattccgttgataggaggagcaatcaatggttggtcaacatacatcgcgcctatcatttcctttatagtttcatacgcagaactaaaaaacgctctactgaacttgagattcattatgtcatgcagcgttccaagctgaagggtgataatgctatcacctttatcatcaacaccaactgtaaagtgtttaattccgtaaattcgagtttgtgttcttgatgtgttactgtttgcaacagatatttgaaccagttcatcaccgttcatacgcgtgtgcatatttttcgaatcataaaactgaagcagaccttcattagtcccgcgtaatgaatctctcattgttaatgtaataaatgtagctgctaattcaacgaatctattagctagccacgcatcatatccagaatataattttatgcttatattaggatatcctaatctttgtgctgtcatgatttaaggtccttttcaataagcgataaggttatgccacgttcgataggcagcattttcattatagaattcaaatcgtatttaccctgagaaaccaatctatggttaatctgataaaatgtgaaaatctcgtcaggatgtaacaatagcttaaaaatatcgacaatgttatcatattttaatactgtcgtggtatcacagcatgacgtctttaattcaaaattaaagggcttcatctgcgataaaatcttttccaaggtttcaacatctatagcatcgataacggtcaatttattgctatcgctcaattcattccacgcgtattccccagatgaatccttcacagatataatattgtctaaaatcattttacctgtatcgtcaattatttctatgggttttttgaacttgagcgttaatccagcaacctctacttttggatttaccaacggaggctggttaagattaaaaagatactgcttatattttccgcattttgggcacttcattctgacaggtattttagttttaccaatacttgaaagaaataccttaagaaatatataaggacgatactcagcaggatggtcatgaaaataatcatccattaattctgctataagctgtttttgttcttcttcagacttggtgttcatgtcgtttctaaccaataaaaggtctctataatcttctacggtaaatggcttaaaacgttggacaccatctggtaattcgcatctaactatgttggccataaggtaatcctctttatactatttataaataattgaataagaggagtggatatgaacatcacatataaatttgaaacaagaataaatggcaagaatatccagtgccgagcttttacactagaagaatacgctaatttaattgcagcgaagaaaaacggtacaatcgatgaatgcgttaaagcattgctcagagaatgcaccaatgctactgggttaaacaaacaagaatcggaattacttatagttatactttgggcgcacagtataggcgaggttaatcatgaggtgacctggaattgcacctgtgggcgtaaaattcctgtgccattaaattatacacatgcgcaaatcgatcctccagaagacctctggtatgacttaaagggattcaagataaagtttaagtatcctaatctttttgacgattccgacattccaatgatgatatcaaaatgcatagattatatcgtggttggaaatgagcagatttactttaatgatttaaacgatgcagaaatcgatgatttatattctgctattacaaccgaagatgtagttaacatcaaaaatatgctattgaagccacaggttcaattagcagttcccattacttgtgaatgcggaatttctcacattcatgtaattaaggggcttaaagaattctttaagattatgtcatgagcaatatcgataaactatattctgaccttgacccagagatgcgacttgcttgggataccgatgtgtcaaaaacagtaggagctcgatcagttaaaaatagccttcttggaataataaccacaagaaaggggtctcggccatttgacccagcgtttggttgtgatatcacaaacgaattatttgaaaacatgactccgttaactggtgatacgataaagcgtaatatagtctctgctgtgcgtaattatgagcctaggattaatcgtctatcggttgatgtacttccgttatatgacgataatgctataattgtcactgtgcagttttctatagtagacgaccctgatacgctagagcgtatacgcatacagatgcgtagtaatgctaactctagcagtagagtataatgggactagtccttcccaagaaacagtagagtggagatagaatgagattagaagaattacaggatgaattggataatgatttgattatcgaccagactaaactacagtatgaagcggctaataaccccgttctgtatggtaaatgggtgcgtaagcactcgacttgtcgaaaagagatgttaagattagatgccctcaaaaagcaaaatcttaaagcacgattggattattacactggccgtggcgaggttggtggtgaagtatgcatggatgtatatgaaaaatcagaaatgaaaactgttttaagcgctgataaagaaatcttgggtgtagatactaaattgcaatattggggaattcttttggagttctgtagtgatgcaatggatgctatcaagtcacgaggttttagcattaagcacattattgaccttcgtcagtttgaagctggcgcgtaataaataaacctgtaaactaaggagacaatcatgtcgaatacggtatgtgtcgtctgtaaaggaccaatcgatgaagcattggttgtccacacagacaaaggtccggttcatcccggagcttgctataattatgcgattgaattgcctgtcactgaagacacagaagagcaattacaagaaacgcagcttttaatttagtctagtgttgatgtagccaattggctttgccccttcctttcggttggggcttttttgtattagaagtcttcgtcatcttcatcttcagaatcggcttcaagagcctgtctacgccccgccaaagcatcacgcacaatgatgtcatcagaatcagcaagagtagtttctttagagcgcttatcgtaatacttctcgagttcttccagaccatctaaggtctggcaagcattaattttactcatgaagttatcgatagtagcctcacgaattgtggcttcataaatatcttcaaatttaatcatagatttaccgttttcattacgtagttaaatttttcatcagcatatcgttgaatacgctctaatgcatgttttaagcaatagttcaaatgcgtgtatttctttttagcattagctgacttcggctttacacccaggtcatcaatgatatcccagacagtagctaaagatttatctttgtgtttacgaagaacacgaccaattgtttggagaacgataatcttcgatttaacgggatgagctaaaattacatgatgcaggttttttacagaaatacctgtagagaatacaccgtaacttgcgacgataataattccctttccgttttctgccatagcctttaaagcattacgtgtttcagtattaacttcacctgatacgtaataaacttgctcatgaccagtagctttaatcatctcgaatagctctttaccatgagctacatgtttaaacatcacaaaagcgttttcatcacgcgatgctagcttagcagctagattagcaacccaacgatttcttttcttaacattggtgatgaatttaatttcttcttgatacgtttttccttttaaagcgtttgtagctgcatccgggtatcttaagaagattgtattaattttaagctcagttacttgtccgtcttccattaatttggaagttgatactggacggaagatttcaccaaacatgccaacatattgcatgatattagctttgccgtctttaagagaaccagacagtccgtacttaaacatgcaattggtgagacctgcaatgattgttgaaattgactttcctgttgcaagatggcattcatcattcatcatcataccgaattgagaaaaccattctttaggctgcttaacagcggtctgccatgtagatacataaactaatgcgttggaatcacgagcagtaccacctcgaatacccagcatagcattgcgaggaaataaacgataatcacaaaaatcatcaatcatctggtcaactaacgctgtagtaggaacgatgataagaattttgccttcgtaattttctacataataacgagcaagtaatgcctggataagagatttaccagcagacgttggaagattaagaattctacgcctattaactagtccttcatatacagcatctttctgataccaatggggttcaatcttagttaatcctgaatagatttctttagatgctaaccacgtgtcaaaatcctcccgtgaaagagtttcttgctcgaatatagctggatcgaaataaactttatatccgaattggtcagcgaattttctaatttggccaacaagaccaaacggtaagagacgattataatctagcagacgaattcgtccatcccaatgcccataacgatatttcgggttgaatctgtatccatcggcttcgaagctaaaatagtctctgagttcatagaaaattgagtcatcacactcaatatgaacatgactaaaatctttaaatttgacttggatgtcgtgcactgtactatcctcagtttataaatacaatcatatttatacattacatgaggcacacccaatgctagataaagactatattaaagaaattcaggcactcgataaaaaagaagctaaagacaagctcgacgaatatgccaaaaccttcggtattaaactgaagaagacccgctcatttgacaatatggttgctgatttggaaaaagaactggctaaattggccgatgagcctatgccagaagacaacgatgggctgtcaattgctgatttaattcaagcagatgatgaaattgagggtaaagcagtatttaaagatgaagcgtctgatgaggcaaaactactgtttgacgctccagttaatgttggtattaaaattcatgatattgacccaggtttctataaagaaaccactaaggtaaatgacccagggtttgaagtaaaaacaccttctatcaatgataaaggattttatgctgaagctcctattggagacagcgttattcatattgatgatgaaggaaaacttacaaacattccaattagtatcacggaccctgaagaattctccaaagcaatggacaaagtagttaaaattattaaaacagacgaaatcattgagcttcctgaaaactttagtccaaacatgcagttgttaggtaagaacccaggatatatcacccttccatggtggatttaccaatggattaaagataacccagattggaaatctcggccaacgtcgtttgaacacccatcagcacaccagacactgtttagtttaatctattacatcaaaagaaacgggtctgttatgattcgtgaaacacgtaattcttcatttgtaactttaaaataaggaacacctatggcttatagcgtatctattgctcctttggctgcttcggcagtcattggagcaacaaccaattttactgcaacaacttctggagccgcagctgaaggcacagaaacgtttgtatggacagtaaatggcgtaaaacaatcttctgtcaccgcagctatgaattatgttgctgcaggacctgccggcagtaagactgttaaagtagttgctactgttaccccagcagagggcgaggcagaaactgctgaggcagaaactactctgactgttcagaacaaaaatatgcctgcaattactttaactttgagcccgacttctgtttctaaagaaattggccaatctcaagtagtaacagctgatgttactggagcaccagcaggagcaagcattgcttatgtttggaaacgtggctcttctgttatttccggtcaaactggtaaaacaattaccttaactgaatcagtagaaactagctacacgttgaattgtgaagtaacggtttctgctccagactataataatggaactgcaactaaaggtattgctgttgcttttactaaaagagtagcccctgagccagacggagaacttccatatattcatcctttaccattccgtggaacagcctatatctggtgtggatggtgggtaatggatgaaatccaacgaatgactgttgagggcaaagattggaaactcgacgaccctgacagcgattattacctgcatcggtatactctggctaaaatgctagatgattatccagaagtcgatgtacaagaatctagaaatggatacattgttcatcgtactgcgctggaagcaggtattatctatccttaatattcgggagccttcgggctccctttttgctattcacggattggtttattatgtcctcgtcacatagatgaggttattatgaaagcattacaagctcacttgatgcatgaaagtggtaaagatttccaagaaattgcgagagaattagatatcactccagcagaagctgctaaattgtgggtctcagttgagaaagcacacgaacggtttaagcaaaaagaaaaagtcgtttatcggaaacgcttaacaaacgttggtataaaatctcgtcataagaaacttgttaaacacatgaggactttatgatgtctaaagtagataaaagagtagtagagaaatttgagatgttcctagagcgtaagtttgctcctgctgcaaacagtattaatgattggcgctctgcttcgagatttgttgataatatgatggctcgaatatttgatagcacttattataaaaacggtgctcgcaaaatctcggatttgattaaagaacggtatggaaaaattgattggatgctaatggatgtaaacgttccattagtattagaagttggacctaaaaatcaatttgaaatcatgcggaacaaacacgatcagttagtgtaccgctttgttccaagcggatattaattgctttaaaaatcgatgtggtataatgggctaaggggaaatcctctgataccattttgaccaagatagactcctggttttatattatttattgagagaaaaattatgaaccttgccggtagaatggctaatacagctattaatgttgctacagaagaattatcagcagcaaaagaagaagtattaacccagattgagaaaaccgctttagcgggtaagcgtgagctaattatgtatccgagtagtctagttaagaaacacattacaagcgttcttaattatttgcatgatgaaggatttgttacaaattataccagttcccagcgtaacggtgatactgactttatgaaaatcacattctaaggaaattataatgtttgcaaaatattctagtcttgagaatcattacaacggtaagttcatcgagaagattcgtggtgctggttttgatatgcatactgttgagtgggtagctcgtgagaagattcatggcactaacttcagtgtgattattactcctaccgaaatcgttccggctaagcgtactggacctattttagaaagtgaaagtttctttggtcatgatattatcatgaagaaatataaggattctttcgttaagatgcagaacatgctgaacgccatggatttagtatctgttcaaatcttcggcgaatttgccggcggcggtattcagaaaggcgtagactatggtgagaaagatttctacgtatttgatatcctgtcggattccggtaacgaaaaagtttattgggatgattatgtagtagaatcgtttgctactggtcttggtcttaaattggctccacttcttggtcgaggttcatttgccgagctatctcagtatgtaaatgactttaaatctattgtcaattactataatgagcttgttgacacgactgaccttgaacacgcaaataaacatgtgttcggtccgcaggcttcttctgaaactggcgtagctgaaggctatgttcttaagccagttcatcctaagttcttcaataatggtactcgtgttgctattaagtgtaagaactctaagttcagtgagaaggctaaatccgataagcctattaaagcgaaggttgaactcaccgagaatgataagcgtgttctggaaatcttttccgagtatgtaacctggaaccgtgtaagtaacgttctgtctcatattggtactgtaactgctaaagatttcggtcgtgttatgggtctgactatgaaagatatcattaacgaagcagcgcgtgaaggtcatgacatgctattcgctgataatccttctgctgttaagaaagaaatcactactttaattcaaaacactattcgtagtaaatggcatgaggttttagaataatgagattggcgctgattggttcaagagaagcgccacgcagagttctgagtctaatgactataatcggtcaacgcctctcggaagaggggcatttttcatattcaggtggagctccaggttcagatgaagcgtggttggcgaaatacgataggtcaaattcttgtaggattattccttactctggcttttgtggccactttcctgatacaggtgttgttgtatggtctgaattatcaaacgaggccaaaatcaaaagcatcattaaggcgagagaagttacgtcgtactgggatgaatgctcgaagatagtgcagacattattcgcacggaattctatgcaggtattgggcctagaatgcactgagcctgtagataaggtattatattgggcgcctgaaaaaagatgtgggagtgtatctggagggacgagagtagctgttgatatagcccgcaggcatgggatagaatgtgttaatctctatgataagaatgtgtttaaatccctcgaggaggaatactccccgaggtttgacatatttagtttataacaaaaaaggggagccgaagctccccataaattagtccgcaataagcttaggtaacttaacaccgagcagtacagacatcttacttcttcctgccatcttatccatatccgcagcattaatcacacgagcttcgtcctcgtccaatcctacagtatatgggttaaccgacagcgcgtaacgaaccagtaaagctacagaaggctgcaagctagctgggtcaacaataactttaaatgcaccaacatgctcagggtcgtctaaatccaggccttcggtatatggcgcataaaataaagaacctacagtttccttcccaccaaattctgccttaacaccaacaataacgtaatcaactgggctgttagtatcacaataaagaggtaagccgttattcagcataccgtacgcgttgtccggaatagtgccatcattcttctgtgttaaccaacctgaagctgccagcaccgcagcacaacgagtagatgctactgcataagtaccagaataagaagtattacgttgaactgctgaattcatttcacaaatgaaacgatacagagtacgaccttgttccggagcagaatcttgtttagttaaatctaatacacccttatcggatacaccagctactttaaaccgagaagaaaccgtaatcaatgattgcaagatgtctttattaatgtcttctgccatttcagtagcaagtaaatcatcaataagctctggagcatcgaacccgttagcttctaaatcttgtgctagttctacagttaaatctgttttaagcttacgcgatttaacctgggtctgccatttatcaattttaaaactggcttcggtgattgggtctgaatcaggtccttcaaatttttcagtgactgcagcatctgacaacatacgaatattattagctgctactgcttcagatacaagtccaaattcatcggtttctgctgtatcggtaaacgggctatctttaagtactttaaagactacgttctggtacttaaacatgtcatctttattaaaagaatctttattcgccatagtgagttcttcaattgactcacgttccggggcaccgatttgacctgcataggttgcacctgtattaaacgtcaggtcaccattagggttaagatatttgataccatatagcgctgctacaggctgtttagtacgctgtgtagcaacaagatcggtatagattaatttagtagttgcgcgcgttaatgcaacgagattagggcgaccaattaagttgctactcgttgtagttgactcgcgcagaagttcgttgattttagccattgcgctttcctctgtggatttataagtttatttatatccattaaaacaactaaagggagcccgaaggctcccttattggtattagatacctttaacccatacacgacggaagtaagcattcttaccaacagagttgacgatagaaggcataccagaggtaatacgacctttcggctgttgagcagcagaatcggcgaacgggttaataccgataccgtaacgggttttgaaccccatgaccggttggaagttcttcggatcggaaccacgcagcggggtcagtgcaacatacggagcatagtagataccagcatccatttcgttagcacctttataaccgatggtgaagtaatcctgacgagcatactggtcgatgtatacacggtagcgaccacccagaacaccagcaaatactgctttagtggtgtcggtgttataaccacgacccagaccctgagctgccggagatacgttagtatcaacagctgccagtacgttaactacgttacgggaagcgataatgaagttaccttcaccgcgaccggtctgacgagcgatttcagcggattctttgtcaatctggaacagcagagctttaaagctttcacctgcccaacgagcaccgcggatatcaatcgggtcttggaagtcgaatacaccggctttagaaccaacagtctgggtcataccagatttaccaacctgagcggagtagttaatccagtcaacaacttcacggttgatttccagcataatttcggtagccaggattgaactcagttcagcatcagcgtccataccgtgaacagcacggaggtcctgagccagttcgatggaatactgtgctttcagctgacgagatttcgcttcgatagtttgtttatcgatacggaagcccatttcattccacgggttatctttcgaaccgttaaaggcttcttgcagttcagcaacagaagtagccatgccttcggcgatttctacaactttaccagcttccagagcagcagtaactgcagcgtccagtttagcagcatcggtagcaccagcgtctacagtgaaatcttcaacaacctgcagatgagcacgaccggtctgtgcgaaatcgtgaacaacgatatcaccaaccgtcagagcatcaccagctttaactgcttcaaatttctcggttgcaccctgaccagagaacattgcatccggagcgtacatcggatggaaagcttctttagcaccagcagccagcgggtctttgccgtaaacagcgcggagagcgaatacctgaccggttgggttagacatcggctgtacaccacagatatcgaaagcaatcaggttagggatagcacgacgaaccatacccataactgccgggccaatctgggttacagcaccagaggtctgaccagctgcgatgttctgtgcatcataaccgtggtcaccgccaatttctgcttcagacaggaaagaaccaaatgcttcagcgattttttcatcgcggtattccggagcctgattaatatcagcttcctggttttcaaaaatcttagcgatcagagcttttttgctagcgccaacaatttccggcagagcttcgttctcaagcagcggctgccatttttcgataagtttattctttttcatgtgttgtataaccttttaaattaagaaagacgagccgcttgggctacataagcatccataacggatggggttttagtcgcaggagtttcttcgactgcttcagttgtgaagtttaaaccgtctgcttctttgtcgatagtatttatatcggcagattccgttacagactgctctacagaaccctgcaccatttcaacaatagctttcagcttagttgaaaacgagtcagaataatccataccctctgtcagagaaactactttctctttttgagtatcagtcaattcacgggttgcttcttgaatagcatactcgcgttgggcgtaattgatataagcatcacgcttagaaacttcttcaaataaacgagcagtttcttctttttgctcagcaagttcttcttccatttcagcgactacgtctactgattcttcaggaattacgacattgtgctcaacaaacagctctttcataccgacaaacatggattcaaacaggtcagctttaataccgcggtcaaccgccagctggttttctgccatccattctgcagcgatatggtcaaagtatttagaagcagcttctttcagctcttcgcgagcttcttctttagctttttctttttcttcttcaactttttcttctgctttctcagcaatcttttcaatatgagattctgccagagctacggcgtgttttttgactgttgcttcgaatacagtgctgaagttagctttagcttccggagaaagctgaactgattcgaaaatactgtcaagagcgacggaagcatcgatagttttagcttcggtcattaaaagttctttaagcatttttgatgtcctgtgttaagttacataattatttataacgcttttaacttctctgcgagagccataaaagcatcatcagcactattggcaacttgtgccgaggtattttccgaaatttgtttcggttgtacccatgcatccggagcactaggaccccaaactgcgtctacaccaacagtcaggcgaaagccttcttgtacgatgttatatccttttcctgagtctttcaaagaaccaagtccacgacttgatacaccaggaatccaaccagcacgaatgttagcggctaatttatcacctggaccgtggtctccttcgatgattcttgctcgcccataaacatcattgcctttccaccacatatcttcgataatgattgcggcttgcatcgggtcaacatttgcgcgaggtggatggtttaattctcctagagcctgacgagtagcaacctgttccttaatataacgacttaccgcagtctcaagaatgcgttttggataaagacgtttattacggtttactacttctgcctgcataaaaacaccttcgatatacagaccaggttttaagccagattcattttcgccttcaacgataatagattccagcatgggtttaccatcaattacatcgcccggttgaccccaatgctcaattaaaagttgttcattgaggttttccattaacttagccccagagcctgacggcgtttaagtgctttcttacgtttacgtaatccacgagtttgagccgatggattagcacgttttgattttactgctttacgcgcgatttggcggcgtttagctttagaaagtccggttgtttgaaacgcgttacgctcacgtgttttacgatccttagtacgggtaatagtacctttagaatcaacgtgcttaacgataaattcatttaattgtagagattcgttaattgaacctaaagcaattgctaaatcaggctcagaaacaacaagattctctacaattttatttatatcatctttagagagcgctgcggacaacttatcaaaacgcgcctgggcttcaggaagaagagcttcgacagtgtcgataactaattcatgattttcaggcagtataagcattactcgtcctcttcgtcgtcttcgtctttatcagacttatcttcgtcttcgtcgtcttcatcttcgtcctcatcgggctcttcaccctcaatcatgacagacgctgcgataatttttttgcgctcttcaattaaaccagatgtccgttcagccataattgcaccaaaagcttttttggctgctacgaggtctctggattcaattgcggaaatataattttccattagaaatcctcttcattttcttggtcttggaagcgagcctctttagactctaattcaatttgcttggcttcttgttcaatttcttcatcagacatctgaaggaaatctttcattgctgtcttatgagaaatatacttgccgataaacggctcagccattgtgagcatattgattctacgctccataacttcagcatctttcaactcggtgaaatatgaatctttatggaacacaatcttaatattatttatttcgtcttcccactcatctttagacaaaacttttttaagaattagattagtgcgaagtggatcaagcataatctcttcgaatttatgctgtaatctacgaataaatttagcaaaatcaagctcatcacgagtaattgctgtgccagcatcaaactgcacaccaccttgattatttgcatctggcatgcgcgaaagaggaactcgcaatgccatgtataacgctgttctaaagtaacggacgtcatccatatcactcataccggacataccaggaagagtatctacttcagtaactgctttaccatctctacgctgcaaccaatagtcttctgtcattgacatattatgttgctgatttttaatcttaccggttgatgcatcatatacaacgcgatttttcatcgtgttcataatatgttgcatatgagctgccgctttacgagaaggcatattaccagtgtcaatgtaaaacacacgacggtcaggagcacgagtaatacgataaattaccaacgcatcttctaatagctttaactggttggcgggtttaacggctcggtgtaaataaccgatgatgttttgacctgaacaatcaactagtccagaatgtgcatatacgatagcatcgcgtggaattttaattttcgttccggcagaatataatctgccatctgcataatagctttctttgccagtatcgtaaatgaaatactctttgtaccccttaacgattttagtaccagcgtcatcagcagtaacgatttcacggatgaattgcaagttgcgcgggtcaagacgtctcagttcctgaattccgtctttcattttcttggtgttgacgattttatggaagaatattcttgagtcaacataccaacggcggaaatggtcggctccttttcgctcgaaattaaggcatgttaaaactgtattaaattcttcaagaatgcggtctttaattgcttgactgaagtcggtagaatctaaatcaagagaaactactggatgaccgtcttcgtatacaactgcgtcagaaactatttcttcaacagcattgtcaacttcgtagttattcattaaactgcgataagtgttgattaaatcagcagttgttttcattccaggttcattggaaccaaacatcatttggttgaatgaattatactggatttcgttttcgtttgattcaacttcacgagctccatcatcaaattttggagcagtgattgactctaggtcattgttgatttgttgcttatattcagcttcgtcgcgtttttcccacggagcgaataagtccaaaatatgaaaggccattggagtctccgaaattatctataagtatatttatatcgaagttttgtcagatatttaagcaaataactcacagaacttcgatacggggccgaagccccatagcattattcccaccagtcgatggcaaaggtagtttcaaacgtttctacctcgttattactgtcccagtccatctgtacttcaccaacgttagttggccacagaccggtaatggtatgttcatttgtgatagttttgccatcacgactaaactggcgtacagtagcaacttttttgtaatcagctggagtcataccagagatatcattgccttgagcgtgggcctgagcctgccaagcaataattgccttacgtacttcatgtttatcatcgttatagatggtaacagtccagtcgtcataagtacggtcaccagcgacgttaatcttacggttcatatacccgactggaactttttctacgatacctgccggcatcggtgctgctttacatttgaaactgaagttacgacccagataaggaatttctacctcaaacaggttaggacgtgcaaagtcaccagattcaaacgcacgagtgatgtctgttaattccatcgttgtttcctatagatatttatatagcctctcgattgactacatcatcgtagaggctattaaagtgtgcggtaatataatttatcatctaaagattagatgaccccagaatgtcctggggttcatttcaatagatcccataaatcaatactagatttttttgattttgaccgattttcttcccaagtgattatctctaaattgtcaatgcttcctataatttcaggaggaactttgttgtaaaatccatacgcgacagaaaccttatggtctaattgatacgctccaggtattccacatagtccaatcttatcaaaattttcccatgtagaataaattggtttatgcttagaagtttctcttctaactttgctagcatattcattatattctgtcttgtttggattccagcgaggatgattttctccacgcatgatttcaacagatttccctttgttcgcggaaccatacttgttgccagtcatggctttaacatgtcggcaatcatagcacacgtcagtgtctctgcaataacgctgtgaatattgttcaccgcatttatcacaaacacaatcaacatatatgtttgacccgggctcaagatggtcaacactgatatcaattgaataatatttgaatccatgcctaggcgaacccagaggaggcagcttgtatccaagttccgaaaagtatttaaaatttttaggaattatttttactttaacaaatttagagataatcacttggttttccttaattgcacataatatttcatatgtgcaattgtatcaggatttagcgaaaatgtacaatttattgtggtccgatcaactcatcgaaatctgcaccagttgccgtagcaacgaagttaagcgtaatataatttatactgcgcgccggtttgatatagaagctcgctacaaactcgttgcggtcgataactgctggagtgttgttcgtggtatcacatacaactcggaagtcatatacaccacccagagctttaatacctgcgaggtattggcttgtttccatacggaaagaactacgagtaaagttatcgtttaattcaaacagctgccacttagaagaatcaccgatgttgttcttcagcatgttaaacaagcgacgaacgttaattcggtcaaacggtgttggaacagtggttgcagtcttatcaccgaacagaatgaaaccttcacctgtaccttgaccagtcactgggttaatacctgcttggtacatgcggtcacgatgtgcctgacgcggttcaattgccaatttgatgcaatttaaaatctgaccacgacgatatccagctggtgacatccaaggctgagcaatatcatcagtacgagcacacaggcctgcaatatcagcagctaacggaacccaacggtttacgtcgttatatttatcatactgatatttatagttgccgtcaattgcagcatacgtggtattgatgttcatgtttgcagagtcgtagcttccttcaccttgacgccaatcaattaaattatcaacagcacgggtcagaggaatatttacaatcgttgaccttggaggcgaaatgagtgctaaacagtcttgacgctcatctgcaatagacgaaacgtgtttttgtactgtacttgcgatttcatcggtttcaccggcacaagcaccagcaatcagaaggtttacacgcaatgcttcacggtcaccaaataaatcccaaccttgaattaaatcgccagccgtaactgattcattagctgaaaccccaccgcccagacgaataacgccggaaaatccttcaggccatccttgcgcggtagcaaatatataacgtgaagaacctttggagaaataatcgtccataaagatgttgtttccgtagatgtctttatcttgacggcttgttgataacaccgttgattcaactaccgcaccatctctacgaacaatgatagcgtactgagtatcggtctgaggaccatatccaaatacggcttttgcggttgatgcacgctgtccaccactcggataaatcgtcagttgttcgcctttatcaaaagcggcttttgatacaatttcaatttccagttggtttccgagctcgcccggatacgcagctacaattccaggcattttatattgcgcaagcgcagtctggaattcggttttggtcatttcttcatgtgcagtttcatgttcagtcagtagaactgttgaatcagaaataatttttcccagagtaatgacagcggaaacaccagaactctgtgaagtaatggtagttgtccacgaagaccctaaatctgggtactgattaatgctttttgcatatgcaataatctttgatgtcggaatgaacacagacagaattttaccgtcactatcaacagcagttacagaaccgccgtcatctacagtttggtctgcatatttaaccgtaattttatcaccaacttcatagttactaccagcagtagtgatttcccattcaatattatcaaccaatggagatgcgtttttagcagcttcacggttaactacacggacggtgcgtagatcattaccatattgcagaaagttcattgctgacataaagtaatcagcagtttggttattaggaccaccaaacatatcaaccagttcaacttcgttagtgatttgggtaacttgatatgcaggaccccattggaacttcccgacaattgcggcacgacctgtagcgttaagtactaccgtgctctgtacgctcgtttctttgagctcaattccaggagagactaaaggcatgatatatcctcaatgttgtttgctttttattatttatacaaatgaaagaccatgttcttgaggcgcatattctgcgctattcacggcgtcaacgaacactacaggagcgtaatcgtcgttcatatcttctaattcgcgtttaaaaacttcagatgctaaacgcatttcatctttatccacgaaatcagcaaatttttgctgtgttgttaaccatgcgaaaattacgagtgacataattaaatcgtcatgatatccatcttctgccgcccaggatactcctttctcagagaaagtacgaaattcttgaacagtagcacgatggtgaataatgagtttatctttttcgataaggtcttttagtgcagaacatccgacggcttttgaccttttcgtctgtttcattcctaaatcaactattgaatcgcaaatgacattctcatattctaaatccatataaagactcttcgccacagaaacacctgtagagttaagttctatatagatcggagcttcgttgtactccattagatatttaataactatatccgggaggattaagtgagaaattgtattagaatgtaatactccaacctgttcccattcagatgtagtcacgtcaataatatttagtgcatggtaatcctgaccgcgtccttcagcagagtcaagagttgcaatatatttgtggtctgcttccgcttctttaaatttataaaacccgtgcgagtcaggagtaacttcaatccaatccatattggcaagtttcataccggaaatgagagtaccggatgtgccatgaaattccgcacagtgctcttgtttaaactgttcaagagaagaagcactgatagtttgaagtgaccattgccacccatcatcaaacatatcttcgtcgttatatagacgttctttaaccgagttccaaattgcagtataaggcgtaaagccggatttaccttcaaccgctgctgtccaaatatcatagaagtggtttaatccacttggtgtagtcgtgataataattttagaacgacgaccagatgaaataaccggctgaatagcaagccatgcatctatgaagtttggaataaacgcacattcgtcaatgtaaatcattgcaaatgagttaccacgaacggcatcaggactcgaagcgtatgccccaatagatgagccattatctaattcgattgagcctttgttccattcaacaataccaggctgaagaaagtcaggaagtaattcaattgcttgtttagtacggtcgagaacttccgcagacattgagcctttatgcgcaagaatacctaccgctttatctttgttaaaacagacaaagtgcgcaagaaagattgctactacagtagttttaccgagctgacgactgaggttacaacaagtcatacgtttggctgccatgatttccagcatgtccctctgataatcacgaagctggactttaatggtaccatagtcaatgtgagtaattgcacagtaggtctctgcgaagtacacaatatcgtctcggcatttcttccattctgcaactatttcacgggttagttgcattttaatatttgctcgtttaaggttaggcaatcccatataacgagtgcgcttattatttttatccttaaacgtttgaaaatgcgctgggtcttcaccttgcaaacgaattttaactatcccatgcaacttaagatagtcttcaaatttctcaggataccacttatcatcccattgtgatttaaagaaacgaactccgttttcaattttcgtttccatttcagacgggtggcgaataaccgcctttttcccgtcatttaaaggatgggcatcactcagaacgttaaacggttgagtctgttccatttactattttctctcgagcttcttgtgcttcataggcatcaccgaattcatccatcatatcagcggtagaccctacaaagactgttgcgttttgaatattcattccttgttgaggattagctccttttccagtactaacctgctcagaagtaatgtctttcatttctttatgaagcttaagaatttctttgttagttgtagtcatctgacccataagagttgcaaatacttccatatgtctaggagagtcagcattcttagcagtttccaaaaatattttagctgcgtccattaacatttgttgctggaagtgcatgttcttgcgaacgaccgaatagtcatcttcgaggtcaggtttacggtcatttggattagatttaacttcaactaattcaagtttttcataaactggaatttcttgtccttctattccaggaattccttcgatgtctaataatttagccatatctaattgtaattcactcatttttcacctctcggtccaggagcctccggatttaccggaataggaatatcgtgagaataagtttgtttactagaaccatcccagttttcttgctggacatcacgtggagtaacttcgctatccacagattcaaaatttccttctggtgttaattctttactattagcgaagaaatccaaataaatggttctaatttcgccgtcaacctcggcaacaggaggatataaccatccattgacttcaaacatcagcgaccattctaatctacgacgagtgatattatctccatcaacagcttcatcctgagaaaatgactgtaatacaattctaacatcacgattaaagcttgtgtctttgtcgtaaagctcagttatagtcgtgttaaaatgcggctgaaaataaggaacgatttgctcgatgatttgatacatatcatcttgattgcgtgtataaattcctaattcaaaaatcatcttaataggagtaggattatattgagatgtaatttttgaaggagttttatatgattttgttctattcagctgcgatgttttatacatcgcattgtactgcatatcaaccaagtgcaaattcattcttggcaaaacagtttctatctttgctttattctcggtagactggatagcagtccattttccgagttgagaaaggaacttttcctttgaagcataagtgataggtactttaatatattttagtccagtgtcttcacgccaacgagcaatttgtacatgagaaaataaatctccaagcaatacaatgtatcggcgtaaggacgaattataccaatgtccaaacatgatttctcctaagggacccaaaggtcccatctttattttatttattcaaaaaatccgtcatcaaacgaatctgctttaggaggagactcaagtcctcttccgttattaacataatacggatgaacatattcagaggcttctttattaattgcatcgctttctgcgtattgtacgtcagaaatatcagcaagagaatcaatgtttttgattggttctaaatcaagttcagagaactcaggaatgataattccttcattgcgctgcaattctggttgaagctgctcaccggaataaatgtatttctgcgcagtaatcttacgttgaacattttgacctaactgataaaatggatcatatggttgaacccaattaatttcaaacagcgaattatccatcgggaaataaatcaggtcacctgcctttggttctgaattattggtctgatgcttgaacaaattaggattaatagtcaaattgacttcatcattaaccatcataccaaatttactgaagaacgtgttatcaccagaataaccgtcaaaagagtctaagtaagcagcaaatttccaagccttggtgaatttacttgatgggtcttctccgaaaagcaaatccggattattatattcacgaggaaggaaataaaactcaattcctctcatttgaatagcctcagctgataaaacatctgctaacgtttggctatttctgtgattataaaaattcacataaggattgagaatttctgtctcattagttttattgtatcctcggtaatcctcaaggcgagcgaataaactagaattaaatgtagtcatcttttaccccaacagaataggacaacccgggtcaagtaaatcaagttcctctcggagcttctcgatttcttcttgggcctctactttaagtgtttgaccatcaactgtaacgccgccggctaattgcagaccctgatgtttaaacagaatttcaccccacagctttttagttaatgctgtagcataatcttttacccaacggttgttatacgcgccttctctgtttgtattaccttctccggcatattgaccattattacgaaggctaggattttgatatctatctcctaatccccaattatcagcggtctgcgtcccggcaaatccgtatcctgctgtattgcctaccatcacatctgtattcataaatgatttggtccaacactcacagacaatgatgtcacccttcatgaagttgcccattactttaagcatttcattatcagagttataccaatagtctggaagtggggcaagcaaatcctgcatcattgaccaataagtcatcaattgagtaaaatagccaaggtcagcaccaaatgcatttggaccatagcttttactacagcttgaccccattccgccattaattcctgccattcccattagaaagtcagtaaaccatgggtatgtcgcattaccatccattgaagttaatgaacctacatttgttctaacgatttgagtgacagcaaatacattacgaccacgtaaatcaaatacaccattcaagaatctttcattatcggcttcatcttttccaatataaaaaacttgatagcctttattcaatccgttaaagtggtattcaccatacaactctaatgctcgttgaatacaatcataaatttggtcttcagttacttcgacattaattaccggcgctcctagacgtcgaagtatagcgtctttaagcgtttttgggttgtatgtgttgtatgacatataagctcctctttatattctatttatacgaaaaagggacccgaaggtccctttcattatactgctggatgaatagtaatatccaatgatttaatactaacaggaacttttgattcttctgaagcagctctatacacaattttgattgcatcgccagacgaaaacttaataagtttcttggttttcaacagttgctcgccggttactgctttaacacctaggctataagtaaacacctcaatgttattgacgagaataacaatttggacggctttatctgaatcagaagcttcgataactgtatcagtttctacgcaaaatacaccatcgtcatcgacaataatatcatcaacaatgcgaattccagcattaaatgaagcagcgaccaatgagttaggatttaccaatgcatcagaacttaaatcaacagtgaaatcttctttactgaattcacctattgatgaaggctttttaaaccattcgccctgtttacggaggtatgctccatcttgttctacgtcagtaactgcagtcacgaatttatcttgcaattctactacagtggcatacacaccatcacgctgaaccggattttctgatgaaaaatcaccgttcatttgagtctgcaatgtaaatacagaaccctttaggccttcactgttattaccaagttctacttgaatatcctggatagcagattgttgggagttttgcatcccttcaacattggtcattctcgctaaaattgaaccaggaggaacttgctgtccactaggaacaataccaacttgctgatttatccatgctacttggccttgaagccctgatgaagtatcacgtcctacaacatcagaaatgtatctttggtcagttgaaagagaactaatctttccttcaatgctatcaggcttatcagaagaccctaaacgagtatcaatattattgacacgaggaactaacccggtttctgcagagttaagtgttgcgtcaactatacgataatcattttccaatctagtagtgcgagctccaatttttactggattggtaaaatcaattgcctggttaatagcaaagatttcattgttagctgcggaaatagcatcagcgttattcacaagccttgcataaattgaagctgaagtggctccggatttaggaccaacttctttacgcaggtcatttacttcaatagtcaatgaaccaacatccgaatcattatatgcgtcctctagcgcttgaatacgctcatcatgttttactatagctgacgcgttattgatgattcggtatttcataccagaacctggagcgtcttgcttaggctgtccattaacatcttgcccaggatatgccccaatttcccgtttaacccaaactatattatcacgaacagttctgtaatagtcatctttactagaatcataaacacctacatcctcttcaagaaaatcgaggtcagttctaatctttgtggtgtcttcttctaatttaagaatttgcccatcgtgcttttcaatattctttttattgatataaacctgctcaatagcgtcagaagaacctgtgatttctaatgactttttgatttggtctacatctacttgaatattttctacagcagttccaacgttgttcaaatcgttatgtacttgaaccacatttttctgaatctgcacagaggctctattcagttctccatcatttccatagcgggttgaagccccattaagaggctctgtattttttatccagttaattctctgttgaaaatcgtctggaattccgtctacgaacggaagcgaatctactagtttggtcatattgttccttacggtctatttgtacagaatgtaagcatgcagtcataaaatataatacgactgtcttctgttggtcttatttgaacagtggcatttggaggaatgttattgaagaaaaagttgctagatgcgtaagcttcaaatctccatgaatgaccattttttccgcctttagtattttcaatgttaagagtaagttcaccaccccattgggaaccattaactattaaaacaaatctgaaaatacgattgtcatatccgtcgttgttacgctcaaattttacgttaacatttagagctaatttactagaagcttcccatggtgcattacatgtaaacgttgcacctcggctaatccaagattgtccttcaacccaggtaacattacctactctagttccagctggcatgtagcgcccgtcggattcttgtcttgtataacaattaatatcattattagtaattgttatgtcattatcaagagtttttccgtttattctacgagttttaaagactgcatctgttgcagccgctgccaatgaagcatcagtagttggagaacctgataatctggttaatccatatttatccttggtggattttagcgcttgaagactttttggagtaacagccaaattgttagaagtagctgaagccacatctgagtctttagcaaattttactataccaaatacactgtcagacgcttttgatgccatgaaggtttttggagttactgcgtatccatcgtgaacagcacctgctgctacctgggcttgggttgcgacacgaactagtcctaagttgctttctgttgcagaagtataagtaggaggattaacgctgaactttccaatcatttctacaacacgcttaggagttactgcagtggtttcatcagttcctgcttgagcttgagctgcagtcgttaacctaacagttccatctacgttttcttgggctttcacagttttaaacacatgaccaagagcagcagctgtaatagttctgtttgctgctgttaatgctgcagcttcagtattagtagcataccgtgttaagccaagaattgcggtagttgcttcaggccgagtaattgtggattttaatgtagcaggagttaccgcagcattaccaatagttccagcatcaacttcagcctgtgttgctgtgcgaattacaccggctactgtaggagatgctacaggtaatccggtatcagttcttgcccagctaccaatcagctctaacgctgattggacgtcttttatagcaacaggccattgtgtatttgttgggtcaaatattgtatatttggccaaatcactgtagtgattatagttattctgggccattatcccatccttctaaaatagtggaaagtaaatgtgttcgcgccgaaggttttagattcgttgccgatagcatcccattgcccataacccgctttagcaggtgaagtaatagtaaattcaacagttaaaccatactttttatatgtttcaaaattatggttctgataatccagatgaataatatcaacatactgaggagttgccggcgattgagtaacctgttgaaccacctttccaacagcttctaattcttttactttatcataccaacgtgttgctacagctgcgaagtcatcaccgttcgcaattctaatcggcaatccgagaatatgaattattactgggtcaccaacagaaccgtcttctttaggttctaacgaaactacacctgaaaaagtagcgcgtgtaatttgctgtgctggttgtggagatattccggtgtcattacaaacaatagttccaatttctgctgactgtaatgacattaaatcattaatagcagcttctgcatttgggtaccaaacacctaaatccatttgctcaaaggttaggctccctataggagccttatttccaaccgcgatattctgcgggtctacacgatattctgaaaaagcagttaatcttgaattaactttagctccttcacgagttttagtttcaatagtcattttaacctaccctaatccaacgataaacggtgattgttggctgaattttagtgatgtcatttggaactacaccattgtttactgcaacagtgtcttcacggtatttagaataacctggaccttgtgcgtctgggtctaattgacatccaccgataactacgcttccatgttcagggtctgaaattagaactttatctcttgacattagttcaggaatgtgttcttttcctaacgtaaatgtcaaatctccaaccgttccacctgctgttaatgatggctgaccattttcgtttaagttattattgttacgcgcaaaataagggtcagatgaatcattattccagcccgcagtaacacggccttgtgaataaagcttccacaccccaaatcccatatagtcagcagggtttgcgtggttgtgggcgttttcgtagatagtgccaatcggataaattacgtcaaagaatgctgcaatgttattgactttaatcataacatcatcagcgacaggacgcatatttttctgatttggttcatcataatttgtgtattcaatgcgattttttagagttaccaattgctcagcattcatatacacttggtcggtttctgccatgatatcgtcaatatccatagtagtaccgatgttattattgaaccaacggacggtaagaaggtctttatcttcaaacgcctcaccaaaaataatagcttcgacgttagtaccagttgagtcaaattccagtctataatcttggttagaatttacccattgaccaccattgtttatacagtcttctgcgtatccgccttccgcgccttcacaataaaataaaggaagaccagcagttccagcttcgagtaattcctttccgttcaatgaaatttcaagcgagttaggatttacccctacgcccggaagtacacccatgtcatccagagtgattctgcggagagtagcaaggttatctactatcattgacccaggaatcgtctgggatgtagtctgggctgaatctcgtatctggatagccaacttgttgtatgaagaccgataaacaccaattccatctaggaaggtttcaaatgttattacttccccttcaacacatggaacttttaaacgaatgtctttaccgtttaattctaccaattgacctgctactgttccaggagaaccgtaatcagcattggctttatccataacgctggtttcaccgtaatataaaatattaccacgacgatatacattaagcgagtcttcgttgtattctacgccatcaaaaatgttaagaaagtcagtctgacccgcagtagcaataattgattttttcgctacagtacttaagttgccattagttagcttatctacagttttattttcaatatattcccagcggccaggggcgcaataaactaattccaaatcttggaagttagtgttgaaaattttaggagaagctgaaccttttaatgtatcgccttgagcaggaataactgtgattgggcttaatcgccaggttgaccaaacatcacgaagtttaataactttgttatagtcgtttgctgtaccctttggaagctgaacgttaactcttgctgcctgggtattaatagcaaaggcctgaccaaacttagcatttaaagtagttccagtagggctagctttaaaagttttccatgcacctgctgcgaatggaactgaaccatcacctaactctgaatataaatcatcaaagttgttattaattttaagaccacctttacggaggtaatcaccagacccatcatctactgattggcctactatcaaattttgtttcattattgagatacccctacggtctgtgtagcaataactttaactgccaaacgtgcgtttccataagatgttgaagctgtgcatattaaatctttctgcgcgttaatagagtatgaaatagaatacatcttttcattttcagatgattcaccacttcttaacactgcatattcagtgtcaaatactcttccgtttggcgctgatgaagtaatagtcgggtcaatcataagcatgacttcagatgattgccttttgatggtttgaccacctggatttgcgctgaagcttaatagcaatttaacagtagagtaatcatcattatatccaagtcgaatattaataggagaactcgttaaattatatgtagcttctaacggcgaatatgtgctgccaaacatacttgaaattgaataatcccaaactgcagcaccgttagctttgacttcaatacaccatagctcaattctacatcttggtgtgttgataatcaattctcgcgatccgtctttaaatgcatcagctacaccttcgccatttgttgttatttttatggatttagattttgatgctgagccattactatttacaacgaatacagcttctcccgctttaccttttgaaagacgtatttgaactgcgccttctgaacagtcagcatctatgcatgaccccattggaactgtccctgcagagttagcatctccaaattttatcttttggtaatagctcgttgcatgaattttttggttcaatgctccgccgccagctgcaaataatcgttggtcggcgaaggcgttgtaaatggcgtcgaagttatcattaattttcacaccgccatcatacagaatgtcgccggtagaagcattaccgatctcaccgacgtcaattatttttttacccttatctgtatacataggttaacctcatatcaaagtatagtcttatttatataaaaatggggagccaaaggctccccataattaaaactcgaaaattaaatttaactcttctgtttggtccattgaacgtataataggttgccgattttccatgtaaatcatttcacctgactgtctttcaagaccagaagcgctataccaacctttttcagccttaacgttaggagaatttggcattggcttaacttcaagcggattagttataattgacaactgtctaaacccagtatttcccggaagactaaactccggaaaataaattgcatcaaggtatgctttaaatctaattgtattacacttcatacgatagattaggttaaagtcgttttgttgccaagttaagttgttttgaaatccccaacgagctggagattcttcaatctcttctggccaaggaactacgatatattcatttgtgcatctgttaattgatacgtcggctggaatttcatatagatattcccaaagatatccatcgcccaaatcgacggtaccatttgcatcaccacgcccacgaggcgctgaaccggaaatagtggatggtgtccatttacctccaagcttaatacattcgtctttgcttgtaagattaccaattgaacacattccatcttttggaacatcaatacatctatataccatccatccaaatccagcatcagttctgttatatggcgcagagttagcaacaacgatatcgccaattaaaaatgtgcgtgggttaggatatcttgtatctccccagtctcttcttggaacaacacagtcaagcatagatgattcaattttgactgcacccatcatatttgtccaaacatcaactaccccatctccattatcagcggggtatggaggtgcaaatccgggttcagattcgttatctgaccatggagtgctttttccaaatgaaacatacaatgtgttttggtccgttcccggaccaattgatttataaaatgtgtacatcttttcagttctaaacttagatgtaatgatagcacgataaatcgtgctacgcgttgaacttgctcttgttgaattactcatcaatttttacctgtgtcggattttcaggatcgcgaggattacctgcatcgtctttaagacgttggttaactaaatcgcgataattagcaaacgttactgctgattggtcaaatgtagggctcaacggcttacgtcgttgtcctgggttttgtccagcaataatgctgttattattttcttgattgtagttagcaggtaacgggaaaggttcaccagcttgagcacgtgaagaatacctaggctcattagttattgggtctctttctattgtatcatctgaagcgataatagcaactctatcaggataaactgatggcagtcctgcatcccatttatagttcttgagtttatttatgatagtctcaacatgcttcatatttaaaccgctattgataaacattgtcaacaacgttataccaatgaaaccgaaacctaccggatgaacaaatctcagtacatcatcacggaaccgagaagtaggaagctgagacttaattttcataacatagtaagaacggctgcggtttatatagtcaatgttattactcaacatatcctttccacgaacaccttgaactataataccctcaaagtccgtacgctctgatttaatttcctggccttcaatgaaccgtcctgataagttatgaatagtaatacgccacaacagacgaccgtcccggtattctctctcgatataagtcacattactacgtccagaagcagtgtaaacagtacgaccaactaaatcgtcagaaatatttgtactctctacaataatgtcatattctgtcgtattctttgactcgatgtcaatttcaacatcttcattataaagaagtttaaacaagaacttgtatgagtcttcaattcctttggtagcatagaaatcattcttgcgcgcttcaaagaaacggacgacagcatcgcgagcgtctttactcagataaatgttgcgtttataaacttctgaccacagatattcccatgcattttcttcgcgaggatatttgttcttaacaagattaacgagactgttgtaatgcgttccatttccgtctgaaaggaattggagataatacttacaaaagtgctcaaaattactatcttgcaataagtagctatccggcatcattttagtaagatacggacgcaaatctgggtcacgtaagcctggagtatgttcaggagtccagtcttcttcacgggtttggttctgcagaaacgccttaaacattacatcagttggtttccagttaagcgttacctggtcacgaacacgataatcgaatgcataatagcctatcaactttccgtctggctcgtgaaacatgataccagaagcatattgcaaaaatccgttaaatgaaaccggagggcaataaaacgttgcgtcacctttatcccacacttccgaaagaacacgctcagtagttccctgcgcagccatatctattcttttctgataaagaatatcattataaatgacaactgcgtggtcagctgtacttatccagcatctgttgccttcacgagccatccagacaaaccaaggttcagcataaaacctcatcggcccaggaacaaatgtttcccatcttgaaaattcatctgctctgaaactcatcatgtgataatgcttatcagagtgatactgaattgggttaacattttttactgcggtagaaattagttctgggtattttgtctcaagttcaatatcctgaacatactctgtcgtcttgaaattagctgatgaaaagaatatttcctttccgtcagttgacatagaagtccataaatgctctatacgacgtttttcttcatcggtattaccaaatacacgcttccaagtatttgtgccttcctggtaaacatagacgcctttagttgcagaatccacaacgttccttgggtctgttgggtctaatcctaaggttttaacttccccggtaataagggcaaagattttgcctccaacggaatccattttaaagcatacagatttaggattgcctgttatatgagatacttccttttcaaacaccttttcaccaaatgtaggacttaaagggtcagtatctattggagcatcttttaatttaactttacggacagtgtcttttgcaacaacatacaaatagtcgtcattacaagtaaatgcttccgcatatttggtaacgtcagcgggtaatgacgcatacgttccgaataattctacttcaaagccaagctttaactggtctcccaatttagcaaatgtaacttcgttatcgctaaacttaacctcgtttgatgaccagcgcacgtcagatgatttccttccgtaaaagattttatcatatcctaaaacgtacgatgtggtacttgattgataaatgactactcgtgaaacaggatttcctacacggtcattaaataactgaacatattgccagttctgtcctttatcatttgatactttaaccatatgttggaatctttcaaacagatacaaaattccgtctatttctcctagcatagttctatttttatcaacacacactgcttcaataggtccctgaatttcatgatatccagattcacctacaacgaagttttcaatagctgataaatgagaatattcaggactaaactgaaaagactcagtcatcaaagatgccatcatggcagatgtgttgaagttaacatacgacatgttgtttaaagaaaacttctgtttaatgaattctttcactaaactgaattcttgcatatgctcaaatgtgtatgcgttttcttcaaaagtttggaactcttctgtttcaacccattcagacggttcaaaacctgccgacgtagtttgaacacgcattttatagtaagtaagcggttcaatacgattttgttcgaaccaatcattatccgcggtataacccagtgaagaccagctcagattatcagcggggataacttcccccgcttgatttcgagtttcggccagttctacaaaatagtagaagtttgcaccaacgtcatcccaacgaatattgacctgattcgcagatagcttatgaattcgtaagctggtgacgaacggtgcaattgtcattgagtaataggctccaatttaatagttgtgtattgaggacgaaggtcattctcaaatacgataagtgttccatcgcgggcgaagacgatatcctgggtaggagtagaataaagctcaatactttggtcttcaaactgaagaggatcggctccaatagctccaaggctccagtaaatgttatcaccgtaataatctacttcaccgattttataccaacgatttcgttcaccgttagtagttctatcaaaatcattttcggtatacggctgaatatgagtattctctttaatatcacctggtttaaatggcccaataaccatatttcctttgccatttttatctgggtcagttccaacgatattaactggatatgaatctgcagttggagtgacagtaaagaccaaatcaccagaacgtaacgtccgcggagtaatagtattatagtatttaatacctgcgctaggaagagtgaaatagttgacaatttcacgaaccatctgaatatccacagaagaaccgatgattgagtggtcagtgtcatcaatgtaagtcaataatttagatttactgaaatttttgttaaacatttcaacttcatcaacgtaatatctattaattgagtctataatttttgactgtaaccactgctcagattcttgtaacttattcagcgcgtaagaggctttaatattgtgacggatgaacaagtagtctggactcattaccgaaggggtaatgggagcaagacagaatggacgaagataatcttggatgtcttctctttgaacagcggttaactgcagtccagattttggcttaattgcaataaacgcataccctggcttatcttggtcggtaaagcactgtactgcctgcacaatagaaccaaatcgcgagctaacgaatgactcatagtcagttttagacacgcaacgcatttgagattcacgcttaatttgtgctaattcgcgaatacgttcaatgtcttcaggttccccaccgccatcagctccaacataatcaggagaatctgaccagttttcaatgattttgtttactacgatatattgcagggtatcagcatagctgaaatcagtcgcaccattcgcagcttcaccatcagtacgaatatattcaataacgacttgcgcacccttagtaggcttcaatccgccgatgaagttgctttcaagaactcctcctgccacagatgcttctgccacaccctcaccaaagaagaattcggtatttccgtcgacagtttcacgcatataataaattgttgaaatggatgaagcatgaaccattgacctgtctgtccagttagtccattcagcgccatcaacccacagcttaacctgcttacggtcaatcgactgatcacgaataacaataggtttcttcgggtcatatgacaactgagtacgaataatacgtccctgtgccaaattgacaataggaagatacctattaactccttctggtgctgaagtatctcttagcgcaataacattttcagtaacgacaaaattgtatgggtctactgatgaatcccgcgcatatgctaaaaacttggttccacgaggtatttttattgctggctctggatttggatgagttacctcaagcataatagacgcagtagccgctgatttggaacttggcaaatacccgttttgctgagctgcttgaacaacggaacttctcaagttagctgttccaataaagctttcgtataaagcagtattactaaattgctgtatgtaaagcgtgttatatgctaataagtctaatagcacatttaaacgcgaaccagcaaaatcaaagtcctgaaactctttttgaccgctaagccagttaataagctgatttttaatttcatcgaatgttgctccagtaaatgcgtctgggatagcgtttgcagtacgcgttaactgataatttaaaggttctttaatagccattagtgtatgaatacctttgagcttgattgcgcgacagtgtcgccacaagaaattggatcggccatttgaacagcttttttgcctgttacaaataccttggatgtgcgaggttgaacaactcctccatgcgtatcatgagggtcaaccgtcttggtgtgtggggtaattgagtcgccatcaactaataccgctattccaccagtgaatactttactttgtgtagcatttacttctgtcggaggatacgcactatgcccggcagttaagcatttattaaatgatagtccagccatttaattccccgcatatacataagcacgaagctggtcgccccatctactccagttgcctttaactgtttgagagtaaatcttttgctttttatgttctgttatgattggagcgctagaacctccggatgaacctccagacgattcttctgtcactgtatatattatctcaactgtataggtaaatgtcttctctagtgttctgggggctttccacaaatataaatcagcagttttgggattaggtaaatcctcccacgctgaagcggactttagctcatcgccttcacggtatttaagcacatcgtttccaaaagtaaaaaccgagttataattacctttataatgagtttcagacacagagatatcagatactggttgatagtcgataatatttattgattttaatgtttcgttagtagataattgagcagtaaagtactgctcaacatattcaccttctattacttcgcgtaacgtggtattaataggaagtatatcagccatgattaacctacatcaattcgtgaaccatcaacagtgtattgaccttgggcgattgagctcatagaagccattgtctcagtccaagccccaccaacattccaattcacagtacctgctacctgccaagttaaattaccaccgacggtcacgtcgtggttgccatctactttagtagtggcatcaccattgacttggatatcagcatttccttcaacgactatcttaatgttacccttgacaaaaatagtaccatcaccttcaatcgttttagtttcatttccacgtacataaagcgtgttatcgccatcaatttgctgtcgacgattatacatgttataataggtctcgttccctccaacgttaaccttcttatccccagaga

SEQ ID NO: 13 - DNA, 172870 bp, Unknown
  bacteriophage strain capable of infecting bacteria of the genus Klebsiella
aaggtatttcaaagatcttacttcctatgcaatggaagaatttaaatgattaaacatccctattgtcttgttacccgcccggttagtccgggtggtttgcctgttacctgttggcagttgattgaaaagggtgatgcgtttttaaacaaacgcggtgagaatgttttcgtttacggtgttaactcaatcgataatgaaactatggttatcaccgatgagaaaacaaatgaaaaatatacgttgacatccgaacacgattgtcgtaattttaacgtatattggaaatctgatgaagaatttgaaactgtgaggaaatgattatggaaaccgtattcggattttaagtgataaatacgcctaaaggagagcgtatgaactataagcgtatttacgaccaactaattacattggcaaaaagaagagatatacctaaaggttactcgaaaaagtatagaaagcgcggttatgatatacaccatatcgttgctaagtcattaggtggtactgatgaacccgaaaatttagtatatttaacatataaagagcattatcttgctcatcatctacttgctaagtatgctggtgataaaatgagatatgcttttttccgtatgtctcataatactaagaaatacaaaacgacatcttcgcaaatgagcgacgcgagaaaattaaaatctcttacaatattcacgaaagaagcgagaaagaaaatgtcggaacggcaaataattccagttgtcggattcaaccttgaaacaggagacgagattatcatattaggcggtcggcaagaaatgaaattgcgtggatttaaccctagtcatattcatgaatgttgctccggcaaacttgccaaaagtcaaggctatgtatggttaagaaagaagatttctgatttaatgagtgaatctgatatcagaaatgcaattgcattagctaatatttcacaaaagaaaacagaattgataaaacctttgattatgaaatgtatcaaaacagaaagagaaactattttaaatggtggtattgcggaagccgttgaaatggggtataacaaagggcatgtaagttcatgttgtaacggtaaaagaaaaactcataaagggttttattggagatttgtataatgaaaacaattgttgagatggtatttggttctcacctgtacggactgaacacaccgacaagcgataaagactacaaagggatctatctccctcatcctcgcgaaatcctgttaggcactgcgaagaagtctatcgatacatcaactggtgataaaaactcaaagaacgatgttaatgacgtagatcgtcagatttacagtctgcaaaagtttattagcctcgcatgtgatggtgacaccgtggcgattgatatgcttcatgcagatgatagcaaactgatcgctaactctgatatctggcaatatctccgcgctaaccgttcacgcttctacactacggaactaactggcctgtttggttatgttcgtaagcaagcggcgaagtatggcgttaaaggttctcgcctggcggcactgcgtgaagttgttgatgtgttacaaatgattcccgattactggtatggtacatcattgctgggtaacgtagatgaatctaactacggcaagcgcatcaaagttggtgaggtttctaaccgattcccgaccaacgagttttgtcgattcgttacagacaaaacactgaaatcaggttgtcaggaattttatgaagttctggggcgtaaattccagtctacaatcaccgtagcggaaatgaagaaatccgtgtataaactctgggatgaatacggggaacgcgcacggcaagcagaagccaacaacgggatcgactggaaagctctttctcatgcattgcgcggtggtatgcaattgatccagattttcaaagaaggtgatattgtgtatcctcttccggatagcgcatttttgaaaatggttaaagctggcggtgttcctttcgcaaccgtacaagaggcgctagaatcaacgatgtgtgaagttgaaaagctggcggctgtatctggttatccgaaagaagttgatcgcgatttctggaatgatttcattgaacgtgtgtattctgaacatgttgtgaggtactacaaatgacatatccgaaattatccggcgctgaaattgatgttctgtgtaaactttacggatactcgtcaaaaatgttggatttagatttcaacgatgttcccagtaaatcagggcgtgatgccctgattcaaaaaggctacgcatctatggcgtttagttcgccaacgaaaaatactgatatgtgtttagtgatcacccctctgggcgttgacgcatacaaacacggaattgaaacggagtggcgataatgagtgatgttattttgaacgttaaagatgtagtattgggtgatactaaaaccctagattcggcaatggaaaaggctgttgttaaaattatgcgcaatagccttcgcctggaagttaacgagattacagaaacttgttatacaggtgggctttgtggtcaatctctttatcgtgatgcaaaaagtgtgaatattcagctatgggctgatattggcgaagaatcatacaaaatcgatgaggttgatttcgacgtatgaaaataattgacctttgcgctggtgttggtggcgtgaggctcggtttcgataaggcattcggcggggtcgaatgccttttaacgtctgaaatcgataaacatgcacaacaaacatatgctgataactggggcgatgaaaatattcagggtgatatattcgccattgatgaaaatgatgtgcctgatcatgatatcctgttagctgggtttccttgtcaggcgttcagtaaagcaggtttaaaacagggcatgttagatcctcgcggtactatcatctttgaaatactccgcattatacgggctaaaaagccctctgtgctgttctttgagaatgttccccagctattaacccatgacaagggaaacacgtttaaaaccatctacaggctgttacaggacgaaggatacgatatccattatcaggtaatgaatacaaaagattttggattgcctcaacgaagagagcgtgtgtttattgtctgctttcgcgatccagtgttctttagttttcctgttcctccacgtaccccaacaagggtcggtgacattctcgaaccggataatgatcaatacaccatatcagatcgtgcctggaagggatttagagagcgtaaagaacgaaacaaggcaaacggcaaggggtttggttatcaggccgttatggtggattctgtgtgtactgggacgataacagcccaatactataaggatggtgttcaatgtctggtattgcaggaaggtaagaaccctcgaatgttatcacctcgcgagtgtttccggttgcaaggatttccggattcattcaagatgcataagagcaaaacacaggcgtacaaacaagctggtaactctgtatctgttccggtgatcgaagcaattgcaaaacaaatcaaaaaagcgcttgcataggctaacgaagaatagtatagtgaccttgttgaaacgaaactgacaaaaggaacataccatgacttttaatgacctgtttaacggatgtactggtgctggcgcgaaattcaatcttctgaaagattatccgctgggttctaatcctggttatgtgatggttgaagttcgtaacggtgaatactataacgtgttcatgtgggatcgctctttctcttactgctggttcggtgcgaaatacaagccagattacattctggagcaaatcgaaacagtaaaagctaaaaatcctgaactgtatgcattcgcagagtctattcgtggtgtgttcggacattgattaatcaatccccttttggggttttttcgtgaggtttatattatggccccttcaatcgtgatgcttgttatttctttccttgcttttgtcagtattatgtgtttgctattgtcgttaaaacaaaatatcggaaccacttggttagttatccttttgataatgattgctggtttgttccttttgattgtttccgatgttgtgtctagtctcatgtggcacatcaactacaatcgttatgttcagtgaggtttatatgattaccgaagttattgaaatggttttatacgcgttaacgtttgttctcttgttccttagtgcggagtggactagtcgcggaaatgtagtaatggcccgtatttgtgcggttgctgtgttctggatcctgggtttactgttgattagcatcgttagggggtggtgatgatttacgtagcttcttatagtgctgattatgaattcactgaaattgcccatgtttctgaatcattgcaaaactgcgttgatgcgctgaacaaagttcctaatttcccttatcttggtgatcatgttactattgatgtatgggaaaatgaaaaaatcattgcaaaaagttcaacattcgggcatcgcgatgtatgggatgatgaatcactacagtacaacgaaatccccgtaacttttgaagaggttatgaaaaacatgaaggaagtgaaagatgaacatctatagtattgagttgatttttgatgaccgttttgagcaaacgtctgattgtgtatgttctactgttgacctgaacgtcgcgatcaaatacattaaacatacaccgcttccgtcgttgcattactattgtgtaaccgtgtttgatggattcacaggaaagccaacacatcgttgtactgttggttataacgaaagaaaacatttcactgcgtttgagtgggagaaattataatgaagatccgttctggttttgtgagcaatagttcatcaagtagtttcatcgtccggttcccgaaggatccgactgatatcaacaatctccgcgaaatgatgggtgactgtgttcctaactgtggttatagctggatgacttgcccgacagcggaagaagttgtacagcaagtacaccgcgacctgggcggtcatatggggaatggctttgaatcatattatgatgataagcgttatgaatgggaaaccgaagatagcgcagaaactcgatatcggtctaatcctcaaattgcgcttgcttatgatgggcgtgactggtatgatctggaaaaagaagagaaagacgctctgatcaagatgtggttgtatgaagagtacaacgctaaatttggcaatcagaacggtgtattcatttatgaatttacttactctgatgaatgcggagaattccaatcacagcttgaacacgggcaaattttccgtaatctggaacacactatgaagagtcatcactgatggaatacgaaatctgtgtaaaaatgcccccctatcaactgggggaagaaataacgtttagtcaaactctaccagtaccgattgatttattttctttgcgaaaatatcttgaacggttcgatctgaatgagtatactattcaaatcgtaaggattaaaaatcctgttgcctacgctctgtcttttgacgttggcgagtctcaaacaacaacgatggatgattttgtttcattgttgagtagtaagtttggatgcgatgatgcattagatactattagcaaaaaagtaaacgaaattttaataaaatttacctataaatgagaaaattatgatcactaacattgaattcaaaaacgccgtagccaaaccaaccccgactaaccacgtttttgtttgtgacgtatccggatcgatgtataacgaactcccgcgcattcgtcagcacctgaaaaacaacctggcaacgctggttaagcaggatgataccgtatctattctgtatttctccagccgtggtcagttcggttctgtattcgtgggcgaaaaggttagctctgtatccgacctgagcaaaatcaatgatgctatcgatcgttatctgcgtccgaccggatgtactggcttcgttgaacctctgcaactggcggttgaagtcgctaccgatctgcaagcggataatggcaatctgaacagtctgatcttcctgactgatggttatgataactgctggcgtactgatgacatcctgaaagcgtgttctactctgccgttgacgtttaacaacattgctttcctggaatatggttattatgtaaaccgtcctctgctggaaaaaatggcggaagcaaccaacgcattacacaaattcgttgaagggtttgatgcgtatgtacctgcatttgatgaaatcattaccgcgcaaacctccgcacgtgttgaagtcaaagttggcgatgcaactcatgcgatctacctggatgaaggccgtgtgtatgtcctgaatgctgcaaatggtgttgttctggttccggaacatatcaaaaacatttgggcgctgggtgaaaacgcgatcaatgacgttgacggcttcgatccggcaacagcagaaggtgaacaggttctgtatgtggttctgtatcatgcgcttcataccatgaatccagatctggcatggaaagttctgaaaaagctgggtgatgtgcgtctgattaaagcatacgataactgctttaccaaacaggattattccaacgctaaagatatgatctccgaagcggttgttgatccggctaaacgtctgatggatggtgttgattacaacatggttcctgatgaaaacgcgtttactctggttgatgctctcgaactgctggcagaaaccgacacagtgatcgacctgtcttctgaacactgggcgtacaatcgtacaggccgtcagactgtccagaaagatgatgatacgctggataaactgtcagaacagattgcaaacgcttctactccggaagaacgtaaagcactggcggcgcaactggtagcgcatgaagtatggaaaccggaatttacccaaaccacaacgaaagttgcagtgaaacacctggtgggtaacagttcccgtccgaacatttccatcaatacggatctgcaaggttatgtaaccattccggaaagcaaacaaaaagagtttggattgccggaaaaagtagaaaccaaacaagtgcgtaactttaccattgttaaagatggtatcgttaacgttaaggtacttccgctggaaaccgatatcccgactctgaaaaacttacgtgcttctggtctgactatcaaaccgctggctaaaattggtgaagaccgtatgtctgtactggttgactttacctctctgcctctggttaaccgttcgatgactcgcggtatttctggtaaggaatttgttgctgataacgtccgtctggaaatcctgaaaggccgtcagaaggtaatgaagttcttccgtgataacgcgattggtttacgcaacgcagaagggcttaaacagcgctttggtgaggcggctggtgaatggttgtctgagcaagggatccgtgattacggcttttctccgaaggttgagcgcacagaatcgactgatgtttacatgtcgaaagaactgaacgtgaaaatcaaaggcgtttcatcacttccggctgttgctgctaccgttgcaaaacgcgccgaaggtaagaagaaactcaacaatggcgacctgatcattctgtgggcttatgatactgtatctaaagagatcgaagcgcttgacaagaatgacctgatcgagtatcttgataagcagacaaaggaaactattaaagaggttcgcgcccttaataatcgcctgagtcgtgtaatgtacggtattgtcgtcggacacgcatggtttgcggatctggatttcgaagaaaccagcgtaagcgttaccgcaacagatatcgttgcagcggaattctggaaagatgtgaaatttgattgcacaatcgttctggaagaaaaagaagtcaaactctaatgaatttgcccccgaaagggggctttgaggtgacttgtggaattacttgaattggactttaaaaatcttatgaatatatgcgaactgaatcaaggcgacatcctttatttctccaatcgtgatgggtttcgtaattcccgtcctgaaaacatcggctttcattcacagctacctgatttcatcgtcgttgatgatgtccggttaacagataacggctggcaggttgatgtagtcggattcaaaaataacaatggtgctatcttatggcgtcatggttctattgatgaatcggtgtattttaacaacattcgtgtaaacatcgatgaaatcggaaccgatttgagcgaagtgcgggaatctccttatgtgttcagcaactggtttaaagttggtggcgcgtatcgttctgataacacaacagttgtgtatgttgatagtttgatgtccggtatggttaacttcaacccgtcattacctggtaacaacggcacgatgatggacattttcagagattataatcgctctggtacaatgttaccttctgaaaaagcatatgtaatcaatcgttgcttgaaagggctgtaccaggatatgcttacctataacgaaggtaacgtaaaagatgcgcttcacgatctgaataagatcctgaaagaagtttctatgagaatggatacctgcaaatgatttatttattcgcgttcgtttcagttgttgtattgattttcgctggaggtgttatctattatgggtgtgaccgtcgtgaagataaggtcattctatggggtatcgtctttgcgctaatccctctattcatgattggtaatatggtgatgcgatgaaaattcgttctgggtttgtgagcaatagctcaagcagtagctttattatcgggatcggacttgttcgccctggtaaagaaaaggaagttgctgatatctacggtgagaataatattgagtcattaatagatatgatcaccgatgatactcgttcgaagtggggtattcctcaagtcgatagcaacggtacgatctcactggaagcgttcggttcccatagcgttgagatttcgtatatctgggataagttgaaagaactggggatggacgatatcaaaattgttcacttcaatgaacgcggcgatgaaccagaatatgatgatgaatgcggaagatacaattatagctggtatgaagacgccgacgcgttcgggcctgaactcgaaagaaagtataatttattacgtgataaccgcgaactgttcattgaaggcgatgtgaattgtggcggggattacgacggttaaccactggggtaatgcatgataacgatagtatactgggaagaagtcgaaagcgaaatgatcgatggggaactggcggaggttgacggggaatccgaaatgcttactgctactgaaacaatcgaaaacgctttcgatcgaatcaaagcgcatcaaaaagaaatggaaggtcgtgatattcagtacatgatgagtttctgggtcggaggcgaggcgttatgtcatgccgtaattgcggaaagcacctcagttgatacatgtcgtgaaaagatcgaacagtacgtgaaatctttcttgcattgatgaaaaagcccttgacttcggtcggggctttttgctatattggttctatcgaaaacaatgaggaatacattatgaaatatctactacttgcacttagtcttatgaccacaaccgcaattgcttcggaacctccaaccgattaccaatcatttaaagcgttatcaaaagaagaacaatgtacgtatcttccatcataccaaacgatgtatgattggattacgttatcttctgattacgatcaggtaaagtcaaaaatcgttagtgactacttgtataacatatcgaaaggttgtattcttaaacttcaactgcaagtggatacgatgaaacttgaaaaaatggaaagaggacaataggatgaactgcgtatatatcatcattgaaaaatttacttctcctgctggtaacgttgaacaaacaacagtctgtgctgctctgaatgaagaagaagcaaagcataaagtaaaatatctcaatgaaaatgtaattattcctttcggtttcaaaggttatactgtaaaatacgaatatactgcgatttctcttgaaactaacccttcatggctacttgatatgaaatgaggttaaaatgaatccttatacaaaatgcggggtcatgtccctgttattaaaagaagttgtgcggttctatagccatattggtaaagtgtggtgtgtatctatcgggggtagacaaatcggatggatccgccgtggagatacaatcaaaggctggcaccaatacactgcaatttctattatgggctgtgaatatggtgagtttgataacttcatgcaagcattgtcactgttcatagataacgctattcacgagatcagttcacagggttccaaagttacaaagtacatggatactctttatgtgaacgtggaaaccgatcgatattgcatcatcaaagaagcactatacgatgataatgatgaggtgtattattacatcgtatccgatcaaaaccagatgcaaagttatatctccccgtttgaattgcgatatcaaacactaatgggattcattgaattctaaaagaaagccccaaccgaaaggaaggggctttttgttatgatgcggaaagctgtagtttgatttgctctacgtcatccgggtcatcaatgatgctgtaatagatagttactgttactgagttatcatcatactgtggaatgacttcaacagaaagattatatactctaggctcatatgtccggatcgcagatacgatagaagttctaattgattccgctgtcagagggttcatgttctcaaacagcatatcactaatagcacaaccaaagttactatcaaatggacgtgtacccttgatcgtggttacgataccaatcaaactatttctcactgctgcggccccttttgaggccgctacgtcattattccaatctcgttgcatgttaggttctatatcgctatatagcaacctcagatttacacccatttagaccacctttaaaaattgctgtaagcctctcagagagacgatatggctatgtccacacgaacaccttaccggaatgtttgcgaccactgctggcttatccagggcggtagaaatcgatttataggttgcatagtcgattgcatccaacaccatttctttatctttgtcgctacaatcactccacatgatctgttcgccgtctatcattacgtaatcgataagatcggggatctcttcatcaccagtcttacgagggtgaacagatagcgcgattccgtcattgccgtatagcttatcgtcgaaatcttcaaccatgatttgattgcgtttaagctggaattctattctttcctgacattcttcacagttgatgaacagttgacgggtatcaatatttttactttccagaagtgccagaatgaaaagatattctctttgatacaggtaaacatcccctttgataaaatctgcattgggggtaaactctgtatgcgtcagaggacgataatcaacattatatttctcaacgtgtttatattcatgctttctcatttaacagcaccttgttttttcaagtcttctgcaagcaatgcagtataaatttgcctttccatcgggctactattcatgataggttccaggttcaggccgtttttatttagcagatagttggtcttcacaaattcatccagatccccgcgactaaacaggatcttgaacagggttaacataccactaaatgatttaccgcgcatagacacatcaaccgatttcgttagcatagtaactattttttcgacatcatcaagttcgactatatcaagaatattctctttcgtttcttcggttagtgatgtccattcatagcgctgttcgttgtatattacataactgatacattcaagaaacaactcttcgcttgtattgcgtgtacgggggaagttaaaccctaatgtgatttcatcattcagcttgtattcgttttccagttgaatatcattaatcaccatgaaggcttcggagtggcccccacctttaccgcctatcacaaccttgataacgtttttaccgaacgaaccacaatacacccggctgaaaatgtattcctgttctgttttggaatacccaggataaagcagatccagcacttcatccagtatttcctgttgctctttaaggggccgaccttccatatcaatacgggtcagcattaatttaaactgatctttaactgtaaacatagggaatcgtttgatccctgatggtaatgttactcgaataatatcaaacataagatcctcaaaaggggccgtagcccctttattgtcctgtaattgcggtacgtgctgcaatggctaaaccttcctctacggattgtttgaacccttcccagccttctttatcagcctcaacaacccatgatgttttataggcaaaatcaacagtaaatgtccagatttcgttgttgttctcatagctcaattcactgttactgattttgacgggcaagcacttctgaaatacgtatgttgtatgcggtgaaccatcacgatcgtgtaagttaacctgaatagtacttgtcacttcatcaatgaaggcgtattgtcctgttacatcatcgcgaatagcggaaatccattcgttaaagattttcaggttacgggcttctgaatcggtgcggaacgtcaatgacaattccccattctcagggcgagtgaatctgatttgaggtacgccaccattataaacgtattcgtacccaatggatttaccagggaggttaactcccataatgcttaaacccatattatacatcatttcatcacggaattcagatagcagttgtccatacatgctatcaccaaacagggaagtaatcaaacgggggctaattgccccgatgattttgctaaatcctgttttgttcagcgacataatcgccttatcgacggtgtaactaaacaatttactcacaccgccagtgatagcattaatgaattcgttcgggttgtttgcgttgatagaactaatagatccatcaatcaaagtatctcgaatactaccgatcgtgttgtcaaggatacgtgatgcagggctggttgcaaatacaacgctaaacaggttgctacgctgaaaatcgcgattagccatacctgataaaaattcatctacgttgtaaaacatcatatctccttagtaatttgtatcaaaaatagaatcctgacgcatatcgatcagttccataaattgaatttcgacctcaagtgagatcggggtatttggtgattctcttaatgtatttacaatattatcaatagaacgaccaaagcgaacactggtaatacctgctggcccaaaggttgaatgaggtaaacgcaaggaatccccagactggaaatcacgaataaaccagacaggaggcgatttaataacctctacgtttgaaatgaaatcaaccacgtcattacccagactattatcaaaatctgacgctgttactgggttactggaagggctaattgcgttagcggttttagcacccagaacaccgtaatactgtttaaccaatgcagcaacctctttagcagtaccgccagaagttgtaccatatcccagaacagtaaacagatagtagattttaatcagttccagcaaatcattacggctttcgatcacgaatgtattgtaatacatctttgttcgcttgtcagaaccctggaaagcggctttagtaccaacatcaagggcttctcttcggtctgccataataccgcctgaaatggattctacagcgccccataccatgtttgaaacaacacgactcaaccctttggttaagaaactatcgtttgcatcttgatagcggtggctgtttacttcgttatcgttcaggcttcgcggtagcaggatctggcaaacaggttccatagtaccaatagaactgttcaacacttgtttgtacttaacattacccgtcgcagatgatagtatttgttttgggttctgtgctgcctgacgtaatgaacgatagttgtctttactaccaacaccattaaaatcatatgcagtgaacagaaggccgttattatacagactcgaagcattataagcattatcgatacctgctgcacgttgggccggaaattcggcggtaacgatagtttgctttaatactgattctgtgattgcggcacccccagaggggataccgcgatttttaatatttttgagagtgtttatactgtcatcaataatagaaaacttcattatatgttccttatgccagcgctacgagcggtttatgctctgtgcgttgtactgaatgagttacgttgttgttaacagttttgttgttaacctgaatgttgcttgctttatcagcatccggtttatttgctgctaacggtggctgtgcgtcgatcggggtgctggattctgtacgggctgcaatcttgttttgcaattgctcgataaggtcagagattctatccttctgtacatcgtccagattaccttcattacgacgtttttcaagctgatccaacagttcatcgttaatgtatttgatatcggctgcatccagattttcagagttagcatagttggttgctttacccaacagatcatcaccctttttctcttcaccttctggcggctgttttccttccttcctcgcttgttctaacctttttgcttcttctatacgtgcgcggttgcgtttgttttcctcatcggctaatttttgtgcttcctcttcgctgcttttagctaaatcgtattgtttctgcatttcttccgttgctttcttcatattatcaagccgttctttatcagcatctacggttttctgatttctttcttgataatcagtaggagcaactttatagatagaaccattaggaatttgagaaggagttattgttaatgcatgacgtgctgcaatagctttatcttctttttctaatgccgctttttggtcttctagttcctgtttcttgatcataagaatatcttctttagtcaattcaagaccaaatttctgtttatcacgtaaagcggtgatctgcattccgcgtccggcattggtaatgctgtctatgccagttgattcacccaatgattgaataagacgaccgataccctcagtgattgccgtttgtacagtttgccccaacaacttcataggctcaacgaacaaatcacgaagtgattcgcctaagttgttcatattaaagttgttcaaaccttcttcgatctttgttacgatagcctttacgttacccagatatgtaccaaatagtttctttgaggattccccttctttcaggatatcttcgaaccatttgcgtattgtgacgcgcaacacatcgaatgtaaagattaacgaaccaataaggagcgtccatttagcaaactttgccattgcttccagagagtaaccaatgaaacggctaaggatctgcgatgtaaaacctttaatagaaaccagacttttagcaatactatccagagttttgcttcttttgtcatcatcatcattgatgcgttttttcttagtgtctacatacggatcaggttcttccactggttcaggaagcggcttatgcttatcagtattttcatataaatcaacaagtttgttaatagcatgaaaaatagattcggtgttttcttccagcttaccgaactgaccattttggttaacgtttactgtattgtcaacagtttttgagttatcatcggttaaggatataggacggatcgggccgacgaaatcaggtagttgttcggctaatgattcctttttatcctcttcgtattgttctttgaaccccgcgaatttgtcacggaatttttcttcgaacgatttcaacccttctttgatatcaagagtattgattgcactttcaagggtgttatcgttgatttcctttaggtcacgggcgctttcagcatcaagggaggctgttactttggtgaccgctggttgtttgttgctgtttctgttcagaaactttttcttttgttcttcgttgaaataagagttagccattatcattcaccaatgatgttaagccctttgatggttttcccctcatgaataatgtatacttcctggaggacaccacgcgatacctgatcatattcgaatcggtacaggcaattaattaattcgtctcgtttatcctcagttaattctactggcttaccgtcaacatatgcctctttgatgaggaacggaaggtgagcatttaacaggctgggtttgtcaaagactaaccgcacattgtcaaacgtaaaatcatagcaaggttcggagattttgaggtcatcaagatttagcccaatttctttaagcgtattggcataatcagcgttattgtgtgcatacatatggatcaacacaaattcaatttccgctgctgttagttcacgcggtttgatgtcatcaatgatgaatcgcatgatcgcaactgggtcatctttcagagtcttaatctttacaaaatgacgatacgacatcttagggatctcaatggctgttccatccggaagatgaacggttttaacgttagtcttcttgatttcaagccgtgtagttataaatttatcaagagttttatttttcattattgcctcaaattgaacctgggtcattatttactatttagtaaataggatatattaggagggatttttatggctgaaaaaatcgtcaatcgaataacatcgattaaattatatacatcatacgaaaaatatattgataacgcatatactgaattgctacccgctcttgtctcgtttagtgaaaagacgatgattaacggctcatcggaaacgctgatgcagatatacgacgcacagttaatctatcagcaacttatccagccgatcatacaggtatctttccagtataacggtacacaggaacaacattattacggattgctttactctaacgtagatactgacgataaaaaccgctctgtgctgcgtatgaacctctctccgctgcataaaacgttcagacgtaagtttgcccgttcatttagtaacaacgccgtacagacgattacagagtgtatgacggcactgtatagcaaaatgaaactacttacccccgaagttgacggcggtaacatacgtatccctcctggatgtctaaatggtacatatcaggatatatttgattatatcagggacaacgggcaaagtgtagtttcttctgacttctgttatctgtgggaagatggttccggtattttccttaaaagttcaactgacattctggcccagacaccgatcccagcatacaaatttaacgttgataacgtgtttgttggtgatactgtcatattcacagaagcccagtatattacccataaggataacacaacgctgtttaaagatgccagtttctttagtctgtcattgactgataaaaagatgtacggtgacatactggctgatacagacacagaaaatacatggatcttcacaaaccgtaatgcaatctatgataccaactttcagaacccagattcagaaggtaaacctttccaggcgtctaaaatgcaattgttatccagctatgaacgccggatccgattcgatataaagcagggtcgtttagatgttaaggtaggggcaatcattgaggtatttggggaagagtatgcaggaaaatatctgatcgttgaatgtgttcgagacgtatcaaaagatttccacctgcaaacacttgaatgtatacaggtgggggaacctaccagcgccgctacgacgaacacaactagcagtacttaatcctcaaacaatccgaggtggagatcgaaaacattgttattgacctttttacgggcctttatgatgttttcgtaatgttcgcgtggcaactcaaccaaaaaacactgtctgtcttctggagcattctcaacttgtgcttccagaagcggatagttcttaggatcatcataatcaatgttgttatcgagatccagaataacacaacgccaaatttccggctctgctgatgttttaacagtttgaaccaatgacgcgtttttcaatcccaaacgatgcgaaagaatttcatgggcgaattcagggtcatcataacggatctcttcaccattccaacgaataaggcgaacggttgcactcaatttaaatttgctcatatttcattttccttgtcatcaattcacgtaatttcttagttggcgctggagggtttttaatgatttcctggatctgatcccatgtttcgggggatacttgttccttttccatcacaactatatttggattatcgcaacacttaccaacaagaacagaacgcccacaattaaggcaaatcgtatcagggcattttccaagtttatcagggtcgatagattcaaggaatcttcttgctaccgataaccgctctttaacttcttcttcgctaactttcatttgtaattttccgctattcataataatacccttatgcgatttcgtagcacttcatgacttcttcgaataccaacggcatttctagatcccatgaatcggcaactgggtcatatgttgcttgatctaccagggaaaccggaattgcagaaacccaaccagaaccaccctgaacatcaacgcgtttaacagtcatcaacgataaattgttatagaattcttcactgaatttttcgccgccattaccaagactctctaacatttcacggttaacgagtttgatgtttttaccttctaaatctttgttgatatcgatgaagttcatgtgatgttccttttgtctgtttcgtttcgatgaacacaatataccaaacaagaacaagatagttttagcaaaaagtgctattaatggagaatttcagcagtcatcacgatccacatagacagaggaaacccgtgaatgaatacccacaacccaaaatcatcacgtttattgtaaatcaaagcagttatgaatatcgaagccgcccaaagagcagtaaacagaagataatcactgagtgtgatcatttcttcacctcaaacaaaataccgtcttttgttgccagatcgatttcggtttccaacactgccgcaagtgtccactcatcggaactaggtaagcgcctttccacttgtccgttatccagcttccgccactgtgcgccattaacgcgagattcataagaaacgttaactttcataatcagcccatccatttacggtatttgattgattggttcattgcagagataatgccagattcttgcatgttagaagcgcaatagacttcggcaacctggatttcgcggtcatagaggtaaacactaccacgaaaagttttcaagtgagcgaatccgcaatctttaaccaggttaaggaattctgctttcttcatcatgtgagccattttgtttatctccgtgtttcgtttcaatgaacacactatacaaaaaagccccctgcattgcaagaggcttctttaacaaaaagtgctattaaacggcttctgttttcacttctaaaccaagtttagcaagcgcttcaactgccatgaaatgattttcaaacggaacttcaacagaaattcgaattgttggcggtgttggatcagtcagatattttgtcatttgacgatctttctggtttttgcaaaggatatccgccagcgcttctaccgcgtcagaattgaaatcgtatgcataatcaagtcgggattgcacataacgcatgttgcgttgaacataatccggatattcttcaacgatcggggttgcaacagccgcttcgctcatgcattcaaagttaggttttcggaaaataccaacacacttatcatcggattcgttatatacgaaaataaatgcgttactgttcatgatatgaacgcactgatacaccggatgtcggtaaatcactttcagtactttcttcacagaaggtttgataatgtgattggtttcgaagcgggaaccttcggttactgtcagcagagattttacttcgtcgatatgtttaccggacaggtttgccataagggttttgtgtttctgataactactagtcataatatattctctcagtgatttacgtttcgatatgcaatataacaaagcccccgaccggagtcaagggctttttattaaaatagatctgcaaagacaacatgaatatcgtctggttcggtcttatcgcgtcttatcttcttgataataggaaggaagaaactgtattccggttcccctttcttacgcgttttcgacttctggaggccgtcaacttccatttctacaatggccccaatgtattcatctttatgcgccatgatgtattcgcgatccagttcaccacgttcatctaatggaatgtatacacgggtaataccatcatcatcgtaacgataatcggtatcagttaacccagatccggtattcgttcgagccattccggataaatcttccaccacaaacccgccgaccttatggtcttctttagtgtgcgcgtagatatcaatgatccgtagttcaatcggggttttgtttttcagcttaacctgatcggctactcgcgaatctttccatttgaagtttctgtttttgagaatagaaccttctttaccgtcattgcggtaattgttatagtcctgcttcgcttctgcaatgttattaaccagcttagactgaatcaaacgaacagaaggaagagaaagatccaggaggatatcacgcaacaggctaaaccgctcatcataagtctgaacactttcagcttcgccgtaatacacctcatatggaataatatcccaaacaacataaacaatgtttcgctgttcttcttcggtgatcgtccctttcagagatttgtttacgatcccgttcccttcttcgcgttttgcttcggcctgttcttcttctggggtcgatactttgcgaacttcttccgcaaataacgcaatgtcgttatcatcatcgtccatgaaagcagataaagaaaaaggcatgtctgtttcaggttcaggtaatgttggtacggttccggaaggaacataaatcaattctccatccagaactacatcatatcccagataatcgcgaatctttttcagatcgatatcaagctgagttaacccttcgtactcgttacccgctctcgataccttacggtttaatgcttccagcaaatcagccatacaacgcgcaccatcggctttaagctgcgagtaagcagggaaaatgatgcgacgtaaagccttttcactaaacggcgtagcgaggcattgaggctgttcaggaatgagtttcttccataccctgtttggtaaggttgtgccagcaccacattccagatcgcggttaatgatacggcgtagcacttcacgatcgttaatgttcactgatgatacaatatccagtaaacgatcacgcgctgcattgcctgtatatttccggcttgctaaatcttccagtaatgctttgattgcatcggaaagcggtgttgtgcctggtttcccttctaccagaggaaattgacgcacataaaacataatctgttttgtatacgtaatgcggaaaacttctttcaacaattcattatctgcattacgttttaaaattgcttctttctctttagttttcagagtagaagcaagttcattaaggattgacaagatcatttagtttctcttcaatttcaaaccacgattttactaactggtgaggtgcatttgtttcttcacgttcaccacgtaacatatggaataacggcaattgactaatgacgttatgacattcgtttaagtttatcgcgagatcatcgacaaagcaaaccagacgattaccatactttgcttttgcttccaggtaacgatgagtttttgtttcaccgtggcccacgaccatcacctctttaaacgcagacgggaaaagagtattcaggttagcaattcggttaaggcttgccgttggtgttgttcccagagcggtaacggcaacgaaatcatactgcgttttcagacggttgatcacaatcaatgcatcatcatacgcattcagataacgaatgaaagaactgttattgtattcttccataaggattttagccaactgctgatcacatccgaagatttcggtcatatcacgaaatttttcatctgtaaccatttctaatgcaatatcagtaggcatgttgtgcttagacaaaaagaacggcaaccccgactgccattttacggcgatcccgtcaatatcagtcagaattacaggctttgcgtttgtgctcattataaaagtttccaaatagttctttttctttgttaattcgggcagtaaccgcgtcatcataagacgcaaaccgacctatatagatattctttccatcctttttaatagtggaaagccatttgtttctttgtgtatcccatgatacaccagggcaaccagatttattcaacgaattgatattttgtttcatcatattctgttgatgagttgctgcctgaatattacctacaccgtcgccattgtcaacctcttttatgtggtcaacaacgtcaggaagaaacctattccgtgcataaaagatgactcgatgacggtagtaatattttcctttgaaccggattctacaataaccatcgggacggacggaacccgcttcttctccaacaatagtctttttggttatcttcttagcccagaaacacttaccagtttcgaaatctattcgtaaactgtcaacgagttcatcaagttctgtcaagatataacctcataacgatcaaagaaaagggtacttttgaatgcgttcaattcacccaggaaataatcacgctcaaatgtccgataatattcaaattcgatgcacaacatatcatcatttgttacaccaatgccaacgacatcctgatgatatttctttgcctgttgaagcacgaacggatcgagatccgaacaatcaaaataaactacgtaactcatatcaacccttatacatataaacagcatctaccccagcatcaaaatcgactttatcaaagacaacgccgtttgatgcacattccttaacgtaggattcaataacaaccatgttatttgcgccgatggtaacataatacacacctgctttatagataacactctgaatcaacgttgaacgtaatgcatgttgcgcatacagtaacgctaatggattaatcgcgcctttgaacaggaacacgcattctactctttctttttcactcataacagatctcatttaaccaatggattataaaaatcaccaaaagtttctttcgctttttgatgatatgctttacttgcttcttctggagtatcgaaatatcctaaatgtatttgttttccatcaatacctatagttgctcgatacttttcagcacgagacgaccaacacacccctcgataaccacttttgttgtttttctgtcctttctttttaataacgttttgtctttgcgatgcctcttgtaaattatcaataccgtcgccatgttcaacaccatgaatgtggtctactacttgaggtaagtaacctttagcaaaatagaacacaatcctgtgtcgtctatacaacctataatcgaaacaaataacatgatatttttctttcttacatccagcaacatcaccaacatttatagattttctgggtcttttccaagtacatattccagtctctatatcaacatcgatataatgcaataatttcttgattccttcaatttctttttttatgttatcagcgcttttcataacaaatttctcaacctgttcaaatttctaataaattctcgttctgtcagaatagtttcgttcatacgagatttccccattgaatgtgtcaaggtactttttccggttgctgccaacgcacggcgaaacccttcattaaggaataatgcattatatgcgttttcaatcaggatttgatacgcctcagaggaacgatgaatagggatacctttccagtataaggtctggttagtccaccattttttctttttgcctttgaacttggcggctttaccaaccagcgtacacacatgcgcttgcatatctggattactgaatttcagactttgtaaaaagccctccattgatgcacattctaccccgtcaaacgtaaaaggatgcggggcgaagttgctcaatgcgcatgatggatactgactacctgatcctatgtccattatccaatcacccttaaaatatacgctgttaaaggaatacccacaaacaaaagaagcattcccagaacagcaccaattatcattgcaatgggttgatcacagttcattttctgcttccttcttcccttcctggcgagcgcgtttgcgtcccgctcgtactaaagaatcatagtacggacgtttgcgatcgatgttttctgtacgatacgctttaccaaaatgactcgttttgaatccgtagtatttcacacttccacctcatgggggttattgtgcaaaccacgggccggatcataacgatcataagttgtttcgtactctgatttaatggatacatcacaacgagtgttccattgttccagagcgcttttaatttctttcactgagtcggtgaaaaattttacaatactcgccatacactaccaccttcataaaatgcatttagtttatgtaacatttcgacacgggctgattcttttgcggggctgcaagataatgttagaaccaacccaacaggacaatcaaacgcagtatcaatcgttactctttccagacgttgcccgtgatcacgaatcatcttcaaaaaggtatcagataactcagtattttcgtattccactttatatatgaatcgtgccatagttaaccccttgcacatgaaagataagaacgcttcttgaacactttaacttcgtggcccctaccgcttgcagcagtgttaagagtttcggcgtgacgcgcaccaagtaccagagttttaaccggagtaaccggagcagcgataacgataacagcggcccaacgagcaccaacagctttatcagtacccatatcgatagcagcagaagtatttttaccagccgccagaacgtaagcacgtgcttcacgacgagttttgaagaaaaccagttcattcatgttgtaagagcgtttcataatgtcatcctcataaaagtgttttcttgtctacgggattaactataagggaatgtgagaagggagtcaacaactttttacaccaaaaaagaaaaagccgctacctttcggcaacggcttgatttttaatatttttcgtcaggctgaaacaccgcacgacacgcccacatagaggcttctttcagtcggtctttcgctagttgaatttgatggatacgttcaagcacctcatctaattcttcctctatcagtgaatcaatatctgaatttgatagtcgctgttcgatatcttccaggattgcacctaatgcattttcagcatctttgatacggtttaccgtttctacttttttatcagtatggggtttataacccttgatatcatcaattgccattatagactctctgtaaaggttcgggcgataacgtcgcgttgctgttcaggggtcagtgagttaaaacgcactgcataaccagaaacacggatcgttaactgtgggtatttttcaggatgttcaaccgcatccaggagagtttcgcggcgcaacacgtttacgtttaaatgttgtccaccttccactttaacagttggctgatattcgatctcgatctctcgctttgcaaacggagtaacgcgagctttgccgatcacagaatccatagttaatgtttttgatactacgatccgaacgtcgttaccttcttccagatagattgtaccagtatgcaaaccttctaaaatttgaaatgctttcattgtattacctttacttgattacataatacctgaatgggttgaaatgaaacgccagcattgcacgatccaggttaactgggtcgctaacttcttgtttcagtttccatccagcataaacgcgcaaacagaattgcactttgtggatccgtagccacggtttgtaaacgtacaaaccccatgctgattcgttccacatgagcagatacccatgatttacagggttcggcccaccttctgtttttgggttgcctttccagttgaatttgcttgtcgcttcacgtcctaaaacgtgatatgcgaagttataagccttgtttctccacaaccagccaacacgttgcatgtacaccccaaaatcccccagatgatagcgtatggacgcccaacggcggatatgtccaccatcaccatcaataggattatcgaaggtttccatccaccggaagcctttaggaagatgccctgttttctcgttgtagaacggtacaacaaacggggcaaacagaattgctaatactccagtaataatgtcaagagggacgagtacgatccaacttgcatactttaaaaagcgcatagacaccccaaaaataaggctatccgaagatagccatttgattatttgtttgtgttgatgtatacaaatgattcatcaaattcactgctaactgcttcatttgtaaacggaatttcaggatttttgaaaccaccactgataagatactggataaagaataccgaagtatcaagagaaatcaattggtgattgctcggagatatatttgttctacgaacgaggttgacaatctcccaatcaaagaatcgttcgctatactctttcttgctatttacttgcggcgatgcaaagaacccttggttagaatatgcctcaagcgctttatgaagttcagaatcaaaatcatcgaactcttttgcaaaaagttccatcaattttttattgcgattcgttggattgctattttctccgatgatttttctaattgccggagacatttcaaacagtttttgtaaatttttcatgttatctctttaaatttcgtatgcagagtcaatacaagattcgtaaagctgttctggcgaattctcaatgagaggcgttgttttaccaaaaatatccagatcgtaaggatcatcatccacataacattcattgaatttgaagttttttcggtagtccccatcgggcaatccatctttccattcattaaatgtcatgccataacgttctttgaattttgcgggagacatatcaacaaaaatctgtgtatattcgaccgcgttatggtatttcacagtttcacgaaatttcatataaacctcattaaaattagtgggctgggagtttctttacttcaccccgcattccggggaacctattaccggataccaacagagccttctccgtgagaaaggttgcatattccgaaccatttaacggcattgcgctacgcaccctaatttggtggcaagggtaggatttgcacctacaaccaacagaatcagattctgttcctcccgcttctctaagtgccttgccttgtttggtggcccctcccgtgacttgaaccgggaacctaaccattatgagtgattagctctacctattgagctaaggggccgatatttttagaactgtttgcggtagatttcgcgaacagccggatcaacagctttggcgtatttgcatacatcctcgaactgtacgatgtattccattacttccgaagcacgggaatttagttttccctggtgagcatcaatgatcattgaagtcattacatcgatgcgggtcggtgcttcgaggatgtcgcctttgtcgaaaagttttttagattttgcgacggtatcggcgatgattgcttgaatttgtttagccatgttggatctcttattcgtaaattgcttgaatcgctttatagtgtgcggttacatatttaaccggatacttgcgagcttcttcttttgttgcctttcctgcaatcagttcaggatccggcacgtttgccatttgtgcatgaggaagcggtacgcgcttacccataagcagggttttatattcttccggtacatccggcccacatgataacactgtgccgtagatcggttcctcgccgtgttgacgaacaccagtcacaataccagaaggtgatacaatttcagttccagccgctttagcgttggtttcaatcaaaacatattcaaaggatgcttttacactcagttcagacatacatttactcatttgttatttgatccggaaatgtttattcatttcttcggggtcaagttgtactacttcggcaccgtattgctgtagacgccatatccactcgatgccaccacgatcgtatttatgtagatatactacacgcttaatcatacctgttgcaacacaaaattcgatatttttcgcacattgtgagcaaggggaatgagttgtatacaaagttgcgtctttgatttgttcatgagacgccgccagcataataacgcgcatttctgcgtgtacttcgttgcgatctgaccattgtgaatgttcagggcgcttttcttcactcagttttccgttatcatctaataagtgattgcactgatctgtacaacgatgactagggtcaaccgtattatttgcgcctacaaacacacgcccattaccatttctcaacgcagcaccgacattaacagagacacattgagagaacttagaagcgcttattgctctaagcataaacataatatcatcaatcttcatgatacaccacgtgataaagaactttccagtaaagttgaatctttccatcatctaacactcgatgatgagcagaaacagaactgattactactttttctggactcggtcgaaaacaacttgtaaattttcgaacaagacaagcaatgaaagtatttgggttgtcgatttcgtcaatgatagtattaacagttacttcaccgaaatgacaagggatatcatatgcttttaatgcttccaggagcaccatactcatagagccaggatgatcaagcatctttcatcacctttagtagctgtttgataaaatcaggagtcgcttcaacgatatattctgaaccgttgattgtagtaacgcgaacttctgtctgatttttgttgatatcatattctgcaatcggacttgttactacatcaatatcagttcctttgatgtatccgaaaacaccgccataataacgaggatccgggtatacagattcgtccgtaattaccgctctatcaataatttttacgttcataatacagccgcccacgtaacgtagccagtaataggatttaacaccagcccgaaagattgggtgctgttagtatccacgtcatgaatatacacaatataggagtactgagaaaccggagtggcgctaacttcaaacccgcccggagctttaccctgttcctgaattttgttagcaattttttggcacaacaaacgaactttttggttaaaatcgcccagattttctacgtgaatgcgatcgccaagttcaaccatgatgtgtttatcttcacgaataacgctcataatataatcctcttttgtgtgggtactttaacatacccacattatatgtcaatcagaaatcaccataatcgacttgtaagcacggaatcccgtttgctcgccacattccgaccggagtgtctctatcgtccactgcaataacaggataatacttatctaaaatcttgtcaaacaaaatttcttcttttacttcaaaatctgtcctggtatcaccttcttgacgcataaaaatttcatccggttcaacgccataactcaacaggctaacccatgtatcatgtgcgcattgcggattaccttcacgcccagacacaacaacacacttataccctgcatttttgtacaggtgaaacagttgctggatcgggatatttggcggatcattgatcactttggtaaagtcatacgggctacgttgtcccactttggttagagtaccatcgacatcaaagatcacacacttctgattgtggggattaacaatttccattgctggtacgaacccacggatctcacgatactggttaaacatttcccaaagacgcgaaacgggtaatgcatcacgaccgcgtttgtggttacggcgaagcagttcaacaatagacacatcaaaatattcaatatgaaaatctgccttgtgttccaatgcaatttcacgccagtgatttttatcactttctttcagatgcgtgttgtggatgatcacgtttttaccatctttcagagtggagataacaacgtgatcctgcatttctgcaatcatgtcttctttcgctttggtgtatttgtatccgccagcacctttacccgcattatacaaagagctacgcagatcatcgcgagagatcgtaacagtattacccaattcacgggctttctcatgcgcccaggtagtttttccactacccggaacgccaatagtcataaacagattcatttcactatctcatattcaattagttctttgttatactcattcgtcagattgagccatatatcacgattccaatcgttttctatccatagaccttctttatcctttttcgcagtataaacttttccttctgttatgtcacgaaaaaatgttttggttattttgatttgcatttctcagggtatcccaaagtacacagaacattatcggtctgatccttttgtcttttaacgtcgttcatccagctacgaaaaatcaatgaatctggatatgataatgcaacataaggatttccgtcatagggcattacaaggtattttttaccgtcaatctctcggacttctgcaaccactttccatttcacattcaccggattcaccttagcggggagcgtaggcaaaatcttttctgggggcttctcagcacacccgaccaacagaacgcccagaacaagggctaacgttgcaattttcatttgtcgtatcccgccatatactcttcgaaggatttgttgatcttgatttcgatcagtcctggttttttaaacagcagatctttacgtccggcatccttgaccaactgctgatccttacctttttgttcgacatagatcacagtattgcttgtatttgtctcttttactttcttcacatcgtcttgcaaagattttatatccttgcgtaatgatgcattttcaattttggtatcgactgcaatgtaaaaaagggctattagggagcaagcaacaataataggccatatccacgattttatattaatcatacccaagatgcttttgatattcattcaaagtttcctcatatgcgatagacgcctgttcttctgtatcataatatcctatatgtttcgttttaccattaatccgtatttgtgctctatattttccacgagaagaacgatagtcaaccccttttgatgtggtagttttagattttctggttttgtttttcttcaatatattatgaacgggatcggattcttgaagattatcaatacaatcaccaaaatcaagaccatttttatgatcaactatgattggtaagtaaccatgaacatagtaaaatattattctatgcctcatgtaatttttcccagcatactttattttcgtataagggtattcttcacaaacaatagaacccgcttcttttcctctcttacttttatgatatgctttatcattccagtaaatttttccagtttcggggaaaacatcaacgaaagaaagcagggaatcaatccctgctttttcttgttctatcgttcggctatatgcgccaaatgatttcacttgtactctccaggaatgaactgatcgtaatttttaaccatcatttcaatgatgcgatcgaccagtttttgtggatcggtttcttcgaagtacttcataagaggcccgaagatgatccgaccgtcgtttgacaaatccgcgcttagactgatagcaaaatctttacgcgatttccctttattatcttcaatggctttgaacgcttttgcactcaaacgattgagactatcaaggaaaagtttttcgaaatcgtcaatctttttcagagagaccagatccgaactgaataactgtttcaggtcatcgaccgtattctcaacaatatttaggaaaagatccttattgttggtaatgctatcttttgtgcgatgcagattgacataccagtttgttttgatttttacaaaacctttcgttgtcagaacaacatagccttcgaatccttcattctgatatgcttcttttgcgaatgcatccagatccagtacttcgatattctcacgcttaaccagatacgcacgtaacagcgcgtcagcaaagagttcatcataagggatgtattcacccgtgatgttgtgacgaacgttcagaatacgcagatcaggagaatcataaccaacgacaatacggtttttcggggaaacgtattccatgttcaccgtatagttttctttagcgatctcagttaagcgggtcagcaattcacgatttgccattaacacgctgtgcgcatccatagcttgttctgatttaaccgaacctttagacttgaccgccagaaatccaccgtccaggaaagttgagatcaaggaaccatcttctttaatcatcacgtctaaaacttcgcctaattcaataggagactcgttaagcgcttcccatgcctttacctcggcatagttaaaaaacttctccatagggcggctgatgattgatacgggggtatctccatccatttcaaacatgataccgcgacattccagagcaccaggctttagccagtctgtatatgaggccatgcgatagttaaagattcgaacaggtgtacccatcacggttacttgatcaacgaagaaaaatgtttcggattcaccacacaactgcatgagttgtttgtaaagggtattgataattttagtttgtgcctttgtcatagtgctgtttattccattcagggttgtattttcgtatcatgttgatttcataatcatgatatgtattttcatcgtgagtagtcacgataagtttcacagtttttcgttttttgatagccatttccaatcgacacgtttttaagatgttactggggttggcttctctccaatactttgcattgcgatatgtgtctaaacgcttccacatatccctacacttaccaacatatactatttcatcgttaattgcaataaaataaacacaatgcctaagttcaccacacttaacaaaacttcgatcgatgcgaccacatttatcaagggttaagttgaattcagatttcatcattcatttctcactatacccagacgatacagtttatgactcactgaatcagtagagcgattcattttaatccctattgctgggttgttataaccttctgaatgcaaacgaattaattcttctatctctttctgattccaatattttcgtttacttcccttcatattgttatcggattcatttgcattaagatctgaatgtttacataaactaacataagcgtcaatagctttttgttttttaaatcgtaagtaaggaataattctaggtaaaagaatcaaaagatctgttgttttttgaacaattaggttgcacatcaatgtattacctaacccagttctgctagttctttcatacaaccttgcgttaactccatcattaatcaaatctgactgaatactaaccatatcatcccatagttgaatatgctgagtcagtccaacaagatacccatttttacctttttcactaatccatccatcacaatcaacacaacctgccaagtatgcgtatagattgtgatggactcccgtataaacgggaatctcatcaatcatcataactccttacgcgtatttttgtcgccattttgcataggcttcgtcgctgatctcggtgttgaggttgccaaccaggtaagaactcacttctacttcttgtggggctacctgtacgttgtcagacttcaaccatttgttcatccacggatacgggttcggcgttggtttaaatggagactgcaagccaaccgcgcgcatacgctgatctgtcaggtgttcgatataagcgatcgtacttttcagggatacgccgtctacatcaccgatagagaacaggtgttcagcccattctttttcctgttcgtacacttccaggaaaatctttgtcgcttcttcttcatactggtaagcgatttccgccatttctgggtcatctttacccatctgccagagtcggatcttgctttgagtgcctttctgatgaagtgcttcatcacgggcaatcagacgcatgatcttcgcgttaccttccatcttaccttgttcggcaaagttgaacgtgaaggtaaacgacacatagaagcggatcgcttccagagcgttgacagcgtgcatacacagatacagagcgattttgcatttacgcatttgctctttgcgtttcttttcgtactctgcgatcgattcgtctgggtatccgtgggacgttaacatttcgattttgagcacaatgtttttcagttcgtgacattctgcgatcaggtcatcgtagtattttgtcatggaagccgaacgtttcatgatcgcttcgttgcgcagaattttatcgaactcttttgacgggtcgatgtgtaggttgcgctgaatgtgcgtataactgcggctatggattgtttcactgaacgcccatgtttcgatccacgtttccatcgagacatcggaagcgatagggaggaaagccaggttagggccgcgcccctgaatggtatccaacagggtttgatattgcaggttcgaatcgaaaatgattttttcgtgttccggcattttcgcgtactgcatacggtcgatcgacagatccacttcttccggtcgccagaagaatgacagttgtttttcagtcagggtttcgaatacacggtgtttctgttcttcgtatcgtgctacgcccgtatcctcaccaaagaacataggctgttctaagtgtttgtgatctgggtttgtgttcattacagttaacatggatttaccttataaaaagcccccgaaggggcattgaatcaaattttgcaaccttcgcaatcttccgcttcttcctcacctgcaccgtcacgggtgttgtggtagtacagcgttttgatgccgaaatagtttgcatacagcagatcttcaaggatgatttcagatttcactttaccatctgggaagttagccggatcatagtttgtgtttgcagagatagcctgatcaacaaacttctgcataaccgctacgtgcgacagataacctttgtttccacgttttgccattgtccagagataatcatagaagtcaatctgattattttggtttggtactacctgattgaatgaaccttctttcgaagatttcacactcacagggccgcgcggaggttcaatcccgttggttgagttacttacctgcgagctactttcacaaggcattaaagcagaaagcgttgagttacgcaagccatgttttttgatttcaccgcgtaaccattcccaatcgcagttatacacaggtgatgccagttcatcaacgtttttgcagtaccagtcaataggcaacagcccttgtgcatatttcgtttcgtggaacagtccacatgcaccgcgttcctgtgcgagttccatagaggcaaccagcaggttaaattgaaacgcttccatcaactcatgaacgtttccggcgtatgcttcggagtagtcgcaatagttgcttgccagccaggatgcatagttggtgataccaacgcccagagaacgacgctgtttggctttcagagccgccgcaacagggtagttctggtaatccaacaggttatccagtgcgcgtactgcgatgcgtgtaagggctgggaattcgcttatatcggcattatcgagaacgatcgccataagcgtacacagtccaatttcgccagccagtttatcatcgtcatccagtggtgaagttgggatcgcgatttcacaacacaggttcgacatacgaaccggaacagagaaactaccctgctggtttacgtgatgactgttgaaaatgtatttgcgtccggtctgtgcgcgttcctgaacaagcaactggaacagatctaccgctttgatgcgtttcttgcgtaccgttgggtctttttccagactggtatacagttcttcaaactcagtctgatccgcttgatagaacgcgtcatacaggcgatcgttcgcaacgtcagggctgaacagagtgatgtaatcgttattgattaaacgcttatacatcaaatcgttaagctgtacgccataatccaggtgacgaatacggttttcttcaacgccacggttatttttcagaaccagcaggttttcaacttcaagatgccagatcggataatacagggttgctgcaccaccacgaacaccgccctgggaacaggatttaaccgccgtctgaatgtgtttccagaacgggataacgcctgtatgtactgcttcaccaccacggatttttgaacccatagcgcgaatgtgtccggcgttgacaccgatacccgcacgttgagagatatacttcacgatcgcggacgtaacagcgttcagagaacccagagaatcaccggattcgattacaacacaactggagaactgacgcgtaggagtacgcacacccgccataataggcgtaggcaatgacagtttacgatccgaaatcgcgttatagaagtcaacaacatgactgattttatcagcgtgtttttcgtcctgatgcagacacatcgcgatcagcatgaatgcgtactgtggtgtttcgtagatgtcgccggacgtgcgatcctgtaacagatatttcccgatcaactgctgaacgccagcatacgagaattcaaaatctttatcgtgattgatttttgattccagataatcaatctcagcaggagtccattttgtcaggatttctttatcgtattttccagcctcaaccagcttagtgatgtgttcgtagaacgggatcgggtcaaactgcccgtaaacggttttacgaagggcgaacatttcgaggttagccgctacatactgccagtcaggttcttttgcggagattcgatccgctgcatacttgatcgctacagcctggatctgtttggtagtcataccatcacgaagcaggtcaacgacactttcaaggaatgcgttaacatcaatatttcttccaatactcgcccaattaaggactttgaacagtttttctttttcgaacgtttgacttacgccagaagacttcactactgttttaatatcactcattatcttaccttgttaagaaaggggctttcgccccctttgtttatactgccatagctgcttttagcgagccgtggtgattatagtctttcaaatggatggagtcaaagaattcttgatccaaatcaagtaagctatttaccttcggcatataaagggtcggaagtggaagcggtgcgcgttccggcttcaacaactctttcgcttgttctactgcgtttttgtagatatggacatcaccgccagtccaaaccagatcacccacttcatacccgcaaatatcagcgataatatgcgtcaggagagcataggaggcgatattgaacggcaaccctaagaagacatcaactgaacgctgataccactgtagagacagtttaccgttgattacaacgaactgaaagaaacagtgacacggacgcaatgccatatcatcaagatcaacagggttccatgccgaaacgatgatcccgcgatcgtctggggttgatttcagttgttcaatgacttttgcgatctggtcaacaccactaccgccataataactatcatcatccccataaagagaaccaaacgaacgccattgatgaccgtagattggccccagataaccagaatcgtatcctaaatcaatagcttgtttttcatagttatcatcccagattgtgcgcttatcgctattttcaccccaggtcatccggcgaagttcttcaacgttggttgaaccggacaggaaccattgcaattcatgcttgcacggtttgaagaatagttttttacaggtagttgcggggaaacctctgtttagatcccatcgggcttgtgcgccgaaaatacgaatagtacctacaccagtgcgatcagttgattcaacaccgttatcaagtacaagtttaataatatccagatattgtttcattttatacctttttatatcgttcaactacgattttttcaatgcgttcatgttctttcatgtactgagtttttaaatcagaaaattcatattttaataatgcgccacccagttcagaaagagtaaatgcaacatcacgtttaaacgctggtgcgttatacacatgatgtccgtaaatgtttgtcaaaattacttcatcaaccattttattattgattgaatctaaaagcaaccccttaccaccgatgacacatacatttttatctgggtgtgttgcttgcattgtaccaatagcagcagacaacccgccaccgtggatcacgtaatcagcaacgtcgccttttttggttttcaaaaaactacctgaaccagacagaacacaatggatcctaccaggaagtttacccggaagagaggtaaacgtatttgcacccatgatcaaaacgctatctgcggtttcttctttgaagttctgcaaatcttctttacagtggccccacggcaacccttgctgatatccaaaagcgaaatcatcgtgatagatatcaattcccaatgcaaacaccgcttttactatgctcatattgcgatccacattttgttgtcttcaacagttacaatatagcctaatgcttcaatcataactttcagtttttctttgtacttctcatcatatccgcgaatcttctcgaattcaacagagaaaatactacacccctgatattttgcattgatcacgcgagattcaatatcaaaaatcatgatatccagaggacaccaatcaacagagtgaagtttttcgcgggttagtagtgttgtgttcttagggagtttcattccgtttcctgttcattcagccatgattcgatacgagatatttcttcatctcgcggggtaaatccatatgatgcgtcgatcatcccaatctgatcccaaacatcaatttccaggatctcagtcactggaggattttgtgagatatggtcacgacatacagcaagagcggtattgatggattcggtgacagtcagagtgtcaccctgtacagatacttgaataatcattcagaactccatgcatttttcaaagtaaatctttgttgggaattaataatcgtagcgcgaataacagcaagtttcatttcttcaaatttatttcgcgtcatatacaaaccaatcaaaggaaaatagagcctttcccattcgtaagtgtcgcttacttctttaacagcattgattaaaatctcagccatttgaaaatcggtaggaggaacccaaccaagattaatataaatccgtttttgtgtaccttctttcagattttccaaacgtaaccatgttggacaactcataatattttcctcaaataaaaagggaactgcgttaacagttcccattatagttcatttgattaataagtcaagcgccacaattgaattgctgcatcaacttccttcttgatatcttccggagtgtctttgcgctgtgctttgactaacatagtcatcattttacgaatagtgttgttcatattcgctttctcacgtgctgcatgaacagcctgtgatttttccacttccggtgtatctttcttagccgcctgtggtttggtaggctgtgcgccgatttcgtctttctgtttcggtgctttttgctctgcttccttcttcacatgaggtgcggagaatttacccgccttgaagttagaattcatttgatctaaagcgctcttaacagtgttccagtcagagatcccacgtaaagatttcagagtatcagtgagtaggctaatgcttgcgcctttggtatcttctgcgatatcgattcctttcaaccactcaatgtgtttctgaccagagtacatgaaatcaaagctactgaatgagtagtatgctttacggtttacaacaatacgcttgaagttgatagtaacaccagcgccgttatcaaattcaacataaccgctggtaggcattacacgagcaccaatatctttgagtgctgcgaagtattcctctttaccaatacggttaactgtgcgcttcggcttctcttctggttttggtgcggcttcctgagcagctacacgtttaacaaaagatgctgaacgatgtcccgctgcaaactctgcgttcatcttatcgatcgcgttcacaacgccttgaacactcggtttcagtttctgcaactctttgaacgtatcaacgatcatatccaggcaagcgccgtcctcatcttcgaacatagttccgcgaagttgtgcagccggacgatacttagatacagcaggatcatacaccgcgctaaacacataagcacctttgcgcatgaatacgtgacgatagaaacgaactttcagtgtaccaacttcaacaaagatatcgtttccgctaatgtcagcgcctaacagcttacggaatgatgcaaggtaatcagcacgtttgtatttgatatttttctgtacagggctgaaaatgctttccagttttttagacgggaacaggctttccggagtgatcttatctgggtttttgccccattgataatcacggcttgccattttgtgttttttagttccaaccagtacaaaggtactaacagaaacgctacccagtgcagatgaatccggagcggctaacccttgtccattcggaggggtgcagttgaaaccgaaatcaaagtaagcatcaccagaagtgaaacggaacgaagcataaacaccgtgactaccttttgttacttcctgtttgaaagtggtaggcaatccagtgtatttggtgaagtattccgcaaattcctgtgcgttaaatttggtgctgaaatagtttttcgccactacaaagtaagcatcaactttttcttcccattctttcttttgacgtgcataacgtgcgcgaacatcaccagcagtctcagaacgtgcgccactaggcccagtttttgtaactacgtcgtaagcctggttaattttctgcattaattcattgctaccaccacggtcggggtgattgcgtaaggatgcacgtttgaagagtctggacatttcagcgctggtttcgctaccagttgcgcccaaaactttcagtgcttcctgataagtcattttggattcggtgatcatttattgttcctcaaataaaaacaaagcccacgtttcgttacatgggctactttactgtatttatggatttcggtcaatagattttttcgaggaaccaaacagaacttttgttgttcttgattcgcgtcaactctatagggttatctttgaatgcttcctcaacatctttcatagtaactatatgtttttcttcaagaaaattgttgtggagataaaaccgctctatttccggagcggtttctaattcaaaagatttttctaacatattcatgaaaagttcaacctcgcgtattttccgctgatttctatagctttagcatcatatgcctttgcagcttctatttcatcgtcaaaatatcctaaatggatctttttcctattgtattgtataccaactttccatttacaagttggcttatcccatgatacacctttatatattgaggatgtgttagattttccttttttattgtagtgattttgttgcgtcgtggcttctcgtaggttagaaggatcattattgaatggattcatatcaatatggtcaataaaatcaacttgatacccgtattctaaaaaccagacaactctatgcacgtacagatagttagatttcccttcatacctcatacaaatctgtaagtacggattcttttttctcgttttgttaaattttaccacatcaccgggtttaaaatagtaaccagcaggaacagacaccgttggtctactctctgttttatgatacaaaatcccgcctacatggtaaaaccgacgacgaatctcggcttgaaattcgtcgtcccattttttagtaatcattgtttacaatcgtacatttagtaaatcgaccaactttagccatagtaatatgcctgttgaaatcttgcggatccagttcttgatgactgataactataacattaccttcaatatcatcaagtaattttctcacagcaaacccaccttcacgatccattgcaccatcaaaaatttcatcaagaatcaggagagataaatcaacaccagaaattttactggttacatcacgccacgtcataagcaacgcaaggttaatacgtgctctttcgccttgactgaacgatgcgtaactaaaatcattacgacccagcgatttaatcgattcgttaaattcgtcatccagagtgaactgataatcagcacccaacagatccagatagtacgcaatctgtttattgaagtaaggaatataacgtttaacgatgctcgctttaacgccggaatctttcagcagatccgtaacaatacctctgaaatatttttccttgacaaatccggaacgtttagaatcaagttccttttcatcttcacggagtttttcaactggggattcatcgatcaccacgtcttcctgtgctttatccatgacagcccgaacacgtttagccgctgcaacttcattttgaagtgtaccgcgtagtgattcgtatttggatttcagcccatttagtgtacgttgttgtgttagtaaatcatccatgattttctgtagctgatcttgcttgttcttaatcagcgtaagtttctgagtaccgtttttaatgttctcggcaatttcttccatgcgttcaggagtggggctaattggctgtttacaggccggacattcaccacccttgcgatacatcacctcaagacgctgcaactgttctacgttcattgagaggcgtgtatagccatcacgcagtttttgaatatttgctgtttggtcttcaccattgatcacgcattctgcgatctgggtttgaagttcaactaattgcgctttaatctgttttgctgtttctacgtgggaatcgtagatatcctggtaacgcgccgtattctgatttgcttttgcccgttgttcgtcaatgaacttttgatgtgttgcgatctgctgttgtacgtgtccaatctgcattgaaagcgtatccagttcacggttaacaccacggatgtatgatttgttcagtttgtccatttcactgatgatagacaaagacaacaaatcttcaaccagtttacggcgatctggtgttttcagttccatgaaaggtacataaccagcagtacccagaacgataacctgtttaaagcccaccaggttaatattcaacattgattcaagctgtgactgataatcaccagcggctgaatcttccggcagtttttcgccattcttccagatctcaaatactttcggcttttgtccacggatgattttatattcatcattgccgtattcgatcaacagttcaaccagacattttttcttgttgatactgttcaccagttgcccgactttcagatcgcgaaatgacttaccaaagagagcatatgtaagcgcttcgatcatggtggatttaccaccgccgtttttacccgtaatgagggttttctttgctgaatcaaaatcaatgacgatcggtacgttaccgaccgacaagatattttgataagtcaatgttttaaatttgagtttcatcaattatcctttgggatatatcactaatcatgtttgtaatcgtgctatcaaagcagtatatcacggaatcttcatccatgctattcaggacagtaaatgtccaaaccgttgtttcgtgatagttgtctttaatcagagtgaaccccaatgacacatactcattataggaatcctgctgtactgcaacaatcacatcaaatccaaacattttataaagggctttatatcgcccttcttcgtttaaaatattaacgtaatcaactatttccattgctcgtaacctctgcatacaatgcactcattattgcagatacttcggtcttttcttctggagtgatctgcatgttgttgatgtactcactaatcaatccagatacgcttttgatttcaaagtcagtatcaacttctgaatcagtgatcacacgatcgacaatgttcaactcataaactgtttcttccagttttgtttgaaacttaggcaaatcgttatcaacttcgcgaacaatcaaacgaacagagcaatttttgtaatcggcaacatcaacatctttttgatccggataggtgatccggcgatggtggcatactgggttagcaatgaaagttaattcacgtttaccgtcgccataagatagctcatagaagcccctggtttcgtcctcatcgttcgcgctcatggtaagaggtgtaccgatatagaaaacgttagcgccttcgttagcgtgatgatagtggcctgaatacacgatatcatatttctttaagaaatccggttcaagcccatgatccgctttactgttcttatagaaatagtatccggacagttcaaagtgtcctaagcagtattgagattttgactttttgatgaaatcaaaaatctgctgtgtattttcttgacaaatccacgggatcaaatcgattgattgtagcggagaagtatcaagatttactgtcatcggttcatcaacaacagtaaagcaatcatactgatcaagaatctctcgcggtgagttagggcggatcttgtctttaaactggcaatcgtggttcccaaccagaacatagatatgtaatccggcttcttccagtagtggcacaatacgttcacgaatgaatttcatcgtggtttgtgtggtggcctttcgcacatcaaagaaatcaccagcatggaaagcctcggtaatgccgtttgctttgcagtgttctacgatttgcacgaatacattgtataggttttcttcattccaggggttgtcctgacgcaagccagcgtgtgtatccccgatcattaagtactttctcataagaccctcatagcccctttcggggctacttgtttgttagtgcttctgttgtgaagctacgatatttcgaattgatgccagtgaagtgttccacatcgtatcaatgaaatcctctgtatacggctgtttgagcatatcacgaagtttcttaaccgcatacacatactgaaccttattacccctgaatagggcttcctctgcgtgtctacggaggcgtttgatctcagtccggttcttcttaatgaatttttgtgctcgcttcaatgcgtcggcttctacacgtgcctggatcttttgtcgaatttcctcttccggatccacttcttccacactggttagtacttctttctcttcatcaatcataagtgatctccatgatcatagtttcggcgtttatcatataagacaaaaccccttcttctacttcgaaatcggggtttcttacgtcagttggatcgatgataaccgggattcccacgttttgcaactccaattttacgaagtagggtagcaagtcaatttcgtaatcgatatcagttaatattttgtttaagtcaattattgctttcatagaaaatcttccaatgttgggaatacttccgcttccttgtctttggttttggtggcggaagcctcgtactgagatagtttgtcatgtagatcttgaatgaaaccttcgtctgcaatactaaccatatctgaatcttcgcagtcgtaaacgtgctcaaggaagaatttatatttcttcgcgttctcttttttctcgtacagaatacgtgttacgaatgcttgccaacatgctttgttaatgtaaccgtaaacgttggtataacgagtttcatcgaagttatgcagtcctgagattgcagcggaaattccgtcatcgatcatatccattttccaatcttcggaataacggttgaagttgtaacgacgtgatagcccgtttgcaatatccataatagcagcccccaactcattaggcattttgcgatcacctgtttcggcgatttgctttttccatgcacagaggatagggtatagtttttcattgtctgcgtagatattggttgtttctttagtcatagtattcatatttcctctttgaagttaagaatattatataataactgtagacaaaatcaaatttcattctatattatttaaggttaaagtagatctaatgatctatagatcagatctaaattatataaaatttattgattttagtacttgacctacaatgatcattgtagtaaaataattattaattaataaattatagatcataaatttgatcagatcaagtattattgatcaaaatttttatggtcttttgtattgacttcatttcgtaagttactacaataaccccgttctttgaaaaattgaggtatgtatgagcagttttgcaagcatgtttaacttgaacaagctgatgcaagatgaaggggaacccgatgatactatggtcatcgatatctctaacatttccatcgctacactgatgaacaacttcaaaccaaaggaacaagcatccatcacgatcgaaatgattcgtcatctggtgcttgacactttacggtttaacgttgtaaaatttaaaggtgagtatccagaaatcgtgattgccttcgatgacagaaattactggcgtaggcaaaaagcctggtactacaaaaaacgtcgtcagatcgaacacgaagaatcagaatgggattgggatcgtctgaacaacttccttaatcctgtgttcgaagaaatccgtcagaatatgccttatctcggattaaaggttgaattcgcggaagctgatgatataattgctgttgttacgaaaaaagctgttggtgaaggtagacgagtattagtggtttctgctgatagcgactttacacaactacagaaatataacggtgttcgtcaatggtcgcctccccagaaaaaatgggtaacgcctaagtacggttcgccacgtaacgatctgcgatacaaaaatatcaaaggcgataaaaaagatagtatcgcttgcattaaaattagaaatgattatattgtgacgaaggttgaaggtgaacgcgccccagcggtaaaatcctctgagttagaggcatggctggaggcagacgatccgacaacattgatgacccctgaatgggccgcacgttacaaagaaaatgaggaactacgcgatttcgaatttataccaaaagatattgaaaattcgattattgaagcgtataatactccaaaatccggaagtaaagccaaaatggaacgttacttcatggataacaaactttcccgtatgttcgaaaaactgagtgatttttgaggtaacaaaatgagtgtagaatttttacaaacaaaccctgatgtagcaaaacaggtaaaagaactgatcaaagaagcatccaacgtgaaaactcaagttgagatcttcaacggcacgttcaaggatatcaaatccaaagcgaaaaccgatttcggtatcgatggaaaaaccttcgggaaactgttcaaactgtatcacgaacaggcccgtaccgctttcgaagaagaaaacaacgaactgatcgaactgtatgatatgatcgataaggcgtaaagcatgatcggaaataagaccgaagtcggtttgtatatcgaaaatctggttgcctctgagggggcaacatacatggaagcaacgctacaatggatggatgaaaattccattgattatgcgatgctgaataaaacggttcctcgcgcgatccttgataagattagcgacgaagcgatcaaaggaaacatgcttcgcccatcggttgcgcttgaacatagttcatcaaccactctggacggcttcatgtgagatttaaagctccgtttgctgatagtgaggcgaattcacggcttgtgcctttgtctgtatacaagttatatctggcgatgaaaactcatttccaggggcgttttgatgtccttcaatacaactggcagatcaaagttagtgaaaacgcctttaacaagcgaaaggatagatatttctttgtaaaattagctcaacgctttacattcaaagaaatctattttatattcctctccaacttcgtagccaatccggatttctgggtaggcgatgttgatgaagatagtattgtcttttacaggcagtacataggaaagttacaaagactagataacgtgtttgtggatgacgttaaaaacgtgtacgaattcgccaaaatgaaagagatccccgtgtctctggtgttcaagtacagcgaaaaatcatcaacgtcctacataagcaaacttgtcctgtcaaatgtgatatcttacgaatcgtttttgatttttgactcatttttaggtatcataaataaacacgatcaagtagctgatgatattatttggtctgactttagcattaagttaaaggcatacagaaaaatatttgaccttactgaaaaagatatcataaaatatcgaaacttaatgaaacaaacgttaatcaaactaaactaaacgagaaaacagaatatgagcagcatttttaaacgtcaagatcccgctaaactccaggcacaggtagcaaatctgaaaggtggttccggcttccagaaagatgagaaagaatggaaactgaccctggacgcacagaaaaacggttccgccgttattcgattcctcccagcacgttccgatgatgaactggcgttcgtccgtatcgtgagccactctttcaagaaaaacaaccagtggtacattgagaactgttcctctacccacggcgattatgacggctgtcctgcatgtaagtacatttccgaaaacgatctgtatgagaaggctaaagccaacaaaaacgggccagaagataagctactgagccagatcggtcgtaaacaaagtttctgggctaacgtcctggtcgttaaagacccaggcgctccagaaaacgaaggtaaggtgttcaaataccgcttcggtaagaaaatcatggacaagatcaccgccgcaattaacggtaatccagaacttgatgaaccgggtattgctgtaacctgtccgtttgatggtgctaacttcaccctgaaagcgaaaaaagttggtgattggcctaactatgacgatagctcgtttggtgttccggctaagatcaaaaacatcgacgatgaagaagttcagaaagcaattttcgaaggtatgagcgatctccgcccgattaccgctgaaagcgaattcaaaccgctggctgacctgactactcgcttcaataaagttatgggtagttcgattggttctgctggttccagcgcttccgctgaccttgatagcgaactgagcaacttcgataacgaaatggctaagtttgacaatcagacatctgatgtaaaatcatctggtggtgttgcatcggttccggtaggcgaagatgacggcgtaccgttcgatctggatgattctgatagctccggtgatgatgacctggataaactgttagacatgtaatacaagcgggggcttcggcccccactcaaagaattctaagttagagaagaaatatatgaatgaaagtaatgtttttgttgactacatgaaccgcgtccgtaaatcctgggttgctaaactctcggacgaaacaaaagaactgtttaaagctatgcctcaagaggaacgttttaaacactatcgtgacattgatgaaaaagtggttgcggaacatcgtaaacttaccagcgaacgacgcgaagatccgaagcgtacaaccgttaaagaaatggctgatatgcttgacacagcagcggaaaccgttgtaaaatcacttattaagtaacacttattgaaaactaaaggctgaatatgaaattctctaaacaaactattgatatcctgaaaaacttttctcaaatcaactcttcgatcatgctgaccaaaggttcattcatcatgacgaaatcaatcaacagcgttgtatacgcagaagctgaaattgctgatgtgattgatgaagatgttggtatctacgatctcaactcattcctgaacatgctgaacatcgtcggcactgacgcggaaatcactcatgatatttccactggtgaaatcgtgattcgcggcgacaagatgaagatcatcgaacgttcagcagacgcaacaacgatcccgaaaccgaaaaaacgtttggtgatgccagtagcagatctgattttccagattaccgctaacgatttcgaaaaactgatcaaagcgtctcgcatgatgaaactgaccgacctgtccgttgaaccgattgatggtaaactggtcatcaccgcgaaaagcaaagaaagtcaatcaactttctccgttgaagtcggtgagtatgaaggcgaaaatgttttcaattttgatatgaagattgataacatgcagttcatcaacagcgattacaaagtagagatttcctccaaaggggccgcaaaattctcttctgataacggcgttgcttacgtcgtcgtacttgaagcaagtagcacattcaagtaagatagttttaaggggctacggcccctttcttttacaccatttattttgaaggtatattatggaacttagtgaaaatattgaaatcatcgaaaccaaatacggtaaaatctctcgatctcctgatgaatttgcatgggatcagcgctatcgcccaacaacgattgaagagtgtattttaccttctggtgacaaagccgctatgcggggcataatcaaatctgggcgtgttgagaacatgacccttgtatctgattcccctggcactggtaaaacgaccctcgcgcttgtgttggcccgtgaggttgatgctgaggtgttctttgtcaacggttcgaactgtggtgtaaacttcattcgtaatgaactggatcgttttgcttcatcaatgacgcagaaaccaggcggaaagattatcatcattgatgaattcgatcgttctggtatggcggaagcacagaaacacttgcgtagctttatcgaagcatacagtaaaaacgtttctgttattgtaacagcgaacaacattaacggtgtgcatagtgctctgctttctcgttgtcctcctgttaaattcggtgttccgtctgatgctgaacgtatcgaactgatgaaacagttaatcaagcgttgtttcggtatccttgaaatcgagaatatcaagtatgatcctaaagtcattgcagcgtttgttaaagagcattatccggatgcgcgttctattatcaaagcgatcgggttctactcgaaacgtggtgaaattgatgcggggatcctaaatgagatcgttggttctgatgtgtctcatatcattaccctgttgaaagaaaagaactataaagggttgcgctctgaggttattaaatatgcgtcagaatacgatacctttatcggaaaattgactgatacgatttaccctatcgtgaatcaagattcgaaaatcgcactgatccagattgtaggcgaaaacaacgcgcaatacgggctggcgatgaataaagaaattcatctgcaatatctgttgatgaacctgatgctttctatggtctgggaggcgtaatcatgagcctggcggaatttctggatgaagaagagttatccccgcatgaatccgcttggctttctaaagattgggataaggttgaagaactggtcaaagagtacggcaaggataaagaaaacaccttgtttaacatcatagacgaaatcaacaacggcaaaacgccgttggttatcgatgaagtgtatgataagtactttgtagacaacgcaatgagccagcacatagacacgatatacaacgcgtatgtgatgaatctggtaggcggtagtatctctgaccaaatgcactataactattatctcaactctgttaggaaggctaaacgcttcggtgcatgggctaaactatcggaagattttgaagagaaaattattatcgaaatccttcgcgaaaaatacagtgtaaatacacgtacagcgatggaatatttgcaggaacttaaagacctcggaatgttcgaggattggaaaagaaaacacgcaaaggtcgctctgtctttgttgggtattgtgaaaaacaaagctgaacaaaagaaattggaaaaattgattaaacaatggtgatgtatgttagaaattcaactaatcagcgacgattcttttttaaagatccgtgaaacgctaacccgtattggtattgcaaacaacaaaaagaaaatgctctggcaatcgtgccacattctgaaaaagcaaggtaagtattttatcgtgcattttaaagaactgttgaaactcgatggtcgtcaagtcgatatgacggaagaagacgaactacgccggaacaacattgcgcgacttctcgaagagtggggcatggttaagatcgtaacccctgggttgaagtttgcagaagaaaacaacttccgcgtactgactcactcgcaaaaagcagattggatcctcaagtacaagtaccggatcggtcactaatcaaaaagcccttgcattcgtgcaggggctttgttatattgggtgtacaccattgagagggatatattatgactattaacgaaatcatggattcaatcaaatccaacgaaactttgatcatcccgattgtaaaagatgacatcttgttatcgttaacttgcaatctgtcagatacccgcacttacagctatgcacaacactactttcctggattttacgatcgtaacatttcagagtacacattgttatgcaatcaagttgaaaccactcatttctatgagcgtattaaaaaatctctggaattgatccaacaagcaaaagaagtctttatgaaaagaatggaggacgcgcaatgatccgcacttacatgaataaaattttcgcggcccgtatggataacgttattgaccaacgtgcttatgatgatctggtttcccttgcaacctgtcaactggatgaacatacagtaacggaaaggaaactactggttaacaaagctatcatgatggttaatcagggcattgcagaagcaaaatatcatagtataaattccagtatttttagcatgttattcgacgggtttaaacttgaacgccagcttgttcaactgagaaagatccgtgacttgttagcagaagggttgttggttttagaacatcgagtaaacttgaatttgctgtaggtggtgatacaatggaacattatattaatggagaagacaagatccaatgaatgaattttacctatcagttgaacaaatgggagataccatttacgagcgcttcgttgactctaacggcaccgaacaggtacgtaagacgaaatatgcgcccgtaatgtatcaacacgctatgaatggcgtagaaaccccatacaaagacatttacggcaagccttgcctcaaaaaacagtttgacagcatcaaagaagctaaaaactggatgcagcgtatgcgcgatgttgggatggaagcgctaggtatggacgattaccgactggcttacatttctgacatgtaccggaatgaaatcgaatacaaccgcgaacacattcgcattgcttctatcgatatcgaggtgaccgctccagaatttccggatccgcgtgaagcaaaatatccaatcgatgcgatcacccattacgatagcattgaagataaattctatgtatacgatctggttgagggtggccttgcggaatggtgcgcggaaaacgttgatcgcaaagacattagcgaagaagatttaaacaaaattgtttatcggtctttccagaccgagaagtcgttattgtctgcgtatatcaaagattggaaagagcgaacccctgttattgtaaccggatggaactctgacaaattcgatattgcatatatcatcacgcgatacctgaacattttcggtcaaaacgtggtaaggcattttagcccgtttggtaaagtaaccgccagaaccactactgacgcttacggcaacgaacaattaggatatgatattttcggcgttgctcaaatggatggtatggcgctgtataagaaattcagctttaccccgcaaccgtcttaccgtctggacgcgatcgcggaatacgaaactggtaaaaataaagttgagtatgaaggttccctgtctgaactacgccagcgcgatcaccaactgtacatcacgtacaacattgttgacgttatccgcgtacttgatatcgacggtaaacgaaactttattgaactggttctgtctgtagcgtactatgcaaaaattaacttcccaggggttatgtctccgctgaaaacgtgggacgcgatcatttataactctctgcgtgaagataaggttgttattccggaaaacagacgccatactaaaaccccttaccctggggcatttgtgaaggatcccgttcctgggccttacaaatacatggtatcgtttgacttaacaagcctgtacccttccatcatccgacaggtgaatatcagccctgaaacgattatgggaagttttgcggtacgtgctcttgaagagtatattaataagaccgcgccgcgccctagcgatgaatttagctgttctcctaacgggtggatgttccgccgtgatatcaaaggcgtgatcccagtagagatcaagaaagtatttgaccagcgtaagatgtggaaaaaacgaatgatggcgggtgagcgaaatcttgaactcatcaagcacgaactcgaacacttaacagacgcacataaccaaatgatcgatcctgactttgatttctatacagatttcagtgatgaatcgaaagcagttctgaaaactcttacgaaacaaatgcttaaagcagttaagcgtgtgtgtgagaagaagatcgcacaagcgaacacagcacagcttaaccgtaagatttctatcaactccctttatggtgcgttgggtaatgaacatttccgatacttcgatctgcgaaacgccagcgcgatcaccatgttcgggcagttggctatccagtggattgaacgtaaggtgaacgaataccttaacgacctgtgcggtactacggatcatgcatatgttcggtactgtgacactgactccatttatgtttgcatggataacgtgattgcaaaagttggtggtgaggctaaatttaaggataataaccattgggttgacttcctggatcgctttgctaaagaaagaatggaaccgatgatcgataaagggtatcgtgaactttgcgaatacatgaacaacgtggaacacctgatgtttatggatcgtgaaatcatttctgggcctccgttgggttccgaagggttgggaagtttctggactgctaaaaaacgatatgcggctaacgtgtgggactccgaaggaacccgctatgaaaaaccgaaactgaaaatcatgggtatggaaacacagcgatcgagtactccgacctctgtgaaagtattcctgaaagaagcgatccgccgtatcctgcaagaaggtgaattatctttgcacgaacattataaaaagttcgaagaagaatataaggaacttgactacagggaaattgctggtgtatcatctgccaacaacatttcgaaatatcgtgatggggctggctatccaatcaagggaacaccaaaccatattaaaggggtgcttttctttaaccgtttcactgctggtattgatggtgttacgccaatcatggaaggtgaaaaggtaatggttctaccactaagggataaaaacccgtggcaagccgattgcatcgcgtggcaatccggaaataaactaccgtcagagatcgaaagtgatattctggcatgggtagattatccgggtatgtttgaaaaacatgttattagtccattgactaatatcacggaagtatgtaaaattgattatgaaaaacgtgccagtttaaacgatctgttcggtgactggtaaactctaggggcttcggcccctttcattaactagtgagatatatagaatgagaatgaataaatcggaaaaattaaatgtcaaacaaagcactactaaaaaaactgatcaaaaactcgaatagccaaactgcatctgtactttctgaaagcgacgtattcaacaatattaccatcacgcgaacccgtgtgccgattctgaatctggcgttgtccggtgcgtttaacggtggcctaacttctggtcttacccttttcgctggcccgtccaaacacttcaaatccaacttaggtttgctgactgtagcggcttatctcaaaacgtatgaagatgctgtgtgcctgttctacgattcagaaaaaggtgttactaaatcctatctgaaatcaatgggtgttgatccggatcgtgttgtgtatactcgtatcacgacggtcgagcagttgcgtaatgacgttgtaagccagcttaacgcgcttgaacgcggtgataaggtgattgtattcgttgactcagtaggcaacactgcaagtaaaaaagaacttgctgacgcgctttctgataacgataaacaggatatgacgcgagcaaaagcattaaaaggtatgttccgtatggttacgccttatctggctgatctggatatcccgatggtttgtatctgtcatacctacgacacacaagaaatgtacagcaagaaagttatttctggtggtactggtttaatgtattccgctgatactgcgatcatcctgggtaaacaacaggtgaaagaaggtactgaggtagtgggttatgatttcatcatgaacatcgaaaaatctcgattcgtgaaagagaaatcaaaattcccgctgcatgttacctatgaaggcggtattagtatgtattctggccttctggatctggcaatggaaatgaactttgtacagaccgtaaccaaaggctggcgcaaccgtgctttcctgaataccgagactggcgaactcgaagttgaagaaaagaaatggcgtgagtcagaaacaaatagcgttgaattctggcgtcctctgtttactcatcaaccattcttgaaagctatcgaagaaaagtataagatccctgatcgtgaaatcagtgatggttccgcgctggaagatttatacagcactgatagcattccagatcctgatctggatgatgacgatatcccagaatcatttgatgatatcgaagaaaacgacgaaattttataaaaaatatggggcttcggccccataaccgaggcaatgtatggatatcgagagcaaagcaaagaattatattgatgaagcgatgaaagatgttattcaggaacttctgattaacgatgaaaaaggtgttgcgcatctggtttatattcataaggtgttttgggatcatggtctgaaagtagaattcagtaccccagacgaagacaaagaagcgttgatcccgctggtgcatgatgcaatttatgcacagattaaagagcttgaaaagggttcagttgtcccaaagcctaagctgacattatgggatgtattcaaacaaaaggtttacaactttttcatgatgttcagcaacctggtataaggcaatacaatgatcgttgatacaatattttctaacctgatttataacgggacgtattttgtccaagcatggccccatctgaaaaaggaatatttcgaaggcaatgcgcaagttttgtttgacctcattgataaacatgtacaggaattcaacggcattccgtcaaaaactgctttagaggttgcgcttgacaaacgaaatctaagtgatgtagtctacgaagacacgaaaaaggcgattcagtcgctgaaaaatgcgccagaagatttagattggctaatgaaggaaacggaaacatattgcaaagataaagcaatgtatcgtgctctttctcgtgcaatcgaaatccaggcgaacgcagaaaaaccactggcagaacagaacaagaaacttcctggtgttggggctatccctgaaatcatggaggaagcattagcaatttcattcgatatttcagtaggtcatgactatttcgaagattatgaaaaacggtggatgctttaccaatcaaaagcgatgaaaattccgtttggtatcccgatcctgaacgcaatcaccaaaggcggcgcggaacgtggtacactgaatatcatcatggctggtgttaacgttggtaaatcactgggcttatgttctcttgcggctgattatctgcaacagggtaaaaacgttctttacatttctatggaaatggcagagcatgtttgctctaagcgtatcgatgctaaccttcttgatgtgactatggatgacatcgacgaagggaacattacatacgcagactataagaacaaaatggagcgccttaaagcgggtaaggttgggcgtttggtggtcaagcagtaccctacatctggtgcgggtgcaaaccactttagagcgcttgtgaaagagcttaaattgaagaaacagtttgtgccggatgtgattattgtcgattacctggggatctgtacttcaacccgcgttaaaggtgctgaaaatacctatattctggttaaagcaattgccgaagaactacgcggtcttgctgttgaaactaataccgtaatgtggacaggcgcacaggttgggcgttctgcatgggatagttcggatgtgagtatgggtgatgttgcggaatccgctggtttacctgctacggctgattttatgttagctgtaatcgagacggaagagttagctgatcagggtatgcaactgttcaagcaaatcaaatcccgttatggcgataagaacactttcaacaagttcaagttggaagttcgcaagggtaatcagcgctggatggataccgacaacagcgaatacgggtttaaatctgactaccacggcaacactatgcctaaaacagtagaacagacacaaggcccgatgattaaacaggctgaatccacccgacgtgataaaatggcgcagattgcaaaatctgacattcaattttaattgactggggcgaatagccccataaagaatgtaaggtaatgaaatgactaagactataacgattccgattccggctatcaaacttctgactggactgacactgatttttgcagcggctaaagtatttggcttctcgcatatgtcatggttctgggttctcttcccagttctattacccgtctacattgtagtaggcgttgtgttggtgggtgttgcgatctatctgctgttctcactgattgccagtgacaaggccgaagatatgtatcgctgggtaaaagccaaatacgaaaaacttttcaaaaaatcgtaaaaaggtattgacctgaatctccattgtggtaatataactcacgtagacaagatactgagttaaacaaaggagattcaaaatgaacgtattcaacaacccttacaacgaaatgctgaacccgaatgttgatttcagcgatggttattttgacgcaatcgtaaacagcatcaaaaacaaaggtttactgttagcgatgctggaaaaaggcaaagatgacgttgaaggaagtgttgatttcctctggaacttcctccctatcgaacctggtttcaaagttggttgtaatgaggaacaagcaaaaaacgttcttcggtatctcatcaataacgcataaaaattaagccccgaaaggggcttttttgtatctgtaggtattgcattctttcgcaaaagatgataccttaatcataacaaaggaggacattatgaaaatcgcattcgttatcactttcttacttgcagcactcaacatcgtaactggtaattcttttagttggtgggtggtggcaatgccttacattttcgtgtatagcaaaatcatggtgattgctggcgtgaatcttgtccttgctatcttactatttgtattcgccgccctgaatggtgaagcgggttctacctggaaagctatgaaagagggtgttaaagagggtttgaaatgaatattgatttttgtaaggctgaaataaaagcggatatggacgaagaagaaccgaagttcgatagtcctcacagttcgcgctggatcgtagctgttgacgatgaaggttatgttacggtattatctcgaccattcattcatgatgcattctttgaatgtggacgcagtgcggaagatatcgggcttcctgattctgtcgaaatgcctcctggtgtatatgaatggatctgtggttttgaacaaactactgactgggaaaccggatatgtggacgggtgggaattctacccaaatgaatcaacattactgtatagctgggacaatggcaaagttaacgaaagcggaaaccaagaaacacaatcagataatggatctggttcactctgacaaagcgctaacttacgaagagaagttgttcatcattgaaaactttcatgaaggcgcgtttacaaacaattctgaattaggggcgttctttacccctattggacttgctcgcgatttcacaatcgatgcttgcacaggtggaagtgttattgacctgtgtgctggtatcggtgggttatctttcgctatggttcattacatgatgtacaatacgccgcgcgaaatcgtctgtgttgagttaaatcacacatactatgagttaggtaagcgtatcgtaccagaagcctcctgggtgcatggagacgccttaacaactgaatttaatcaggtgtttgatatggcgatcagtaatccgccttttggtaaaatcaaaacatctgattttaagggtaagtatacaggggcagaatttgagtataaagtaatcgaacgtgcatcacagatcgcgcgtcagggaactttcataatccctcaaatgtctgcaaatttccggtattcgaaaacacactgtttccgacaagatgacagcaccacatcaagtaaatgcaaaaagtttcttgatgaaactggccttgttatgaatcctggatgcggtatagatactgggtattacctggaggattggaaaggggttaaaccactatgcgaggttgtttgtatggagtttgaacctgaaaccaaatctgatttattcactttcacaatagagtaataatcatgagtgatcaattagttaaaaatatggatttaacatatagcgtccggatgatccggctactcaaaaagccctggactgaatggactgcttacaagctggggatccttgatggacaaggcgaagtaattcgcaaccccaaaacaaaagaagagttagaagcgtattctccttttcatcgttcagtacgccatatcaagcgtagaatgaatgctgttccgtatatgagtgggtttatgaacttaaccagttcatatgataccctacgcaatcgctacaatctgacagaacaagagcatgaagaaatcatgttgaacgttccacgcctcaaagaatattatgataaggggcgcatgttagaggatatggtcgcgggtgattctggcggcgatccagaaaagattgcttctggtgtaactactggatcagtaaccaacatcgggccgaaagtattaggcgttacccgtgcagggaaaaggaaaaagaaatgataattcctccgctgaatatcactatctgggctactgctaacgattatacatggtttccaatttgtatcatgtatatgagtgacaacgcgaccgtttatcagaatcgtcgaaaaggttctgataaaattgatattgcaataaattattcgtttaaacaagcatttcgtggttggaagttaatgcttgacggaacagaaaagcaagtaagttcttgacagaaaaatcctcttagtctatgatattgaaatcatttgattaggaggatttacaatggcggttggatttggccctgctgacggtgttcaagataccattcaggcaacaatagacaatgcgatagattttgcacgttctcaaatcagaaacggagaatcattaacgcattgttttgattgtggggatccgatacccgaaaaacgtagggttatcgtgaagggttgccgttattgtattgaatgccaaaaagaacatgacgaaatgatcagcgcggggtataatcgacgaggatctaaagatagtcaactgaggtaataaatgtatcttgatatagaatttgcaacccgaataatgggatcattgcctcaaagcgaaatcgttcgtaaatcgggggcattaagcatcaatgcgcgttgtcctatttgcggcgactcaatgaaagacaagtacaaaaaacgattttggatctacccttctaaaaagggtgatcatatgaattgtggttgttttaactgtggttatggtgtaccgtttagcgtattcctgaaagaatattatccagacgattaccgtgattatctcatggaatcgtttaaggatcgcaattcgttaaagccaacacatacagaaccaccaaaggaagagaagaaatttattcctactcttcaattctgcgaaaggttagataccttgccggatgaacatccgatcataaaatatgtgcagaatcgttgtattccccgtgacaagtgggaacggttgtggtttactcgcgaatggcaacaactggttaatacggtgaatccggatacctatccgatcgcaaaaccagaaccgagattagtgatccctatcttcgataagaaaggtaaaatagaatctttccagggccgtgctttacgtgacggtgcaaagtcgaaatatatcacaatcaaagcctgtgaggaatcaaccaagatttacggacaggatacgatagatccgctaaaaacggtttatcttcttgaggggccattagatagcctatttgttgataatgctggcgctatcactggtggacagcttgcactttctgaggttccgtacaaaaatatgcgtgtctgggttcttgacaatgaagcacgtcatccggatactactcaccgcctctttaaattgattgaggctggagaaaaggttgtaatgtgggataaatgcccgtggccttccaaagatatcaacgaaatgataaaaacggacggcgcaactaaacttgaaattatgcagtatttgaaagacaatactgtttctggactcacggcaaaacttcgatttaagtcgtgggacaaatcaccgaaaaaatgagattgatatgactactgataaaactcctgtatttaattcatgtgcgcacctggttaacccggaagatctggaatttgtagattccgaatatcaaaaggttctggcccgtaatggcgatcctttacaatccatgctggatttacaaaaccatgcacaacaaagcctgtctgatacgctgcattgggttccgcgtccagataatctggaaacttgcggagaaatccttgattggctgaaactgcaagatgacgcgatcgccgacgaaacccgcgaattgtataccgctctgggtggaatgtctcgcggtgttaaacctgcgtccggtgtttggaaaccgtggaaagcaaatcaccaggaattgcgcaatactaaatttgcggatctgagtgaagaggatcgtttagaagttctgtttgaaatgatcgaccaattccactttgtactatgtaagtttattgcattaggtatggatgcggaaaccatctacaaactgtatgcactgaaacaagccgaaaacctccgccgttgggctaacaactactaatggatccgatcatcgcgctagtagctgttggggttctttcttatggtgtttgcgcgatgatcacatatcttttcggttggtgtgtgtttcacgtaaatggcgttgaaagaaaacttttactgattatactatcagtgttttggtttgttggaatattctacgtttgttatgaggggcgagaatgattacaaaatattatatcgtcgttagtaaggataaagacgggtttaaaattcccttcattaaggaaggagagttaacacctttgttgtttctatctccggacgatgctaacgagtataaaaattcgattatcaaagaatatcatgataagatgaatccagttaaacaaagtggtcttagccgattctttcgaaaggaagaagttgaaaccgtaaccgaaaagaaaaagaaagatatgcgttggtttattgaacacgcaagtattcaaggggtattgattaaagtatgagcgaattaacttttgacgatctgagcgaagaccagaaaaatgcacatgatcgagtgattaaaaatatcagaaacaaaatccatactactatcacaggtgggccgggtgttggtaaaactactctggtaaaatttgtgtttgaaacattgaaaaaactgggtattagtgggatctggttgacagcgccgacacaccaggctaaaaacgttctctctgaggcggtaggtatggatgcaacgaccattcactcagcactgaaaatcagccccgtaaccaacgaagagttacgagtatttgaacagcaaaaaggcaaaaaggccgctgatctgtctgaatgtcgtgtgtttgtggttgaagaagtatcgatggttgacaaagaactattccggataatcaagcgtactattccgagttgtgcggtgatcctgggattgggtgataaggatcagatccgtccggttaataccgaagggatcaccgagctttcaccgttctttgatgaggaaatttttgatgtcattcgcatggataagattatgcgtcaggcagaaggaaacccaatcatccaggtatcacgcgctatacgcgacggtaagccgttaatgcccctaatgaatggtgaactaggggtaatgaagcacgaaaacgctggtgacttcctgagacgttattttagccgtgttaagactccggatgacctgaacaataaccgtatgtttgcttacactaacgcaaacgtagacaagttaaacgcagtgatccgcaaacacttgtacaaaactgatcagccgttcattgttggtgaagtggttgtgatgcaagaaccgttagtgacagaaggccgtgtgaatggggtttcgtttgttgaagttatctataacaacaacgagcaaattaaaatccttgaaatcatcccgcgttctgatactatcaaagctgaccgatgcgatccggtacaaatcgattatttcttgatgaaaacagaatcgatgttcgaggatacgaaagcggatattcaggttatcgcggatccggttatgcaggaacgtttaggcgattatttgaactacgtcgcgtttcagtataaaaagatgaaacaggaaaccggatacaaagccccctggtattcgttctggcaaatcaaaaacaagttccagacggttaaggcgcttccggtttgtacgtatcacaaaggtcagggaagcacgtatgatcattcatacatgtatacgcgcgatgcatacgcatacgccgattatgaattgtgtaagcagttgctttatgtaggaactacccgcgcacgattcactgttgattatgtctaagggcttcggccctttgaggttattatgaaaattattgttaaagtcaaagatgtagaaaagattttgcgagaagttgaccgtattggtagagaggggcttgattatctcgaagggttcaattctatcgatatcaatttgttgtttgcaaaattgcgctgcgttgacaacgcaaacaaagaagttgggttatactgtcctaacgggccgacctacacgtggggaaacatttcacaagatatcgaattcacttttgaagagtatgcagtgatcattgataccttgaaaatgggtcgtaacattcgtgaaaacaaaaacatgcttgaggggttttaaatgaatattcaccttcctcgcctttatgctgaattggttgccgatctgattttgaaaagtgatcgttcgacaatggaagattaccatgattgggaacatctggacaattttgcagaggctgtagaaaacatgatccgactggaaaaatcgattgctcgttgtgggcttcgtcagttcgggatgatggcggtaactccaggcatgatcgaatctgttgatgttactccggaagtcgcgctatcattggcctatttcatggaatcgtataagcggggtcgcgaatgagtcatttacccgtagatttcgtatttgattatgaaagtattggcccgtttccaaaaggaaaactagctgaacttagctatgttccgtttgttgatgatccttatgatccgcctacctttcaggaactgattgctaaaggaagaaagtataaattcgacatccggaaacaaccagaacgcatcaaagatgaaaaaacgatcgaatggtggaaacagcaatctaaagaagcgcaaagggttttgttcccttctgatattgacatggatttgtacgaaggtcatcgacaattctttgctgatttagcggctgacggtgtgagtcgttggcagtcatacgattatacgcgcggccctgaattcgatcgttctatgctaaccgatgttgtacgaactatgacagggaaacttgatacgtttgaagatatgccgaccgtgttctggaatagccgtgatgtgcgtacagctattgaaaaccgtttactgactcgcggagtgaccacgtgtccactacgtaaaggcatgttagatggattcattcagcatgattcgattcatgattgcgctaaagatgcattgatgctaatctatgctaaacgttatgctctggggctggaagaacctccatccttagaagagacagacgaaaacagcataggaaagaaacgatgatcacattaactattatggatcgccattactacgggaatacgattaacgaagcgaaagcaaaagcctttgatgatatcattaaccaggatctggttaagattgaatctgatcgctatgtcgtgcaaccaggcgatagcctatattctatagcaaagaaactgtatggtgttggtgaactttggcctgatatcgctaaaatcaaccgtgattctattccggatgcacgtctgatccatcctggtatagttcttcgattgccaaaactggtaaaaatttaaaacaaagcccttgacttcggttgagggcttttgttatattgggttctcagaaaggagattgatatgaattttactaaatttgaaatccggctgttgattacgctggctatttgcggagcggtatcattgattagtttgttaacgtatatcgctgtaagaacaacgatatggcttcatgactggtttactgtacttgacacaattaaggggtgatttatgcgtatagcgattattggggcggctttgggtgtaatcggcgaccgtttagtaaactgtatgatcgaagagttaaagtcatcaccctatccattttcgatggaatggaacaaccaatttcctaatttggttggggaagaacccacgatccataaagtcaaaccataccgaaatccggttgtgcctaaatcattgcaccgtcaatcagtaaacaggggtaaatgatgtcagaattcgcgttagctatccttgtcgtggttgttgtaatgggttcgatcctgttttgtcgcatgtatcagttatatgatacacaggaatggttggacattaacgaaaaacagttccgtaagcactttgcaggtgaatttgtttttgtgaaatttcgtagtgactacaaggtcgagtttgagtttgacggaaaagggaacaactaccacataatcacttctgttattgatgcaaagaaaatctttgataagacacagggcggtgggatccgtgaattgctcaaagaaataaaatagcactttttgttaaaaagcctcttgcattgcgggaggctttttggtatcttgtattcatcgaaacgaaacagagaaaggaatacgaaaatggttaaagtaaaatatgcagcacacgttaaagcaggtgagattgttggtttaactttcggtgctgaaattggttctcagtgggcgctggttgaaaaggtagaagacctgggcgataaagtagcaatcactgtgaaaatgcaaaaacgttttactaaccgtcctgtaatcactaagaaagtgaagaaggaaaaacgtgttaatactcagactttcgaagaattcatgaactggtgcaaaatgtataaactggatacctactaataacactttttgttaaaacattctggggtagctttggtatagttaccccatcgaaacaagggaggaaattattatgatggttaacggttctctttatcaacaagcagttgcacaatggaaacagaaagttcaggatgcagaacgcgggatcgcttattgtgatgaagcgttggcaagcaatcttgaaaactgggaacgcaaagagtacgagaaagttaagcaacgccatttgaacgaactccctgcattaaaagaacacttaaaatatttgatggataacgaaaaaagccttgcatagaataaccatctttgatatagtacttacatcgaaacgaaacacactttaggagatataccatgaacactttcgaaatcctcgcagaaaaagcagcccctttcatggaagcaatgtacaaagcgcgtaacgctcgtttccaagattctcctttcgaaactgttttcgttctggagaaaggccgcaaatatcatcgcgttgttcaggatactcgcaacaaagaaactggtgaaatgttcaatcagcgttctgttgccgccttcatcgataatgatggtaatatcctgaaacctgcaagctggaaagcaccagcaaaaggcattcgtggtaatatcttcaatgacgcagaccgcgcgattgaccaaagcggttatgtggtttatcttcgttaacaaaggggcttcggccctttttcttaaaaggaatatagcatgagtaacaaaaacgaagacgctaaaatctggaaagctgtaggggttatggctgtaatcgctgttgtgggttactatgcgtataattcctggcaagaaacgattgatgcgcaagtacaggaacaacaaaaagccgacgcaatcgaacagcataatcagcttatgcaattgcgctcgctgggatataccacgaaggaagattttaaaaattcctttggtgactataccggatccctctacaccgtgtggggaatggctgacggcgattacatgtacattgaaacagaccgttataatgtcccacaaagtgtatgtttctatagtacaccgagagacaacggcaaaatcacgtcatacgcaccagaattcaaaacgatttctgttgatatgaaaattgacgggggagaaaccctatcatttgccgctaaaggaaacaacggatccgagaggttgtgtcttctttctcctactcgtttcttacgcaacattcaagacgcgagtaatttaaaaattgctttaccatacatcaaccattatgatattgttgatgacgtaaaagaatggaacgtatctcaaatcggggtgaaattcaaatgagaaaagcacgtaaaactaatgcagtgttgatggttaacggtgaagtaggaaaaccttgcaccaattctaaattcatgcacattgcagggcttccgggcatgacgcttaaaacgtcgtatgatacccattacaacgaagaaactacttcggtatacatgggagaagatctaatggctgaacgcatcatgcaatgcattcacttccctggtgaacgtccttcgattgattgttatatttttggctaccataaaggtattgtaaatgaatctgtataaagaaaatgatctctatgttcctgaaattggtcaactcacttatcacagtatgtttgctggatacgggaaagatttcgattttgtagcaagcgttaaacggcatttggaacgcagcggcggtttgtctattccgcgccaaatccattatgtttgtaaagaaggggtgtttttgaatggtgttcctcatatgatccctttcaacgtgtttgaaggctattttacgaaatatgttgttcaacacacggcttcaacatccgagaataccgcaacgcgagaagaaacgacgatcgtacttgataagtttttcgaaattgcacataaagtgaagaaacgcacgaagagtgatgtggttcatcacctatcagcggaagttggcgagatcagcgaatgtctcattcagcctcaacgcggcggtaatatcgttgaagaaagtattgatgcgattgtgtgcgcacttgatgtgatttacctggaactgggtactactcacggacggtacgaaattgcaaaaattatcaacgatactcttgcagaaaaattagataagtggtatcgtacttgtaaaccttgagtttacttgtgaggattatatcatgttcgtatatcgtgtggaattttcttgttctttctggaatgattgtacagaaaaatggcaaacaaaaagtggcccatatgtcaatcgttatttgtcgatggataccgctgaatggcttgatcaattctgtatgaatcctgatatctatattgatatggatgatcaccgacatccagcgccggatgacgataatcgattgatgcgcaaccttgaaaaagataacatagactttcaagcggctgggttatattttgggtttcagtcaatacagcgcctttctcgttggttcaatgcatatgaacgcgagtacatgcacaatgttggtttcgtctgcatggtatacgaagttgaaaagttgtatccgggcgcacgtcaatgtgtttttgacatagacaaagcccgtttagttaagatgttgagtttaaaagagatttattaatgcctacctatacctataaatgcaccaagtgtgaaaaagaattcccgaagatgtcaagcatcgcaagccgcgacgaaccgaaagagtgtgattgcggaggcgaagcaaaacgaacggttgataaacctcaaatggttcgtgatggtttcccttataacaagtaaaccccgaaaggggttttctttttcatagaaccctatataatgtcagtgattaaacaaagaggtgaatatgagtttagattttcttctggcagatgatgaaccagaacagaaaccacaaccagccaaaaaaggcgcaaaggttgacgaatcattttgtatgagcgatcgcgatcatattcggttgcgtccaaatatgtacgtcggatcggttaacaaagaagcgcatgaacgtttcataatgggccaatatcgcaaggttgagtacgtggaagggttggttaaaatcatcaacgaaatccttgataactcgattgatgaagcgatccgaactgaattcaaacatgctaataagattgatgtaaccattgatcataatctggttaaaatctctgataacgggcgcggtattccccaggatgatgtaaaaaccccagatgggaaaatagttcctaaaccagttgcggcatggactatggcaaaatcgggttctaacttcgatgataaaaaccgcgtaacgttgggtatgaatggtgttggttctttcctgacaaactgttatagctcgatttttattggcgagactgcaaacgggaaacgcaaagtaaccattaactgtacggacggcgcacagaacatcgattaccgaaccagccccagtaaagaacagggtactactgttaagtttactccagacttctctatgtttggtgtaactggtatcgatgaagaaaccaaagaagtgattaaggatcgcttaatggcccttgccgttgctttcccgtctgtgaaattcacatataacggcgaaacgctctctaatcgcttcccgctgtacgcttccatgtatggggataaaaccattgtccagacaaataatcgcctcagcttcattctggcgagcactgaggacgggtttaaacagaaatcctttgttaacggtctggatacgaaaaacggcggtgttcatgttgagtgtatgattgatggtatctattctgaacttgaaccgatgatcaagaaaaagcatagtatcgagatcccgaaagcacgtgtaaaagaatgcttaactcttgtggtattcctgcataactttaatgcacctgcattcgatagccaaacaaaagagcgattagcaaatacagcaggtgagtttaacaatcatgcgaatttgaattacaaaaagatcgcaaaaatgattatggataccccagaaatcattactccgatcattgaatccgcattgattcgtaaacaagcagcagaagccgccgcgatcaccaaagcgaaaaagaaagcgaaaaaggcaaaaattgctaaacacgttccggcttccggtattgatacccctggggtagaaacaacattgtttctgacagaaggcgattccgctgttggtcagttcatcgaatgccgtaatgaagaaacacaaggcgctttcccgctacgtggtaagcctctgaatacatggggtatgagttttacagacattatcaaaaacaaagaactgtttgaactaatggctatcctcaatattcatcctggtgatacttccggaatgacttatgataatatcggtatcatggtcgatgctgacgttgacggcggtgacattttaaccctgttgcttgcattctttagccgttggccttctctgtttgcagaaaaacggatccgatatattcgaaccccgatcgttatcgctaaagttgggcgcgaggaaaaatggttctattctcttgatgagtttgcaccgttccgcgataaagcaaaagatgtacgatatatcaaggggctgggttctttacgcaaagaagattacgaccgtgttctgggtgatcagttgaagtatgatgtcattgtacttgacgacgaatacaaagaagtgttagaactatgcttcggcgacgaatctgatccgcgtaaagattgggttaatggaaaacacaaattttctaaggttgactaatggaaagaagtattaaagatgttgtacaggtggaagggctaacgtttgccctttacacgatttattcacgtgcgatcccgcacctggtagacgggtttaaacccgttcaccgtttctttattcactctgctatgcagggcggaacgggatttcagaaagtagcttctatcgctggcggtgttgctatgtatggatatcaccacggggaaacctctgtagaagaagcgttatcccttatggcggcgcactggtgcaataacattccgttattcgaccgtgatgggttctttggttcccgtttggttaagaaacctggcgcacctcgttacatcaagtgtaaactatcgccaatattcaaagcaatttatatggatggtgatttaacgccagttcatgaagatccggaacatgtgccgccagcttactatctcccgatcatcccgatggtactggttaacgggtttagcgggattgcaaaagcatatgcaacaaacattccgcctcatgatcctaaatcggttgttaacgggtgcattgcatatctgaatgataaagatttcacactggatctgaaatacccttactttaaaggtgaaatcacagacgggacaatttacggcacgtatgaattgcaaggtaaaaccaaattggtgatcaccgagatcccagtgaagtatgaccgtgtgaaatacattgcaatccttgacaagctggaagaaaaaggcgttatcgttagctacaaggatctatcgaaagaagattttcgttatgaagtaacgctcaagcgagagtatgccaatgggttaacccgcgaaaagatcctgaaagatttcgggttgattgaaaattcaaacccaaacattaacgttatctttgagggcaaactatactcatatgaacgccctgaaacgcttctaaaggatttcgttgatattcgtatgaatgtatatcaacagcgtatcaataagcgtatccaggaaactaaggaagcgttagataaagcactggcaaaggttgcgtttattgctcaaatggtagaatctcctgattctctgcgtggccttagtcgcagcgaagcggttaaattcgtgtctacgtggataggttgcgagaatcatgccgaaatgttagtggctatgaacatctaccatctaaccacggacgaaagaaaaaagctggaagacgaagccgaagaattgcgcaaacaattgaaatactgggaagaaacaacccctaaaattgagtatctcaatgatttaaaagaactttctaagaagttgaaataattacaaagcctcttgcaatgcagggggctttttgctatattggttttgtaccaagcaaaggagattctaaaatgttgaaaactcgtagtgcaatggaagtaacccactgggcgcgtaccatgatggaaaaacacggtttgatcagtaatggttggacattccggatcaatggacgcattacaaaaactctgggccgttgcagttataccaaaaaactgatcgaactatctggtcgtcatgttgcggaagatatctacgaggatattttagacactcttttacacgaaatcgctcatgctcttgtcgggcgcggttatgaacatggtaaagtgtggcaagctatggccttgcgcctgggtgctaaaccttcaccgagtaaaacaactacaaaggatgctaatctagttgataagaacgagatcctttattgtttgttcatgaaagattatcaaggccgtgaagtctatcaggctaaagctgataagaagttttacaacgatgtgatgaacggtgttaaggatatgaaaaacatttggatcagtgggcgcaaggcatatacaaaaggccgtctgtatatccgtccagtaacccatgaagaacttgcatacattcgcaaagaggggtaacgtatgacacgttataatgcgcctaagttgggaaaatatctgaccatattcggattttgtgcgttcttttctatcattatcggggctatcgtgtggggtatccttgatatgaagaaacagcaggtcgaggaagaaaaattggtaaaattccttgacacctattgtgaagtagtagaatatggtctgaacaaaaagccaacgaagtactcttgtgaccaagttatttttaatgttaagtgagaaataaacaatgaaattacgcgaagatacaccgcaaaccatctaccgtgttggtacagataccagcaagggacgaaacaaactatctctacgcgcaaacaagaaagcgtataagatcctttcttcgacagtatacaaatacaagatccgcgcaatcattcgcgaactgtcttgtaatgcgattgatggacacaaagaagcgggaaatcagaacccgtttgatgtccagttgccaactgctgttgatcctcgttttgttattcgtgactacgggatcggtatgtctcctgatttcgttagtgatgcgtttaccgtttacttcgaatcaaccaaaaatgattcaaacgacctgatcggttctatgggtctgggttgcaaatctccgctttgctatgccgatgcgttcacagttgaatctgtaaaagacggtatcaaatgcggttacacaatctatatggatgatggggaaccgttctgcgatcctctgtatgagattgaaagcgatgaacctaacggggttactatcaccgttccggttaaggttgaagatatcaaagaatgggaaaacgaagcagcaagggtatacgaatcatttactgatattcgtcctaactttgttggtgcttctattctcaaaatcaactatcagccgaaagaagcaaccaacgatagcggggtgatccgtcataaatcagcatacactagcggtgtatatgctcgcatgggtaacatcatttatcctctggataaagatttgtatgatacctcgatgttctattgctatacagaaagccagtatacgtatattattgacttcccgatcggtgaacttgatttcatgccttctcgcgaagagttgagtatggataaaatgacagtagggattgttaaagaacgtctgaaacaaatcagccgggtatatttcaatcgagttaaatcagaattcgataagttacaaaccgtgcgtgataaactgacgtggttccattctctgccttcaatggtacaaaactttgttggtaaagatgctaattttcgcatcaatggtgattctattggctggatccatagcgaactagtcaaaccaaacaaatataatgatgattatgttgctgggtattgggcgaacgaatacgacggtaaagatgcatggtatcaggtaactggtagcggaggccgctggagcaagtataagccagaaacaaccaaacgccaggacatcacacgcatttattatccgtggaaacagaagaaactcattctgttaaaagtggataccaacacggttaaaccgtatatcgtcgggtatgctaaaatgcataacctaagccgtgttagctttgttgcatattacgatagtgattcaaagcgtgagattgttaatgatatcgttcggaaaggtcattttgatgaatcggaaattgtgtatctccgtaccagtgaaatgacaaaagaaaaagagatctatgatgcagatcgcgaaaaatcaaaagcgctatatgcaccgaaaaattcagaaccgcgcccaaaaaccccgaccgtatatcgttatgagttggatagtaacggcaatctggcaaaaacttctctgtttatgacaaaatcagagtttttatcactggataaagccccaggtgttcggttgtatggtattgatgaatatagccgcttagatggtgaaaattccgggttgtctatggattcagcaatgaaagaatctactttatcgcgtatcatgcgccatactgggatccctgttgtgtttgctatacgtaacagcctctggaagtggatcccggattcaaatctggtatgctttgatgatatgctgtgcaagcagtatgttaaatccgaaaaggcattgaaagataattgcttgcctggatggattggcaaggaacactcaacagaaacaaacgcattgcatagccgttttggtgtatcgcttgatcggattgtgaaaaaccgatataatgaaaaactgtataagattgttgataccatcgaacttatagtgtgtctggaagggtatgagaaagatggtaaaaatctttccagggcgcgttgtccgattctgcgtgaatctgtagcatcaatgcgcgttaaacgcagcaatatgaaaaaacgtgttgatcaggcatgggaaatctttaaatcactaaacccgttactggcttcacttgttgaacatagcgattcttattcaattcgtccgatttacaacaacgaaaagaatctcagtgagtttaagaaattaatacggtggaaataatggtcaaaattcttgacgaagtacaacagaaagctatctataatggatggttgacgggggcaagtaaaacagcactggcccaacagttcaacgtaagcgcccgaaccattgggcgcgttatcaaccgcaagttagcggaattccctaagaaaagggatgtaaaacaaaagcctaaagtatcagacactgtaccgcgtatgatcggatctgaatcgttcattacggttgtatacgaagggcgcgttttcatggcgggtgaaacacatccgaactttaagaaagcgcatgaaatgctgaaagctggtgatgtcaaaggtgctgtaacttgtttggatactcaagaagcgatccgaacctatagcaaaggcaacattaaaatcattggtcatcagcttctatataaagatgtagtgtttgattctgatatcactcaacgaatcattcgcgaaatgtataacgatcgtccgtatgaacacctggtaaacttctttgaacggttgatgcgaaacccttcacgcgatgcggtataccagctttacgggttccttgtacataatgacattgaactgaccgatgatggttgttttcttgcctggaaacgtgtacgcgataactataaagatctcgctactggcaaatttgataatagtcctggtgtgactgtctccatgcctcgaaacatggtagacgaagataaaacgcgcacctgttctactggcctacacgttgcggctaaatcataccttccacactacgggggcggtgttggtagagtcattcaggtaaaggtggatcctgctgacgtggtagcgatcccagtggattacaataacgcaaagatgcgtgtatgccgttataaagtcatgattgatgttacatatggttttagccattactaactaaacaaccgcgcctggagagttctgggcgcataggagactatcatgaaatttaaaaacatgccttcggctaacgaaacccgcgctagtggtgaatctattctcaaaaccgcccgtgaaatgtgggccgacgaccgggtagaatccgggaaaggttacgtatttcgtaaaggatttggtgcattttatgttgcaaccacctttatagtagggtatagttgtttaggaatcgcgtggatgcaacgatatcttgaacgtgctgttctttttgtgatacgttttctgtttacattgatcagcgtagtgattagcatcccatttctgagcatcgccttgtttgttaacgtaaaaacaggcgaaattacaaaattaggcaaactggtatctaaaaaatatgaaaagaattctgacaagacttgacattcacaaatacgcaattaaaattggtgacatgaaacgcggaaccttcaagaaattcgaaggtgtggatctgaaagaaaacgggttttacctggtagttgatgataaaacagggcgcgtagtattccgtttctacgtagcaccaaatcaacgccgtaaaactggtgctagtcgtactctgttacgtatcaagcgccgcgaacacgaaccgtctgcgatggttgcgatgctggaaagtgcttctctgtactatgtagcacatgacaaaatcaaaaacctgttcggtttcccgaacctcaacggatcaacgttcgaaagtgctattcaaatgcgttatggtgctggtgaaaactacaccgagtggaaccgcgcactgaatgacatttatgattttgaattccagccgtattgatgtatactgattaaaactaaccaattgagataaattatgaaactgtttaataaaattcgttctgtagatgaaatcgtagcaactttcgacaaaaccctgtctgaactggaagcgcgtattgctcacgataatgagcaggttgcacaggttgcagcagatcgccaagcagcagaagaagaacatcagcgtaagctggcggaactggcttcaaaagaaagcgatcatactgcaagcgcaacccgtgccggacgtatcgcagacaagatccgcaaactgctggattgatacaggggcgaaagcccctaaatatttttctttaaggggcttatatgaataatttggtagcgaaacatgcatggattaaccgcgcttctactcaccgcgatcgcaagcgagcatttaaagaagcaaaacgtaaacagaaacacaaaggtaagtgtgatgaaaaccgctttgatcattcttgaagaaattcctgaaaatacaacgctttacaaagtcgaaactgacgatagcgaagtaattgagatcctcaaaaccgcccacgggcattatgtaaacggttccggcaacaccaaagaacaggattatgctgttgatgttgttaaccttatgctggggccgaataccgatgataacctgaaatgggcgcgtgaatccaacattcctgaaaagtatgttggtatgttctatcagtgtaacatcgatagcaaatcaccgtttgaaccagaaaagaaaatcgatctgattgttcgcactgggttcttcttatgagtatacaaattctgttcagtaaagaagatccattaggtacggaatcatcggttcagcgcttattctggcatacagattatataaaaaatcgatgtcgtggcccaaacaacacatggggaagcaacaacgatattgacaaagcaaaaatttatcctcgcggaaaggcgtactggaaaatttttgatattcatcttcataaaacaatgaaagattcgaatgaatgatgaaaaagcccttgacttcggtcaggggcttttgctatattagccatatcgaaacgagataccctttaaggagaaataccatgactaacgcaaccgtagttactaccacttacttcatttcttctggtcgtaaaaatgcaatgtacaccttgcgtgttgagcgtagaggtggcggttatacttctgataactatatctgcaacttatctaccgatccggagaaagcggaagcgaaagcgcgtgagtatttcgaccgtgtttcagcccgtttaactgaaactgatactttcaaaatgatattccagggctttgcagatttcgatctgttcgaacgtcgcggtaaactgtcagtcttcgatactgaaaaactggaactactggaaaaagggatcatgccgattggcaaacgtaaaggcgaagtaattgcagaaatgccaatgtttactgttctttggtgggctgaccagtctaaagaagacaacaaaaacagccctgtatttgacgccgtgtgcgcttactgcatgggtgttgcactggaaaaggattatatcgccaaacgcgaagaaatccgcgaacagtgggaacaagagcgccaggaacgcatttctaaagctaaccacatcggtgaaatcaaacaacgtctggaaatgaccggaaccgttgagaaagtgatttcactgggatatactcaagtttcttactacacttctgtagaaagattcatgaccaaaattaatgttgatggtaatgttgttgtttacttcggtaataacattgcaaacgaaggtgatgaaatcactttcaaagcaaccgttaaagagcacggagaatacaaagacgttaaacaaaccatcgttcaacgtgtaaaggttttataatgacatacgaagatatgcttaatgaagtgtgcgcgggtaaaaccgcgtaccgcactaccaatcctgatatgattgtgtttcgtgagggggatacaatcatcagacgtacacaccgcaagtgtgaagtaaaccaggtattcattgccacggtagaagaacaaaaggctactgattgggatatcgtcattgatgaagagaaccatgatgagctagatcatccgatattcattttgagtgaaactatcggaattcgaccattcatgcatagaaatttttgggggaatccatgacgttcgatgaggctatgagagccgctaagagaggttgtaaggttgcgccaataggtaggccattcttcgtgtattatcacgacagcgctggatacaggagggttacgttgggggtttcggcaaggaatgaagattatgttccggatccgtgggacaaattgaaagtttgggatatttacgagaaaaatagcccggtgatgaacttctttaaagcaatcaaacgggctattggaagatcacacaatttaacaccagcattacgttaatcacctcgctcgacctaaaatacgcgcggcctgtccacatatgatgtttatcttcatatctggtatatcaggccgctttgcataccattccatcaaaaccgatccagaatagtagttatcaagattgaaataagggcaactaaaagtataagctactggcacaaaatcacgtgtcggtaggtaggaacttgctgtagttgatgaatagtacaagccatttatatgattcgtgtattcttcggatgttttatcgatcggataaccgccgaggtttttaggatcgatttgggatggtaattttccctgatattctacaatgtcaacaaaatagtttatgttctttggtctgaatgccagtaccgccgaaaaatccgcgttggaagtaagatgaactatgctcaactgttccaacgcggattgattaaacttttctgttctttccatttcgatagcccttgtatcgactacaagggcaccttttatcatcgggaatatatcagtccatttgtaccaagttactaccataagaaacataaccattattagaattatttttatcagcaattgtttccatgttttcacacccatcacaaacgatattacccgatcaaataaggctagtttatctacgggatttctctcagccattttataagactcttcttaggttactataggtatatttaggatgcaacaaaaaggctaccatataggtagccttttaatatatttaatagtatgaggtgagtttgttggtttatctatcaaacatattctaataaagcaccgaactgattatccattctagctccaaaatacccattgagacctccagcatcttcacacctatatcttctccaaccatcactcatagtagttccgctgaaataaacatcatactggtctccacctgctgcattaaatatagacactttaactcgcctatcttgaccattccaaatagaaaggcaataagggtcgcctttgatatttgtaatagctactagtgaacccacatctccgccagggaacgcattcagcgtcggttggttagccgagtctcctatgtttactgctaaccctcttttaaagaatcctctatatctagatggatcgccagaagaaccttgcgcatagttaattctgaaaattaaatggaatacgctttgtccaatcatattagacatccaaaacggtgtccctattcttaatttggccccagcttgagccatccacgactcaccagtttcagcctttgctgaacttccgacccacggccctgttactgccatagttatttctcctaaaagatggggccgaagccccatgcattatttagatttaagttcttcaatttctgctttaagatttttaacttcggcagaaagctctttaacagattcaacaagaagtgcaattactgagttataattcagacgaagcataccgccatcttcttcattatcttgagtaactgcttccggtaagatttcttgaacttcctgagcaatcaacccagcagaacgagtagtaccgccagaagtgttatgaagttcataagtattaccagataatgtttcaaccttttctaaagcattttcaataactttgatatccgatttggctctacggtcagaacgaatctcaacgttatcaaaagaaccgttacgagtacagaagaagtcaccgccggccctgaaatagaaattgtcatctcgaccatatccgttaacattaagaatagcctggtgataatttcctacatattcttggaagtataaggaaacataagcaccattactaaatctacttgttaggccagcggtatttaaatacgcgccacttccgccgccagggtaattagtagtactattaacaccattaaagttactaatagcacctgggaattgacaagatcctgattcccaaaagttccaagtagggccacttccacccttagcacgaatagtcacgttacctgggtcatctacatataaaagacctttttctgtaccatctgctttacggaagaacagatgactatttccatcattcatgacattaatagaagttttggctgtaagctcattagagaagttagctttaccaacaacatcaatagttccaccgagcacagttccgccgccatcaacctcaagtccccaggttttgagtcgagttccagtgatatctacgtttcctgatacagtcaagtcgccgttaacagcaccaccagtacaagttaatgtaccgttggcgttaatattgccgttaatcgtgatactaccgtttgcatcaatacgggtttcgtttgtgctggatgcatcaccttgcggtcgcagatagattgattgacctgctttagcagaaataatcaaatcaccgccgttattagcacgaattttagcgccttgttcatactcgatcgcagtatcaccaccacttccagaggtagcagttactttgatcctgttgttggtttgagttgggccaccaggacgcaattcaacagcattaccaccaccagaactaccaataatcacacgaccatcagtagtttctaacagagcactacctttgccaatcacaacacctttatcatcgtatttcgtggaagaagcaccacctaaccctaagttaccacctacgcgagcgttgttagcaacaatcagatcatttccgctgttcaggtttcctgtagtcgtggtaacagatttaaatgatacatcatcatcgtttccgctaacgacgttcattctccacggtgtccaggttttagtagtaccgctaacatttaaccaacgttcccaactgagtttactatcagatgtgcgtaatacttgacggttagtgtaatcgatatcgtttattttgcggagacattcaacaataacaataaagttaccaccgacgccagaaggtttattggtgatgttattaccgccacccatactagggcatgaataaactttaacatggcctggggtagcgccagttagcgttaaatcattaagatctagtttaacatcagccaaatcatacgctgcgacagggccagcaaatccaccagtcgaattaaccacaccagcaacgttaatatcacgaccaaagttaacaatccatctgtttactgtatccgaagtcaacagccatgcgttgtttgtctggttttctgcttcaccgtaacgaatatcaccgtttacatcaatacccaaacgtttcatgttcattccggaaagtttgaatccgatagacaagttcgagtcagtcgatctattcagtaacagcggagtgtgctgcgaaccactaatagtaacggtttgttcggttgtggttgaacttgtgttattaaagttcgcatactgagtgttgatacttttaccgttgaaagcaccgctggtgatatttacatcacctggtgatgtaaatgtaccgtcagatttaaatttgaactcgccgcctgtgaccccagcagtcgttctagcacgaattcgaacctcacccgaagactcggtgttaggtattgcccatacagcacctgtctcaactcctttgtttctaaaccaaattacagagtttccggtatcattagtggcattcaaaaataacccaggtgactctttactgataagcaaatcaccagacattgtatcaccggcttttttaacctgagcgtcatttgtcagattaccaagccctacgtcggccttagacggtttatttgctgtaccgtaaagttcgttgtatttgacatctcctgcggcaagagccgcgttgttagccgcgtatacacgaactttagcactagcatagtcgatattaatggctgacatggtatcaccaacattcataaaaataccagagccatgactataaagaccattttgaacgctaacaccagatttagtaacaccacgccagaaagtaccgccgtatgattttaagcgggtcaacatatccgcattagagataatggcgcttatgtatttaccaccattaccgcctaagccataagcgccattttctaaaacattaccagcaccttcgccgacatcacgggttgcagcagtacccaaccctaagtttgtacgagcagcatccgctgtacttgcacctgtaccacctttagcaatagacagaataccatcagtaccattgtcaaggttaggtttattaatttcgtcatagatacgaatagccacactctcaactaaaccttcgggcgcagttgaagtagtcgtgtaaccagtaggcagataatactcagtataaccagcgatagacagcagagcaactttaacaccaccaataaacgcgcgttgagtaaaccacagttctaaaccctcagaggtacgaaccagactataacgcatttggttagtgttatcaattccaggatcgccgattcgacgaatttgcagataagaactaatgtttgcgcttgttaatgttgcgggaatgcttctagcgctacaatcgataaagtcaatagaactgtgcgtattgccatagttaccaccattagtcaccattaattgcagacgactctggcttgatccagggtcttttaaaagagcaactttaatccaacgagtttcgttgcctgtagttacagggaaattatcttgctcaagctgacgtgcgttttcaaccagaccgatccccaattcggttaaagtcggtttacgaccgtcccagtatacaggttttgcttgaaacagcaattcaccgccatcagtgatcgttaattgatttgtcgcaccgccagcagtgttacgcatatagatatcagcaccgccagcaccgaaatatgctttgttttttgaaataaaagcagaaccaccaccgcccatagcttcatcaatatagatgttacctggtacgcgagtgttaccaccggaatcaataagtttcagagtacggcgaacagtatcaccagaaccacgggaaacgaaacggatctcttcatcaccgtcatcaattgtaccgatttctaaaaagcctttattgctctcaccaccagaaccgatgtaccaaccatcattaagcgcgtttttaccagtgatatgacgaaccatacccccgctcaaatccgcgttggtgaaagtaatagttttaccttccgctacggtaacggtatcattaagagcactaggcccatttactgttaattttttggtatttgtttctgggatacctttacccgctaactgaacgatcgaagaaccatttttcgtgtaaatggcataatcagccatgttgatcgccagttcaccatctgcaagctgacttgtagtaggtgttttccccgcaactgtgctacgtaggaattgaatttttgctaaatcagccatgtttcaccttaataagatccaaaatctatgatagtccctttagtaattacctggtcgagccgtggtacgtgttcgggacgggaagccgcgcctgtgctcgcgaattgcggggcagttaatagccctgtcatagtatcgccagcgcgtaataccctgctattagcatttgttgtgacattatttatctgtccatcaacataactttttcgtgttgcatgacttgcgtcagtagggttagcggttgtaatactgatttgtttttcaaccgtgatattacccttcgtgtttacatcaccatttcgagcgttgatgactaatacgcgaccattagtaccggaagatgaacgaataccaataccataccatgatacaagatctatgttggcttttgataatgtcgcaccatcaccatcaccagaatataaaccgttctggtcacttccgcctgtgaaagtagcgttaatttgtagcccctgtttaaaggcaactacacccaaatattgaccgccgcttgctttagaaacgaagtcgttatttgatgcttgcggtttatcgttttcagtataaaccttatatccgcgataggttagagtattaccaaccggaaccagcggaaatgtgccggagtgccaaataggtaaacccccgactgtagaaccagcttttaaatctgccataataacccctttttacatatttataaggcccgatgttccgggcctttgtttatgcatcaacttcacggaattcggaagcagaataatcaccacctggataaaccttagtattcggcaattcaaatatatacggtgttccaccatcgatcatgttgttcattctgataccgttaaccccaaactgtgcagcaaagttttgatcagcttcggcagcagatacctgaaccatcacaaagttacggatcgcagataaactatccgtagcgggtttaggataacgagatacagcaacgttaaatccatcacaaccactagggatcgtatagaattgttcaaatcgtaaccactcatcaggtttatttgcaggaacttcaatcaccgatgatgaagtttgagcagtacccgtaaaccatcgaacagtaacccttgttgttgatccagcatccaataatgctttgctggcgtaaaaatcaccagcaatcatcatagctaatccaggagccataccataatcagccagtttagagatcactgggcttgcaacaggatatactttatattcagatccattggttgaattgtattcttccgtatcttcaacagatcggaaaggtacaccagttcgcccaacatcaccaacgttatcatagacaagatcgattgatgcgcgtgaatcttcttttaaaactccatcgttcgcgtaaaacgattcaatcagtatacgagattttgaagccccatacaatgcaacatatgcagaatttgggaatctctgagcgaaatcagcgccttgccacataacggatctgtttttagcaaaccaatcatcaacgatttggcttgttttgtattcaccgttagtcattatcaaatacagcccagaaggttgagcatccatatattcaacaaacgctttgtttgcagttgctgaattatcattcgataatgtgaaggttttaattggatcaactacagcattgttaattctccatacgttgatcccaacactaggcggtgtccctaccgccttttgatttagtgtaaactcatactgattaggaaccgcattgggatgtgttgcctttgcggttattctgtaagttacgctgtttgtttccgatagaatttgcgtttctacaaaatcggggccgaaccccgccattaagtttgacattatgccacccactcaaatttaactgtctgagtaaccggatctgggtaaatcttaacattaccaactttgatccaatcggtaacagtcatgtttttaaccgtagtaccaacagcagacgttgcaccaatctcaccagcagtaggcgggttgttgctggtatacatgcggccccactcatcaaatttacccgtgatcgggttcatttgacggatccagaaggattgcgccagcgcattaacaccagtaccagaggtcggacgaggtgcccaaatctgataagtgaatgcagttccgttaccaaactgcgttaaagtacccggtgctttaacataggtataacgggtcacaatcatgatttctggattaatcggatctggttcaagaaccggaaccgcataaccaggaagcaagttgtattgtgccgatgctgtgatctcagccgtccagttgcccctggatgcttctgttactgcatccagcgttgaccaagccgcttgacctgcaatgataattgaactgttgcttaccgtcaagcgcccagacatcgtatcacctgctttacgtacatacgtagggttaagcaaggtttgcgcgttcttctcagtaaagactttataagagttcgcagattcttccgctacgatgttgccagcatcagaggtcaggatcttagttgtcttgttgttcgtacccatagatagaacagaaccagcagcagtgatcacggtatcattacccagagtcactttgctaatcgcctgaatttcaggagcctggaatttaacgttagctacaacgccgcgagtatcattatacacagaaagatgaactgtgctagtgttacccgttgagatcattgcaatacgcccagaggctgaacttgcttgaattgaccagtcgttagatgaaccaccattcaaacgaagtttacccatcgatgagccatcaccaacgttcagatctccactaacattcattacccggaaactcgcgtcggcggttgagttaatgttagcctgtacagtggttgctttcgttagagtcaatgccccgttaaccgtctgattaacatcacgacgaatgaactgggaagaatccaggttatccagtttatcagcatcaaccgctttagccccgatcggcagataatgtttcagcgtcaggttcaattcataaggagaaacagcaacacctacagcggcataaccatcatccggaagagtagaaccagccacatcattaccagaccaagtaccaagccccttagacagtttcacagtaccgcgtaccagatcggtagcttgccatgaagtatcaacctgaattgtatttttcaagttcttaggagaaacagccttgtttgtgacggtgccagcggtagtttcagcagccgtagccacctgaatgataccttctgcgctctcagtcgctttcttagcgtgtaacttcttaggggtgacaaatactgtatctaatgtccctgcgttcgtctcagactgcgtagcaacgcgtaaagtaccacgttgagtttcagttgctgattgaataccgatgttaaccgtagtccagatagtaccagattgagttaacccgtcagcagtagcaacggtaatatgacttgtattgtccagataacctttcagtttagacggtacgatcgctttattcgttacagtacctgctgatacttcggcagtggttgcaattgcaatgatacctgtcagcgtttccgttgcagcacgatcgttaagcgttttaggcgttaccgctcgcgtgtaatcagtaccagcgtttgtttctgcctgagttgcaatctcgatcaaaccaatacgaccatcagtagaggttttcttgtgcagcatttccggagtaactacggtcggaatgtttgcacttgcaacagtaccattaataacttcggtttcagaagccagccatacaacaccagattgtaactgagtcgctttatactcacgaagagttttaggcgttaccgctttctgataatctgaatggtcataaaccccagtaccagcctgagaacgatccgtgttggtgttaggagcaccaccagtagcaacaagggcaagtataccagttaaggtcggcgatgcaatacggttatgcaactttttcggggttacaatcgtaatatcatcggtgcttccgtttgtttctgcctgagttgcgatttctgccaatccacgacgggtttcagtcgctgttctttcgttcagcttcttaggggtaacaatcacatcatccagataggtatcggttgaaagtttgttaacctcagcagttgttgctaaccgtgcaataccacgacgggtttctgtagcagttttatttgctaacgtcattggagtaatagcagtttcgtcgttcgggttgtcttccaagtttttgtttacttctgcctgtgcagccagagcaataacaccagtacgcgatctgttagttgcgtcaacacgttcaacgatcggacgataattagcaacaacccattctttcgtagctttcatgtaagaaaactcgatatacgggaggtaatcactagcagcattaaatgctaatgaagttacactaaaccaatcatcaggcggatagtctttgcgctgcgggaactgcatcatatttttgttggtgcggatcttgtccgttgtaccatctttaactttgattgtgcagttctggtttttacccatcatataaagggatacgtaaacgcgatcaccatcagcaacatcagttggaagggtaactgtaacgtttggtatagtcccagaagggtttgcagtaacaaaaacgtaatcgttaggaactgcgtttaaatcactatagatacgacgcagacgaacacggttatcagcatcatatactttccattggctattctgtgcatcaaagatgaacataccaaagccggatttctggttagttacagaagtaacaccagtaattgcgccgtcagaaatagtgtgtccactacctggataaatctgcaaaacggctacgttgatagagttcattttatcagcgtcataggttgtgatcacatcaccatcatttgcatatttcggcaactggagagtgattttacctgtagcactgttacggaaaactgtcatgccagattgtaactggaatgaacctgttccggttgcgttcacgatctcagaatcgcggttatccagagtttcagcaacacgccatacgttaccgttatagataaacgttgcgatcatgtacgggtgggtcagtcgatactgtgctgattgtacagtacgtaaacggatctgacgggtgttagacttaacaaggatactgttcacacctactaaaccaccgcaatctttaaacgtgattacgtcgccctctgtcgggttgtccggcagcaggtacagaagttcagtaaagcgtccatcagccataatgtaactaccagattcaataatgctaccgtctggagtggttacgttactataaacccatttcgggtcattacgagttgcgatccatttggattcgtcgaaagccccagcaggggaagcaatattctgttttgcgtaccagatacgacgcgcataaatgatcgccatgtcttgagaataaccacgagtcgggtcatactgctggattccgttaaattcattgaaaaagtcaacgttaacgccgtcactcagcgtattacgatcagccttcccaacgttgataactttttcaccagcagcatcaaggccacttcgtgcgcggaatgatttagctaccattatcttttttcctatattgtattcaataccaatatttatatacaaaaaatggcccgaaggccatttaactgattatttattacttccgaaccatctttttatatttcttgattgtttcgtctgtaatctggtttcgtttatatagaggggttacaccgaacgcctcaacaccacgttcattaaggatcgttgctacgatttcctgtctgataaaccagcgcttaaccttttccggaaactgttcattgatacttttaaacagtttggcttcccaactatccagcgtttcagggtggataatatgatcaaacccttccagaaaatcaatcgttgttgcgtgaatagcgtttgctactttgcgaatgtattctttattcatgcttcacccaaatactctttcaattgcatataaccgccaataaaattaccatctacaaagatccgagggtaagtaaatgccatgcttcgactacgaacacgtttcgctaactcttcaatgcggggtcgatcgtaatcaaaccccacactgttatttgctggctttagaacagaataaaattcgtattctaatccatgctcatcaagtaatttccgagcttcaatacagccgtaacatttatgaagcgattcgggaataccgtaaatctcgattttcatcaattgctttccttcgtgccggagtgattttgctaatgatatctttctttgtatcagaaagcatacgctcaatcaattccaccgcttcaagttgttgatgcagagaaagaaggttgatgatttcctttttctgttcatcaatagcagcttccttgtcaatcgcgtacagcttattatcaccgaaaacatgctgtaatgcaaattcaagtgcctgtgaatcagtcggcgctggtagtacagaaatcgaagtgatccgcttgacaaaaggataatcaaatcgcagatcattgatatcttgttgaacaggttttacagtcatccacattttaggatcggaagatacgaaatttaaatcaggcgcggcgatttcttctttagtagcaatcttcggttcttcttccggtaaatcatatggtttgaagtatttccagatatggctagggatctcgtattcgaaatcatcttgcagaacataagcaatgtcctcagtatccccaatcgcaatacgatcgattgtaatatagccgttgtttttgatcaattcagctaaagcatttcgccaggttttttctgcaaattctttagcgtcgatgttcagggtataagatttaccttctaataattccatgtgtcacctcataaaaaagggtgccggagcacccagtttaatttacttgcttacttctgctacttttcgagcagctttgcgaaccaggtcggaagcagtacgcagattttgaagcgcgtcatcatgggctttaaccgcttcttcaagctgtgtcattgcttttgcgatttcttctttcttagccgcttcgtctacattgatagcgatagcgctattaccggaaacgctaacaggttcatcaacaattcctgtcgccagttcacggaagaacgaacgttcagaatcaagcagatagtaaccaacttttccggtctgggaatcaatggtttctaccgttttgctcaattgatgatgaccgagcgaagtcgtatggtaaacggtgtatacaccattactgtgttcatcggtatatgatttgatcccgtggttagcgccacaacgatttttaaattgctgcggtttaaccagaacatacgaacggccttcaacaaatttagtaggatccagttcaaccgacattgccgaaccaccatcaagcatttgatcaagatctgcggttgctggtgcaacaggcgcaaccggagccgtaacgttggcttttttcgggttggctttctttttcttagctggagccgcgccaacttcgacgaaataacgagcttcccacgaacgcagagagctaaaagtcatttccggagtatgctcaattttgaaagtatctgaattggttttcgagataatttttacctcgttattcaggaatttttcgatctgtgtcgcctggatagtgtttgcggtgttagatccaccgtgtgaattggtagtaaacccttcacggtcaaccagtttgtaagttttaccaaccacgaacgttttcagttcatttgcttgaactgtccacggacaagaaccgcgccctgtattacggatggttttcaggggaatgttccacttccagcagtagttacgcgcttctttacgggttttgaaattcaggatcatgatattatctctcaattaaagttaatcgtcatttacgatgtggtaagattaccatagttacacattaggtcaagaaatatttttaatttctatcgattttttagcgaattcgatcatacgttgattatctgaaccgcgaaacggctttttagttggtaaatctttttcatacttaccatcaatcagaacatcaatgtaaggaagtagcttagaacgttctgggtcggcctgtaaagcctccagggtatatcctgtccataaccatacgtttttctttggaagttccttagaaacgcgctcaagcagttttaggatagtaggatagttgtcacggtaaagcggatcgccgccagttaatgtaagtccatcaacatgcggattactcaacagagaaatcagatggttttctgtctcttccgtgtacggtgttccgttgcaagggttccatgaactgcgattatagcacccatcacacttatgattgcatccagccacaaacaaaacaacacggatcccttttccgttgaccacatccatgttataaattctaatataattcattcaaatctccatgtatagcctttataactttttatttcaccgcgacagcaagaatgaacctttcttcacgaggatcagttctttgatccgttcaacaataacgatgtattcccatttagctaacttttgggtatcacaccacttttgaaactctttcatagcctctaagtgacctttactccagtacatttctgcaatttcgttgcaaagagtttcagtagcagtgtttttgattttcataacatcctccttagttgacaagaaggatgttactacattcagatatacaggtcaatacttttatggataatattgaatgaaaaatgaaggatgcccttcgtagttcacatcaacagcaccaattttaactattgcatcgcgacgggtagcctcttcgacaatctgatcggttaggcttacaatctcacctgatacccaatgcaatttatgttccggatctgtagccccacagaaaaacagttcaatttcgttagcttccagttcacagcgtagatagttcaaattacgtgaatttgttttgttgaaaatcataatattgcctcaaagttaaattatcgtatatcatcccgaatcgaatcaagaacaatgtaatctatcccattcactcgtttaccactgggtttacgatagcgaatgttacggcctttcatatcagttgcttttgaaatgtagaatgactttgtttcacgtagccattcactccattcctgatatgaattcccgacatttcgacgcactttagcgtataacggaaacatcacaaagcctttaatttagcaagggtggatttatggatttcagcctgtttttctgaatttttcagattgcgttcagcttcccggatcaggtaattccggcgagagcgcaacaagttgagaacatctttcgctttacgggcgcgtttaccgaacagatgacaagtaccgagattatcaagcatgttcaggagatcatagatttcctttgcttcatcttcttttggtaataacggtttctctttaacaacaacgtgttttttgaataattcacgatcgctattagtgaaaatgtaagattctgattcaaactttgtatcaaagtaatcagtaaaccctttaacaccgaatacgtcatactcagtaactttaatagggaatactaccttagacaaatcattagctgaaaacgaaccaccacgaatagctaagtttcggtatgcagtcccaaagcacgtttcatcacgaaaaacaaatttatcttttgtccaatacattataaattcctcattttgcgccgctaatgagaacatctttcatttgttttgcggtgcggatagtagttgccagttctaaagagacatcattacgatatgctgtaccgtcttcacacagaaccaaaccaggacggcccttgatagggttgatgacttcaacgcgagttgggtgattttcaactttgtagcctaatgcaaacgcacatgccactacatcggtcattttcttagtcagtttcatagtatgtctccttttcgataggcccaatataacaaaagccctcaaccgaagtcaagggctttttgattaattttgatgcttagtgcgatgcatcatttctttgttcttaccttcgttgaacccacggacagcgggagcacccaaatagccgcatgtacggcgcgtgacgctcattttttccggatcatggttcccacaatgggtacaataaaacccgtcttctgttggcttaaattcatcatcagagccacattcaaagcatttatcgaccggaaggttagttccgaagtagtccagtttatccattgcataatcccagactttttcaagggcttccaggttgtttttcatatcagggaattctacatagctgatatgtccagcagttgcaatgtaatgataatcggcttcatagtcgattttctcgaacggtgttaccttgcggtcaacgtccagatgaaaactgttagtgtaccagcctttatctgtgatccctttgatacttccgaatttctcatagtccagtttgcagaaacgatgacatagagattcagcaggggttgaatacagactaaacccaaatccggttttctttttccatgcttcggtcgcagcgcgtagatattccagaatcagtctacccatgttctgagaaccgatccggtcgaatgggtgttgtccagatccgaaaagcatcagagtttcatgcaatccgatgtatcccagactgatagaactgcgtccatttttgaacagttccagaatttcatcatcggggttcaaccttacaccaaacgcaccttctgtataaaggatcggggctacactggctttaacaccgcgtaggctatcgatacgagtcatcagggcttcaaagcacagttccagacgttcatcaaggatacgccaaaatgcatcatgcgcgtcttcatcttcctgtgcttcggcttcaatcgcaatacgaggaaggttgattgtcacaacgcccaggttattacgtccatcaagaatttcattaccgtgctcatcattccacacgctaaggaaactacgacaacccataggagatacaggaatgctagagccagtaatacgacggttattagccgcgctaataatatccggatacatacgctttgaagaacattccagggccaatttcttaatatcatagtttctgtcttccggattaaggttaatccctttttccataaacataaccagttttgggaatacaggagtaatgccttttttacccagtccacgaatacggtttttcagaattgctttctggatcatgcgttcgcgccaaccagtacccataccgaaagtgatcgtgacaaaaggcgtctgtccatttgcagtatgtaaggtgtttacttcatattcgtatgactggaacgcatcgaatacatccttttctgtttttgaaatagcataatcttttactaatgctacttgatatttgcgagcatcacgtacatgtttagcgaatgtcttctccacataaggagccaatactaaatcgacgttagcaaaggtagttccgccgtactggtgagaagcaatctgtgcggtgatctgtgccatgagagccgtcgcaacaccgattgatttcgggggttcgatgtctgcgttacccatcttgaagccattagccagcatacctttcaaatccaccagacagcagtttgtgtatggcgtgaacgggctgtaatccagatcgtgataatgaatatcaccggaatcatgcgccgcaacaatatgtttcggtagaatatggttacgcgccatatgtttagaaacgataccagccagaagatcgcgtttagtcgggaatacgcgagaatctttgtttgcgttttcgttggttaattctttgttactaagagtcatcaaacccttgatatcacggaataattttccgttttgttcacgggcgatatcacgatcatgacgatattcgatatatgcacgggcaacagtcggatttgtcttcattaaagattcttcaacaagttcttgaatttgtgaaatcttcattgctttaccgttgcggatctgactacgcaacacaagcataatcgcactgtcttcatccgtcatcgtaccgccagctttatacacagcattacgaattttttctttatcgaaatcgacgattgttccgtcgcgtttttctactttcatttggttgcctttagataggatatgtattgttcaagccacagaataacagattctttcgaatcatgcaatacagcaagatctggaacaagaccacgaaaactgttttctgttatcttagaaacagattcaacacgacaagattcaacatagttaatagttgataaccgtttcttataaagagtcctggattcaggaaccattttcttatagatcccttttttacatagagaagtagcagcacctcgtttcaatccattagctctttcacattcagacacagacgagaatttattacctttatcatcttcgatgacatagttctttcttctgacttctggcaataatgtccaatcacccacactatcagtagaacctttcaacaaatttgtcaagtgtcccgattctatattatgctgtcgcgcaaattcattttgattaacaacttcaacaacttcatcagttttcgtattataaagtttatatttgctaacaatacagacaacagacaacttttctaatctacttcttccgaactgccaaccttgctgtaaatgtgattctacttcatcagggttaacatatttcgttttactaccaactcgatacattacgggccatgatgtgtgttcattgcctttatcgaaagacatgtacctttcgatgtcttcataagtcaaatcatcaaaacagttaggattaaaatgaccgccgatttgcttgttcaaccactcaggatttcggagaacatcgttagagaattgcatttcagcctctgctaacaaagttttaccccatgaatcataccaaccaacaatcaaataatctttaggttgtattccattggaaatcatatcattaacttctttcgatgatgatgtatacgttttccagtccgattcttcaaaaccctttcgggggccgcgcttaaacgaagatggaggaacttttatacgtttccatatctttttagcccccacgtattttttaccattttcaaatgtaattacgtagacaaatcctatgtaattattaatgtcaacttctcttaacgttttccaatgcccgtaatcctgcataataacctctcttttcgtgtcattatttattacagggtgcgaacgtactcacgcagttggtcaaagccgccgatgtgcttaccatcgtggaaaatttgaggcatggtcagtctacgagtacccaacaggctttcgagttcagaaatgaccgtttcattcaggatcggtttgccgtctgcgtctttttcatcggctacagaaacaaactcatattcttttcgttttgcgtccaggagacgtttagaattcaggcatggagcgcaattgtaaacagaagggatataaccaaaaatcttaaacatatgttaccttacattaagtcatccagtgtttcagggtatgtatttacgtcgcgtttctggtagttgcacacgtagacttcttgcgttttattttgttcgtaagaatcagtatgctggcctaacagatactttttatcgaggttatgcacattatatttttgcatccactcgatcaggatatcattttgctttcctgcatgatgtgtcacgtttgataaaccaaacttgataccccgctcatgcagggagtcaaggaaagcatataactcgcgttcgtgatctgcgttccagaatttgttatacaccgcatcagtgatcagatacggaggatcgcaataaacaaaatcgttatcgttgatttcaatatcagagtatgaaccagaacgaaattcaattcctgtcacattctttttgaaatgttcgaaacgtttttctgtcataaagttgagggttcgttttcctacagcagcgttaaaatcgcctttgtcgtttgtccggttaacgttgctgaatgaatgcaggatcaggacatagagccataaaggatctttgttctggttgtattcatcacggaatttcagatactcttctttattgtctttccccagccccttcgatgcaatcaattctcgcaccggagacaggtcaggaagcgttttaagacgctcatacatatcaatcagcgtcttatcataatcgttgcttagaacgggtttagggacgtttagcgacacactaaggccaccgcaaaaacaatcaatgaaacgcatgtatgaacttctttcggggaacagcttgaatagttcaggtaatagcgattgcttgtttcctgtgtatgggatcacaccataataactcataattcacaaagccctttttcaaattttgcaatggtatcgtacttgtaaccacgattcactataaagcattgagtttcacccaatttattgatcatgtcaatagctttctgttcgtctttcttacctcttaattgtaaggcaattcttacgatctcttttagtgtttcgtcgttgacttcttccagtttaaaggaatacccagcgattttagcaaaaagccccttgcgagctacaaggggaatgttgtcatagaaaatcacggttcctttgtcgtttttgcggatactaaatcccggcacggttcctaatttcctctaaagtgtcacgggcagtaatctttccgttgacatagtatgtgatcatagcatctttccagccttccggcactttctgttccagagtatcaatggttttaaagttaacaccatcagtgatagtcatcaacaacccttttttactctttttccattcagcgccttttggacatttatacacaccagtccacacaccgttaattttgattgcgcacattttcatcgcatatttttgagtgtcgcgggtaacttcttgaagcaatccgccgcccataccaaacgcgatgttttcagacgcccaacggttagactccatccagttcaacacccgattgattgtttcagggccatgaatttcatcaccttgaatgatccttactgctggatgtagtactttatacccttttgagttcactgtatagccaaagatacggcccagttcttcaagagcgtacatgatattgtctaccatatcaccagaatccggacgaactaccagagtaccgcccttagaaagaatcgaatctttatattctgcgatacggcgaaccgccgctttaaaatcccaggaatcatacacacatgcatacatcccttctccgaagatctcaatactgtttttgtacgcaaggtcttcgttttctttgccgtaagaaacggtagtggaatgttcgcgagcaggaattgaaataccagccgccatttcaccatcatcaaacgctttctgacaatcttcaaacagagagatagccataatcagcgcttctacggtatcagtaccgaggaagttatacaggtgcgcgaggccaccaataccagcagattcagcagaagaggttccacgtgcgccgaagtcatgcaaacgggtacgtaataccatatcaaatgcttcaccttcgagatcggaggttttcttgagatatttcttcaacacttttttacattcgcgggatagagttgctacggttgaagggaaccatactcccctgatcgccagggtttctacgtgtcctgctaaccacagcgcatttttcccagcatggaaagttgcaaccggatttttaaccgctactggggttccttccggaatcgctctgaattcaagagggatgtaacccagttctgcaatttctttccaacctttgtagttgaagatttcgcgcccaaagtgcattttgtacaaccgattagcaaaatccacgttttccatagtcaccggacgtgataggatttgcgcaaggcggttacagccagccgtaactacttgatcaaatttaccaccacgagattcaatataaaacagcgcctcttcggagccagttggatattgcgaccagtgagaaaccttataggaatctacggaagtgatgatgctgttcagttcttcgaaagttttgttgttcataaacgtactccacgttttaggtttattttaaaatacccgatccagtcgttcgggatggattgtattgtgatatttagacttacaatccttactggtttttctgccattcgaacagaaaactttgtgatacgttgtctttgtgtgtttttctttgcacacagggcaaacaatcacagaacctattttagcagccttagccacttcatacaagttctttacatcaatttgtctttcttttgtgataacccgaccacggaattcagcaacaacagtttcatcacgtacagaaccatcactatactgaactttttgtttactactttttcgtttggatcctgatatttgagaggaacccgataaaagtttacggagttctaaacggtctttataagcaccacgattaacgcagaaatattcaccgtcttcttcgtcatcaaaatcagcccaatcttctaaagcctcagcttcatcgctcatagtggttccttagaaataatctttgttgctcaacaggtaaacccggttatcgttgtagtcaatgtaagcatcccaccaaccagcacaatcaacaccatcaacttccaacgcctggataagaacgctacccgctacgttgtcgtattcgtacattgcatgtaattcatccagcattgcttcaacattggcccgtaagcctttaccgttgttagcaacaccttttgcttccaggcaatatccagcataagttgctttcattacgatttccatgatgtttatccttctgagttagtgtcttgtctacgggagttagaatactactataaccaacccccgtcaacacctttttaccaactaatgtaaaaagtgaattcacttacacggcgatctgttttcctttcaggaatgttgaaaccgaaaacttcgcgttcttcctggtttcgatacgtttgattgtacttactagccagagaatttgtgatcttagcggcgttgcgtttttcttctgtatcgaattttagcccttcttcttccaaccattcagaaactcgttggaatgcatagcgagtacattcaatacccagacaagagccgatatcgtgcttcatatcatagataaggttttgttgagtcgcgtgtttcagaacaccttttgtgattgtatcccgcgcatgttcgatcatcttagcattctgatcgttgataatttctcttgctcgttctgcgagagtgggggatcggccttctaccggagtttcgccgtcagtaccgatactacgtacatgaatcatattttcacctattgcgttattaacagcccatctttcgtatgtttcacgaagtaagggcgcatgttcaattaccataaaaaatccaacgttgggggtttgatattgatccctaacgtatcacacacatcgttcaatacactttctttgaagagattgaaacatggaaccttgtacaacctagccaatcttacagcgatcgcggttccccctttaacacatccttcacgttcttccgcccaaaataaaacaaaatcagttggattgtcaagattttcacgaagaacttgaatcgtgtttcgtgcataccttctttgaacgtattcattctgtgtatcgaagttacctgctacctttctggcttcgtcagcggctttctgtgtgtttaaatcttgaaagtcgatgatatcctttccgtttgaaaaaaggccgttaaacccgttctcaggaaggattatacacctgttatccggactatagtcaaacagaaagtgactatccataccaggagcgccgccagaataagccctgatcccgcgttcgttcaaagcacgtccgattttaacagcaatgtttgcgatacgttcaggaggtttacgactgccaattaatgttactgtcttggcagttttaattactgtactaaaatcattcgacataaaaattaccgaacaattcttttgctttttcgttgtaaacttcataagccttttcagggttatcatatgaacctagaaaaatctgcttaccatcaacaactattcgcgcttgatagttatttcttcttttatcaaaaataacccctctttttccagaagcattgcttcgtttctttatctgctttcttatgttctcttgttgcgttgcctcttgcaaattatctataccatcaccaaattcaacaccattcttatggtcaacaagagcgggaagatacccattagcaacataaaagatgatccgatgtctgcgatattgtttcttttgaaactttataacacaatatccatctttcatagtaccagcggaatcaccaaccctcctaccttgacgcggagaagaccatacgatatttccagaagtaatatcaactgaaacgtattgaaggagttctcttattgcggctatttcatcagaaatacttctatagtttccgtgactgttcatagtttaaaattcatggttcaggattttgccccatacagggcgaatcatgttttgggcttcggttacaaacagctttttagccattgctgggtcttcgaactgttcgaggaaaggcccatgattacggctgatttcttcgatagcatcctgaaccgttaagcccataatgcgaccgaaatctttcgcagtgatcgaagccagatccagtttcgaaagaacgtttttcacacggttctctgtaaggtaacaaacaaactcatcgagttggtttttgtctttttctgacagtgaaaccggagcattaaagcgggttgctttcttcgctttcttctcagtgaatttagttgttttgcatttgattgcaacgcgttcaccgtttggcataaaagcaggtgaaacaggtttcattacaaagccttctgcaatgttgccctcttcaacgtccatgataggatatacgaattcaccatatactgtattatcgctaccaatgccgctatttgctttattcacaacagattcaaacgtgatcggcagttctttgatctcttcaaaagtaccatatcccaacagcggggccattttcaggccatgagatcgagagatcagcgagcacaggttatccggaaggaattcaccatttacacggatatcgaatacatagaaatctttttcgccgtaatcaacatctttctgtacaccgcgccccgcaaattcaccgtagacttgaataaccaaatcatcataagttccggtctttttgagggtttcccacatcttacggatccctggggaatactttgcaactactgctgaacagccataaaaatcttcggctggcttaacaacatcagtacgctttgcgggggtaacggtaataccgtcatcggtgataaaactaaagttagcaccgtggatcttttcacgtgcaacccacacaccgccagtaagcccgttcataattacaccattgatgaacttaccttcataatggttagtaagagaagaatatttcttaaacataatttaacctttcattttcacacgtttttcgacttgataaagtgctttacgcagcaacttcacttttacttcatccagaatgacatcacccttaacgaatgcatctagatttgatttttcagcattagcagcattgataaccgctattgtattttcttgtgtatatcccagacgtggattaatacgttccattgtacgggcatacgggctaccgggtttattgctaaacatcttgcctgaatactgacaacgttcagttgtcatcaatactttccaatcttccagagtaaggtcaaaagaatggttgttctttgcggcgtgttcatgcttgagattgtatgaacgcgcaatacgcagatccagttcaatagcagacgcacggcggcgatgctcaatgagttcggggctaagggccacaatctcaggttcttttgctttacgaaccgcttctacatcaggcgcggcttgatttggttttacgtttgaagtagcaatactagcccaacgatccatcgcagatttacgcatcagataatccccgcatcttgaaacgccagcgccatagaggtgttaagatgttcgcgtttaaacgggcgaggtttcttttctttcttcatcggacgtttagcacgttctaaattgtacacacgcttacgatggatttcgatcgcttcgcggcgcattgcatttttaacagggagatttgcagaacggaacgcgcggatacgttcaatttcctgtactacctggtaaatatcgccgttatctaacccatgttcacgggcaatttcggcataacctttacgcaaatcattgaatttgaaatgaatttgcactttttcggcttgagacagttcggaaatgctacggtgtacaattttcatattattttcctttggtagaatcgatttttgcaactacattcaacacgctatcgtttcggatgtcaacattttttagaacaaaagttactaccgtatacactccagcgctcatgttgaaattgtcaacaaacgggatctgctgatcatcaagagtattgaccatttcttccatgtcatttggatggtcaacgttgatgaaaacactttccgatacatgatttttgtatctggttccaattcgttcatcgagttttttacacattacatcaactaacatttgtttgtcaatgcctaaaacaccagagtagatcacatgatatagtttcatacaatatccttttccgattcattaacaattgcaaaggaaaggaatgtaaaagcaacccctaacccgaccatccagatagccgttaaatcaccatacattgatgaatacgcgcccatcacttctaagcgatatcccagcaagaaaacgagatacgccaacactttatcattcataattcctcacaaaacgcccatgctgcatggtaaacgctcgcgcctttgtcttcgttcatgcatacaacatcaaccggacacacaaccctgtacagaacaggatccccacctatagaacgtgcggcccttccagcatatatacgagctaacccgatatcagcggtaaagaaaacacggtctaaatttttctttctgcccttttcagacagagtatcagaatcacagggaggcaataacatgctttcaataccagcagcagtacacgaaccgtgataataaacaacgttttcatttctgcaatgtatcgttttcatgtatcctcccttaaaaagatgcttacattatatcaaatggataaatccatgcaagaaatttctcggtctacatcttcttttgttttgttgacatacgccaggtattcatcggtatacattttccgctttctggctattctttcagcagccgcgcacatttgagcttctgacggtttataaggcaacctttctccaaatccttcaacagttagacgaacgaaaggaaccgcagaagttataatgtcattaccatacgcataaccatttttagtaaatacggctttgttgaatcgttcatggtgtacgccttcaacctcaacctgatcaccatagtaagcaatagtatcaatgcgatggttaagaatgatagcaccagactcaatgattttcagtgcagcggcctttccttgttcgcgagcataagccacgatttcataagaaccgatatctatagcggaaccatgattaccaacgatgtaaaacatggaattaattaggtgcttagagatatatgcatacgttttatacatctgatactgttcattacgcagacacatacccgctttgtattcacgtcgtaactgcataaggttttgaatcacttcatcaatacgccatccgttagggaattcggcccttttctcacgtgcgatatggatcaacgcgtttccatacatcgcgttaaacgtcatgatccggatcccttcaacgtaaccatcgataggggcttgccatgtaatagggctatatatcggatcgtggtcaggacgcattttaggggtatggtggcgaaggaatccaacgtgagccgcaaaaagatcttcaatctcacgggagtaatagttgtaagagtccatgtcacggttgcgggaaaattctacaatgaagcgatgtaaattgattttcatatcatataccttatggtttaaagttcttccggcctatccgtcgaacaccataaccatacaccactgtcagaaagcatgtcaataaataatagaaaataaactggagaattttacatgaagtcatttaaacaattcacagaaagcaccttaaccgaagcgctgatcaccttcggaggccgtgcttatcctaagttcggtcaggttgttattcttgctggcggtgctggttcaggtaaagggttcacactggaaaaactgctaggcatcgaaggtattaccctggacgttgacgccctgaaaaaacttgtaatgggtagcgataaactcgcagcagagatcaagaaacaaacgggtcatgatgtcaaaacaatgaacctcaaaaacccagaaaacgtatctaccctccatcatgtgatcgccgacgttttcaacatttccaacaaaaaccaaaaccgtgtttattccggtattatggcagcaccagaagatcgtaaacctaacctcatctttgacgtaacgttaaaaggcatgagcaagctggtaagcatcgcgcgtgatgtcgaaacgctgggatacaaaaaagaaaacgtacatatcgtatgggttatgaacgatgtgcatattgctatgcagcagaaccagaaacgcgatcgtgtagttcctaaagaaattctcatggatacccacgaaggcgcggcccttactatggcgaagatcctgaacatgggtgattctcttaaacagtatatggacggcgacatttggatcagctttaacaaagttggtgttgatagcgagatcaagaaatcaagtaacaaagggatgtttgttgttaagtcaaactacatcaaagttaaagcccgtggtaagcctcagaaatctgtagctgaactggataaggaaattgtggctaaagttgcagcatacgcaccgaaaactgacacttggggttgacattaatgattaaacattatagtatgcatacacaaactgaggaattgatatgaataagtttttctttgatatggatggtgtattgttcgactgggaaggttcatttgtgccaatgtatggcgaaccctctatgatgacagaagatgagttgaaaaagtgcaaagcaaaaattgccaaaactgatttctacgaaaatctggaaccaatcaaagaaggatttgaattattccatcatttaagaacacttggtgatgtagcaatactaaccagtgttggtaaattcaattctgacggtgttgccgaacaaaaacgtaaagcattgcaaaaagtattgggttacgttccagaattccactacgttaaaagtagccatgaaaaagcagcattcgctggtaaaggaatcctgtttgacgatcgggcaaaagcggtgttgcctttcagaaaagcaggaggtaaagcgatcctctttgttggtgataagaaaacagcgcttgatgaattaaaaagattgtaaaagaaagggaaccattgcggttcccttttttgttattgattagcctttgcaagcgcttccgtgactagctgaatattttcttccagggtttccgcaaggaaaataccaggaactttattagctagatgagaattgttccagatttcaagatgtttctggttgcgggaaatcagaacaccacgataggcatgttctgcgaactgttccggatagtcaatgcgactaaaatcgagacgagggatccccagttcagcgcaaatcttatctgtatagttcagtttttctttcataacccaaagagggctgaccgcttccgcgcgaagcagcaaagtagcaggatcaccgattcggcgttggaaactccattgaaggaggtcaatcccagcctgaatacggggaaggtttttataaaaatcagtacgcaccaaagaagccgccatttcatcatatcgttcctttggcgttccttccggacgtacaccgaacttatcataaaaagtctgagaaaattctgctaaagtgtcgtcgaaatcaaaaagaagtgtattcattgtttgccttattttattggtcaggatctggttcaggagcaggagtcaatgacaacagactaaccagtttaccattacgagattcgattacatgaatatcaccataatcttcaaacgcctctttcagagtatcaaactctaatttatatttttcttccgcataatcgcgccagtcgtcgcctttctcaaaagcatcaacgataatatcgtatagccagtatggaagatatgtaaaactggtatttctccacggaataggatgaaccgtagtccatttttcagttgccatttaaagcctcttagatttcactcattttatgaatatagccgtttcgtgaatcttggatctcacattcaccgttttccatgaacgctttcaggatcgtttgtacttcctcactatacttgtaatcagcataatcagttttccaatctttaccctgtgctttttgatacagaatttcatcaagtacccaataaccgatcggggtaaagctggtatcacgccacggaatcgggtgaaccgtccatttagaaacaagatcatcagaataagtggtcacggtgattgtatcagacgtggtttctgttgctgattcttcatcagcaccgtgttttaagatcagagtataatcgccagcagttgtaccgtcaaccgtagttgtgtaagtatcggcggttgcgcctggaatatctacaccgtctttttgccaacgataggccagaaacacatcaccaggatctagttcagtagtttcaacctctaaggtcaaagtttcgccaatcaaaagttcgtttttgttggcgctaattgttacagaaggaattgccataaatttagcctcttatgtttattggtatttatagccggagtattttaccgttacacgttccgcatttgtcgtagccgttaacacgtccatacccattgcattcaggacaaaacggagtagtaaccccgaaaatgttacggatcgcataagtggattgttcttcggtcaacccaacaaacccatcagttttaataaaatgttctttttgtgaagaaagcatatcggtatcatcatcaagaatgagatagtttttacatccgaaagtatcgatccatgccttgatttcatcaccacgcattccagtactatgagggaagttagtgcaagttttaccaatgatccgatacaatccccacggataaaatatttcacgtagattatgggtactgttgccgattctccacgtagaggaaatgacgatatcacaattagcgtgattcactatccggcgtaagtgtcgtgcgcattcgatgtccatatgttcaccaaatttcatgcaccgcatattatttagaacgccatcgatatcaagaaaaataacgttaccaatctcgttaccatcgctcaaatcttttaaacattcgtgatttaagttcatatttcacctaaaagaaaaggggccgtagccacttgttaatcaatagaatccgcgagcttcattatccagtctacgatctgcaatcatatgagcttccatttgacgagatacgtaatcaggatcacactccattctttcttcttcgtagttgtcccaggtatcagcaacccatttagaaccgttccaacgagcataaccaggttcggcatgaacaggataatttgcttccgcagcgtggcgaagtgcttcacctacagtgtaataaggagctttagaattgacgattttcttaacttcaccattagtccaaacaaacagaactgggtagtaagcatttttcatcatgttcattttgtatttccttcttcactgcgagagccattcccccgccttcgaatacaatatactcgaacagcagggtaaggtcaactactttttaaaattattttttgaacgtgtcgaactggctatttctggtttcgcgtacagtaaccatcccatcacggtgcatgtaccatgccagtgacttgagggtttgacgcgctgaataatgaggacaaccatcagggtgcttataccaatccggattttgtttcatccaatcatagatccaatacggacacgtataaaagccaacattcgaaacagagcggcccatcatgatgatagacggggtaaacccttccatccatgccagttcatcagaaaccgtctcagaatcgcttataggagcttgtagagcgtcgggaacaatttcaatctggtcggcaatttccggagcaacatcaggaacagatggttcaccttcgtatgtaacaatttccggatcaggggagtcgatcaacagttccggtttttcttccggtacggcagcttccagatcagcaagcatattttcgaatgacttctgacggttcagtttgacatcaaacgtttcttgcgcgtaggtagcaagctgtaatttggcttctttttgttctaaggctttgaaaccttcaaccttttcgtaatcaatactcattgtagttctccaatgtttatcattatttagcctataaatattcatataaaccgtatataggatacacatagtggatatcgaagtcaaattccttaacactagtcatgtgcagattcaggcagaggctaacatagtctatgaattgcgcgactatttcagcttccagccgccaggttatcagtaccaggcaaaatacaaatatggtggatggaacggctacatatacttgatggactataacgggaaactgccctacggtttagcctatcttgtaacaaaattcgcggagtctcgcgggtattctatctggatggatcctaagatccacgaaacagaagaaattacccagccagattttgacaagtggttagaagaacacccagtatacgacggaaacaagcaaattgatccgtattggtatcaaaaacaatcggtgtttcatgcgattaaaaaccgccgtgctgtgcttaacctcccaacgtcagcgggtaaatctcttattcagggattgatatctcgttggtgtctggaaaattacacaggcaaagtactaatcattgtcccaacaactgcccttgttgatcagatgatcggtgatattgtcaactatcgccttttacctcgcgaggcaatgcttggaatacgttcaggaactgctaaaaacagtaatgcattgatctacgtgtctacgtggcaatcggctgttaaaatgcctcctgagtggtttcagcagttcatgtgtttgatggtggatgaatgccacaaatcaaccggacaaagcatacagaagatcatcaacacaatggatcagtgtattttcaagtttggcctttctggttctctgaaagaaggcaaagcaaacatgatgcaatacattggcgcttttggtcaaatcttcaagccagttgatacaaatcggttgatgcaggaaggtcaagttaccaaccttcgaattaataccatcttcatgagatataaagaggatgagattaagaaaatgaagggggctgattaccaaagcgaaatcaagtatataacatcgcataccaggcgtaactcatggatctgtaagctggcgttgaaactggcaagggaaaaagatgaaaacgtgtttgtgatgttcaatcagatcaaacatggtaaatggctgtatgagcaactcaaaaaggtatatgacaacgttgtatacatttctggggaaacggggattgatgagcgaaacgaaatgaaacggatcgcggaatcaacgaaggggctgatcgtaatcggttctattggtgtactgagtacaggtatttctgtcaagaacctgcatcacatcatcttcggacatccttgcaaatctgctgttatagtcaaacagtcaattgggcgcgtactgcgtaaacatgattctaaatctcttgctactgtttgggatttggttgataacttagcaacgctggcaaagtccaaaaatgctaaaaataaatattcatacaaaaactatggtatgaaacacgcaatcgaacgagtacgcatttacaatgaagaaaagtttgactacgtgatcaaacaaatcgaaatttagaggtcaaaatgaagagtttcaacgattttcgactttatgaggcggctattgatgatttcatgagcaaggtcgcctcttgccgtactatggacggccttaaagagcttgaaaaatattacaaaaatcgtgtaaaagaagttgatgttgcgccgtcagacgatatttctatgcgcgatgcgctgaaaggtcgagccgaagaattaaaggccgaactcgaaagcggagaagaagaaaagttctaaaaaaagccccaaccgaaaggaaggggctttttaattttgggacgcaatcagcccaacacgtacatttgattatagccagtgaggtactattctggctttttttactcatgcccttgatcgaaggtatgttatcaatcaccccgccgaaggtaaactccatcggacggcgcaaaagagtacgcctatcatccagcattcttttatcaagcccctttcgggtacacatgtatttaggacgcgattttgttgcctccatcgcccgttttgcctccgtaatggggaactatgagatccaggcaaagaaccccgtacaagcctcattcattacgcataatcggtttgtcatgcctatggcatagttttacctatcctaaaaatcaggatgttcgtcagattctaacagatccggacgttcatcacgatctgtaattccttcaccgtatccaatcataagattctcctacagcaacatttgaacttcattcagatcatcggattcgttgatctcgccgctttttgttttttctgcgatgtagtcagcacagatagtgctacacacgcgcccggattcagtcacataaccagtagaaggaacaggacacttgcacactacacatttttcattttcagtagacattatgcaccactttctaatttacggatctccaacatgtttttgatagagtatcctttgtttttgacgatatccagtgctttactggtgaaatctaccaccatgtcataatactggatcagtttgttggtttctacaatcttcggatccccagcgatcgcgattttgatttcagtagtcccagtatacaccacttcgcacatttctttgtcatgtcttccggtgtagtacaacatacgatccttcacatcagcttcttttttagcatgaagttggatcagttttttcttcgcgtttgaatggtaacgaagccatttagcccaaatcttagggatatccgctgattctgattgcaacttgaggggatctatcagcatatccttttcaagttcattttgtagatcttctaatttcaaactcataacatactcaccaatttacccagttgatctataatatactatattaattagtagtcaaatttaaattgatctaatataatatattattaaaagaataattatacatgatctaatttataaaatcaaatttatttttacttgatttcaaaaattatttgatctataataattataattaataaattttatcataaatcatttataaattcaagatctaatttaatattaattataataattattaaaagatggagtaagtttccctactccacctattgaatattatccccgttgggttatactatcaacccagtttaggaagtttgatacccacaatctgactcatcttagatttacctgagaggtttacccagtcatcacctttcacaagtctttcgtttgcagcagtggtatatgggttaaccgataaaccgtagcgcatcagaatagcaactttaggctgtaaggattgaggatcaacagaaatcttgatcgaacctgcctgatcagcttctgtgtatggcgtatagaacagagagccaacatgatccatttcacccagatcgtacttgcaaccagtcagcatgtaatcaaacggtgtattggtgtcagtatagacataataaccgtttttaagtcgccctgtcgctaacgggtgggtttcatcggtttcatgcatccaaccagacgcagccagaacgcctacaacgcgagaagaggccaggacataggtagcttcaaatgaagtcgttctattcatttcctgccccatttcacacactaattgatacaggaaacgacctaaagccggagcatcctttgcagtgtatgcggttgtagcatcgaaaatgccatttgttaccacaccatcaacgttgtaacgatgtgatacgttgatcagagtctggatgatatctttgtttacttcttcgctggcaacagtacccagaacatcttcaatcacattttctgcgttgaattggtttgcttccagatcctgcataagttccacggtcatttcagttttgaatttacgggaacgaacgttgatattccaacgatccatttcaaaagaagttgtgctaatatcttcgctggtttcatactgacttgttggcgcggcttcgcttgccaggcgtaatttattgctgaatactgcgaccataattgcttcatcaatatcagcacctgcgagagttacgctatcagttgcttcgtatacgacatcgcttgtcggatgtttaaaaacttggcctttggtataggcagtaccaaccgcaccaactggaatgttatcacggcttgcatacttaccggaataggtagcagcgctggaaaacgtcatatcgcctttagggttacgataacgcacaccgaacagggttgcggtaggcaaattagtttcctgaattgctacaagttcaccgtagatcaggttgtttaccgcacgggtaagagataccagatccggacgggtattagctacgttaattgtttctgttccggttgcctcatcaagaacctttttagacaggccaggcggtagctgtgactgacgcaccagcttgttaattgtgtaaaatttttcactcattttatgttcctgcgtaaagtgtataatggtatttatgcaacaaatttccaggtagggtatttgtcgctattaatccgatattttaaaccagagtgggacatactaagggattttgccgcctccgatccggatgagtatacaactccatctatcgatacagaacggcctaatttcgccttgtgtgcttctgtgagaggtttatactctctgtctatacgtccattcatatatttagcttttaacgtctctgagcgcttcctgttggattcttcggactgtggtttaccctttttaagtttagagagacgagattttacttcatctgtcattctctctttagtaatcttggaaatttcttgtttcttctcttctgaatgaaacatacccaacatagggccaccatcaccaccgatacccatattatatgtatgtggattattaacaaattctagattaacaatctctctttctttttcatacatttcttcacgggtatcgaaaatatgtaatatttcttttataaatttatcgataccatacttcctctgagccgcctttatagccacccctgaacccatgtatgaatcattgatgtcttctgttgaatgagcaccaacataaattttattattaaccaaatttgttattttgtagataatatgtttcataatatagcctcaattgttttcactatttatagaaatgaaaaagggaacccgaaggttccctttaatatcgttatttttcaataacttataagcctttcacataaaccttgcggaagtatgcgtttttaccgaacatttctttggtaatcataccagaagtgatacggtcggacggagcctgagagcgagagttcgcaaacgggttgatacctacaccgtaacgagttttgaagcccattactggctggaagttcttcggatcagaaccacgcagcggggtcagcgcaacatacggagcgtagtagataccagcatccatttcgttatcgcctttgtaacccacggtgaagtaatcaccacgtgcatactggtcgatgtatactttatacacgccacccagaacaccagcgaatactgctttagtggtgtcaacgttcagagtcttctggagaccttgacctgccggagtgataccgctatcgatacgagccagagcggaaaccacgttacgggaagcgatgatgaagttaccagcaccacgaccagtttgacgtgcgatttcgtttgcttctttgtcgatctgaatcagcagagctttgtagctttcaccagcccaacgagcgccacgaacatcaatcggatcctggaagtcaaacgcaccagctttagagccaacggtctgagtgaaaccagttttaccaacctgtgcggtatagttgatcatgtcaacgatttcgcggttgatttccagcatgatttcggttgccagaatagcagacagttcggcgtcagcgtccataccgtgaacagcgcggagatcctgagccagttctacagagtactgtgctttcagttggcggctacgtgcttcgataacctgcttatcgatacggaagcccatttcgttccacgggttgccagtagaaccgttgaactgttcttgcagttctgctacactggtagccataccgtaagaaatttcagccagagtacctttttcctgttcggcgataacagcagcatccagagcatcggaggtagaaccagttacagtaaccggagagccagaaacgttctggaggaacacacgaccagtttcagagaaatcgtggaacacgatagcgccgtcagcgatagcagtaccggaagccagttcggtaaagccgttgctcggagccgcgccctgaccggagtacatgctatccggagagaacatcggatggaatgcttctttagcaccggaagccagcggatctttgccgtacactgcgcggagagcgaacacctgaccagtagggccagtcataggctgaacaccgcagatatcgaacgcgatcaggttaggaatcgcacggcgaaccataccgattacagcagggccgatgttggtgatagcaccgcttgagttaccagaagcgattttggttgcgtcgtaaccgtggtcaccagcaatttcagcttccgccaggaaaccaccgaaggattcaacgattttctcgtcgcggtaaaccggatcaacttctgcgtctttttcctgtgcttccataatggcagcaatcagttgttttttggatttggtagcgatatccggtaagccttcctgagactccagaagatcgttccatttttccatcaattcgtttttcttagacattgtttcttaccttttgaaattaagaaagggcttttgccgcttgtacatatttattgatcttggatttctctgccggaacactttctactaccggaacaaagttatctttcgtttgcggagtatttacagactcgtcaacgggtttttcagctttggttgctaccatttcaacaattgcgctgagtttattttcgaaggttgcggaatattccagcccttcaatcagagattctactttttcgacctgagattcggtcaaacctttagttttctctgaaactactgcattgcgtttcatttctgaaatttctttggtcagttcctgattcgcttcaaacagggttttaacttcctgctgattctcagtcagttcgtcttccagttcggcgactacatcaacctgttcttccggaatgacaacgttatgttcaaccagaacttctttgaggcccatgatcagggattcaaacagatcggctttgatgtcacgggaaacggcttctttgttttctttcagccattcttcggaaatgtgcgcaaaatatttatcagcatcttcgtacagcttagtttcgatttcagcggcacgttcagttacctgagcttcgaccagttcgtcggaacgttccgcgatctgggtaatgtgggattcagcgagttttgcagcgccagcttttacagcttgttcgaatacagtggtgaatgtcgctttcacgtcatcagaaagttcaactgattcgaaaatgctgtctaactcgaccggagtatccaggttctgggcttccgccagcagttgttctttaagcatttttgattttcctgttgttttgtttaatgtatttatagacctttcaaacgctcggacaattcccgaaaagcgtcatcagcactattattctcaacaagcggtttgctttgctgattttccactataggcttaacatatgcatcaggtgcgcttggcccccagacgacatcaacgcctacagctaatttaaagcccttttgtacaacgccgtagcctttgccggaatcggagagcttacctaatccacgggaagaaacaccaggaacccaaccagcacgaatcaacgccgccagtttgtcaccatcaccaccgtcgccttcaacaacaacagcgcggccccaaacatcgttacccttccaccacaatttttcaatcaggatgcaagcatttcgcggatccacattcgggcgcggagggtgattcatttcacctaatgcttgacgggtgttaacttgagttctaatataatcgttaactgcttcttcaagtacgtttttaggatacaaacgacggttacggttaaccttttcggcttgaaggaaaataccttcgatccgcaatttaccgtcttttgattccccaacagattctaaaatagattctgaaacgtcaccgcaaggtaaaccccattcttcgattaaaagcatatcgccgttttcgttgatttgggattcattcatatttatagccccagtgcagcacgtttacgcaatgctttcttgcgcttacgttgtgcgcgagtagcaattgacgggttagcacgttttgttttgagagcacgacgcgcgatctggcgacgttgggatttagttaatccggtcgtctgatacgcattacgctcacgggttttcctgtctttgaggcgttctacgttgccacgggaatcaacatgcttgacaattacctcatcaagtgttaaaccttcaacaaccgccatcatagcaagggctaaatttggttcggtgaccgccaaattttcgatgattttaaccgtgccttcatcgatacccagaatatctacacgggctttcgcttcgtctaaatgttcctggagatcttcggcggtgatttcgatgtcaagttgcatttacacacctcactcatcatctttatcggatttatcatcctcggctggctttttatcgcccttttcgtcatctttatcagcgccttcgtcgtctttttctttgtcttcttcgccttcgatgcgtacagcttcggcaagttcaacgcgtaattcgtgacgaagcgcttctgtgcggtcttccatgatggagtaaaaagtttttttagcttccaccagattaccgcttttgattgcttcgataaattctttcatcaaaagttttcctcttccgcttctggatttttaaaacgttcttcttttgattcttcttctatctgtttggcttcgctttgaatttcctcatcagacatccggagaacttctttcattacgtatttatgggagatatatttgccgaccaccccttcaagttggcccatcaggtttaaacggcgttccaaaatctcaatatctttgatttcggaatagtaagaatcttgctgatatacaaaagcaatcttacttacgttttcatcccattcatcttctgtaatgattttcttcgcgatcaagttagtttttaacggatccgcaagaacagggttgaattgaatttgcaattcgcgaataaatttgctaaagttcaattcgtcgcgggtaataccgccatcgttacccaactggataccgccatcatcgcgaggcatacggcttaacggaatacgtaacgcttcatacagcttacggttaaaccatttaacatcgtcgatatcagagaaggcagtgccaccaggaagcgttgaaacttcggtaactgctttaccatcacgacgcatcagccaatagtcctctgtcattgacaggttattttgctgattcttaactttaccagtgctcgcgtcatatacaacacggttttttaagccctgtgcaatgttatttacgtactgtgtagctttagggccacccatctgacctacgtcgatatagaacacacgacgttcaggcgcacgggtaatacggtaaatcaccatagcatcttccagcaaacgcaactggttagctggcttgaccgcgcggtgcaggtagcctataatgttgttgtcgcaatcttcaaggccgctatgagcgtaaacaatcgcagagcgaggaatttttaccttgtcattgtgactataaatctgtccgttgtagctataaccgtttttcggtgcggtatatacgaagtattcacgatagccacggaaaattttaaccccaccgggtagggtttctgtaaccgattctcggatcagttccatgcaacggggatctaactggcgtaattctttgatgccgtcagcttcatttttgtgcatgattttatggaaatagatacgcgaatcaacataccaatcacggaataaacgagagcctcggttatcgaaatcgtgaatattcattacggtatcgagttcttccatgatcttatcttggatatttttactaaaattcgttttagtaagatccatcgtaacaatatcttttccttgttcattaacaatcgcttcgttaatgatttcagaaacagcgttttccacttccgggtatgtcatgatgccacggtatgtatttattagctgtgttttgttctgaattcgcggatcctgtccggaatagaactgttggaacacagaagaataacgctggtttgataagtccgtttcgatttcgtgcgccccatcgttatttttcggaggcgcaatcgaacctgtatcatcttttaattgggcttcaaattccatttcatcctgtttggcgaaatttttgaaaaaccctaacacattgtctaatccaaaaaagttcatttacaactccgaaaaataatgataaggggtattgctacccctgtatttatagcgtttaaacccaccagtctagcgcgaaagtacactcaaaagtgctcacttcgttgttgctatcccagtctaaagtaacctctcccacgttggtcgggaacaggccataaatggtatgttcggcggttacttcgtcgttacggtttttttgtttaaccgtagcggtttttttgtagtttgcagggatatcccctgtaatgtcttcacccataccatgcagcatgtttgaccatgctacgattgcatcacgggttgtgtgtgcatcgtcgttatataccgtgattgtccagtcatcataggtacggtcaccagcaacgttaattttgcggttcatgtaacctaccggaactttttcaacggtagacgctggcatagtagcggctttacattttaatttaaagtttttgcccaggtacgggatctctacttcgaacaggttcggacgtgcgaaatcaccggattcaaaggcgcgtacaatatcagtaagcattttctaacctctatgtgtatttataggggcttttcagccccttacatgttatactgacgttgatccaatcaactcatcgaaatccgcaccagttgaggttgctacgaagttcagtgtgatgtagttgatagaacgtgctggtttgacgtagattgatgcaataaactcattgcggtcaataacatccggcgtgttgttcgtagtgtcacaaaccacacggtaatcgtatacaccgcccagagcgcgaacgttagacatatactgtcctgcatccatacggaaggaagaacgagtgaaatcatcgttattctcaaacagtttatattttgcgttatcgccaatgtctttcttgatcatgttgaacaagcgacgaacgttgatacggtcaaacgggcttggaacagtcgttgcggttttatcaccgtacagaatgtatccagcaccaccagagaaaccagtaaccgcgttaatctgtacctggtacatagaatcgcgatgcgcgttagtcggttcgatagccagtttgatgcagttacgcagttgaccacggttgtagccagccggagacatccacggttgcgatacctgatcggtataaacacagaggccagccatatcacccgcgagcgggatccaacggttaacatcgttgtatttatcatactggaacttatagttaccgtcgatgaacgcataacttgaacttacgttcatgttgttatcaactggggtagtattaccgattttgtagcctgtacgccattctacgaggttatcaacggcctgagccagtgggatattaaccagagcagaacgcggcggagaaacgaatacgacgcaatctgaacgggtttcaccgatagacacagcgtgtttctgtacagtagacgaaatttcggcagtttcgccagcacaagcacccgcaatcagcagaggaacatgcagagattcacgatctgcgaacatatcccaaccagccatgagttcatcagcgcctacagtggcgtttgcagaagtaccgccgcccagttccagaacgccggagaatccgacaggccagtttagggacgtaccatacagatactgcgaaccaccgtttgcaaagaaatcatccatgtagatcgttgaaccgtagatatctttatcacccttagcggttgacacgataaacgtttcttggataataccaccacggcgaacgataaacgcgtattggttatcattctgagggccaaagttcatcgaactgcgaccgctgtttttaccagacttaccagaaggataagacttaatgacagccgaagaatcgtatgcagctttagacagaatttcaaccgttacggtgctacccatttcgccaggataaattgcaataacagacggtagctggtatttggtgcaaagttcttggaaagcagttgcctgaatagtttcttttgcggtgtcaaggttgagcagagtaatacccggatcaacttctacgccgtcgattgtaatcgtagcagaaacaccagaagaactggaaacgatttctgtagtccagccactagacagatccggatatacaccaacctgtttagcgtgtgcgatgatcttagtgctcggaatgaacacagacaggattttaccctgatcatcaacactggtaacaacgccatcttcttcaataacaacgttattgtgtttaactttgatctgatcgtctactgcatagttagaaccagcagcggtgatcgtggttttgatctgattatagatcgcggttgcgttttttgcggcttctttatcgacgacacgaacaacacgcagatcctgaccgaactgtaaaaagtttacagcgttcatgaaataatcagcggtgtcattgtctggggagccaaaatagtttaccagttcgacttcgttagaaatctgacggatctggtaagctggcccccatgaaaatttaccaacaatagcagcacgaccagttgaatttcgaacaacggtagattgtaccgatgtttctttagtttcaatgcctggagagattaaagccattattaagtttcctctaaatttatataaacgaaataccgtgttggccgacagatattgtttcgtcgccactcgttacgataacaggacataacatatcttcataaagcagttcgcgctcacgtgcgaatacctcatttgccaaccgcaaatcgtctttctcgcaaaattctgcgaatttcatttgtgttgttagccatgcaaagcaaaccagcgccataacgagatcgtcatggaaaccttcttccgcagcccacgaaacacctttttctgagaaagtacgaaattcaagtattgtctttttgttatttatgatgagtttatctttctctatcaagtcttttagggttgagcagccaatcgctttcgatcgtttactctgtttcatccccaaatcgttatagctatcacaaataacgttatcgtaatccaactcagaaaacaaagatttagccactgagtgacctgtgctatttagctcgatataaacccatgcttcgttgtacatcataagataacgtaacaggacatcaggcaaaataaggtgcgatgttttgtttgaatggtatacagcaacctgttcaaacggcatagatgtaatatctataatatgcatcgcgtgatagtcttgaccgcgcccttcggctgggtcgagtaccgcaatatatttatgtccctctactggagctttatactgatagaaattagtttccgtttcatcagtatcaacccatgatagtttagacaatttccagccagcgatcagggttccgttggttcccatgaattcagcacagtgttcctgtaaaaatgcttctttacttgaactggcgatcatcttcgaagaccatgaatagccgtcatcaaatacgccatcatcaccgtctgtatacaaacgctctttaaccgatgtccagatcgccgtgtatggcacgaagccggattttccttctatagcagcgttccagatatcatagaagtggttaagcccgttaggtgtcgttgtgataaggattttcgatttacgaccagaagaaattactggctgaatcgctaaccacgcatcaataaagtttggaataaacgcacattcgtcaatgtagatcattgcgaaggagttaccacgcaccgcatcgggagaagatgcaaacgcaccaattttacatttgttatcaagttcaatagaacctttgttccattcaacgataccaggttgcaagaaatcggggagaagttcaatcgcctgttttgtacgatccagaacttccgcagacatagaggctttatgagccaaaacgccaacatatttatcctcgttgaaacacacaaagtgtgcaaggaagatagcaacaacggttgttttacccaactggcgagacaggttacaggcaaccatacggtttttatgcatttcgatcagcatttcgcgctgatagtcacgcaactgaaccttaattgtaccatagtcaatgtgggtgatcgcgcaatatgtttcagcaaaataaacaatatcgtcacgacacttaacccactccatcaacatctgttgcgtccatttcgtttggatgtacgcgcgtttcaggtttgggtttccgttatatcgagttttcttgtttcctttgtttttatacgtcgcaaagtttgaactgtcttttgcttgaatatcaactttatggataccgttaatttttaggtaatcactaaactttgtcggataccattttttatcatgttcgctttgcgtccactccatcccaaattcatcaattttctttttcagataatcgggatgcattaatccgattgggtgatctgattccttactcggatcgatcgtcggttccatttccatcagggtttacctctaccgcttcaccattaatgaagccttcttttggttcgtatgcactaccatatttctgcattaattccgtaggggaaccaacaaatacagttgcattctctatgttcatttcattaccgccgccattacctttttcagatcctggttttgttgtttcttcggtaatttctcgcatttctttatgaattttcatcaatccctggttagaattgtttaactgattcatcagggttgtaaaaacttcaacgtgtctcggagattcagagtttttagcgttatgcaaggcaatttgtgccatatccatgatcatctgattcatgtaatgcgcggttttacgcgcaagtgcatagtcttcctctaaatccggttttcgatctgctgggtgtgactcgacatcaacgagttcgagtttttcatatacaaccatttcttccccagtttcagcaccagggagattttcaagatcaagtagttgttttacgctaaattcttccattattggcccctcggtttaggaggttgatcgccgctaggaattgggatatcattagcatacgtttgaatgtattcttctcccgtgtaatcctgtataggcatatcaaccggatccacctgagcatcaacggattcaaaattgtctttgtccaacgggttcatattggaaaagaaatccgtgtatactgttctgatctcgcctttaatctcgttaacaggcggatacaggtagccctgtaattcaaacattaaagaccattcaatgtgtcgccgtgtcgttgtatcaccttcaaacgtggtatcaggggaaacagattgcagagatattttaatatctcggtctattttaatgtcgtttttatgtaattctgtaatacgacagttgaaatgcggctggaagtatggcagtatttgttcgataatctgaaacacatcatcttcgtaacgggtatacactcccagttcgaacatgagacgatacggagcagggttaaactgcgttactgtttttccaggtgcgcgtaactgcgtcattttttggtttaccgcgatccccgttttacgaattgcgttatactgcaaatcaacgagggatagattcatacgcggtaaaattgtttccgttttagcaacattttcctgactgtatgcatagttcagcttgttcatggatgccaggaatttttcttttgatgcgtaggtaatcggaaccttgataaatttttcttgttcgccgcgaacgcgtttaacttgcacgtgattgaaaagacaacccatcaagacaatataatttcgcagcgaactattataccaaaatccaaacattttatttttcctgtatgggttaaagcgggtataagatttctcctataccctacatgtatagggtttcccctggttatatttatgggaactgtgcgaacggtgatccgcgcccgttaacaacatcaaacgattcaatgaattcatcgccttcatcttcaaaggcttgatcttcttcgtattgttcaatattggtatccgccaacccatcaagatttcgaataggttcgagatccagatcggcatcgggggaaaggttaatcccttcatttcgttgcagtttaggatccaattcttcaccagtatagataaatttaacgaggttgattttacgttgaggacgatcgccgaactggaagaacgggtcaaactcaatccatgtaatttcaaacaggctgttatccatagggaaataaatcaaatctcccagaacagggatcccgccatcagtttgatgtgcaaataaacgaggattgatcacaagtgtcatttcgtcgtttgacatcataccgaatttactgtaaaagtctctctgcccttcgtagtttgcatacgaatcgatgtatgctgcaattttccacgattttgtaaacttcgattcacggtcttcacccaaaattttatcaatattaacaaattctcgacggacgtaatacatatccggagatttcatttgaattgcttcggctgttagtgaatcatgtaactgttgagtagggttatacttgtaccagttaacatacttattagtaacttctgtttttaggttattgtctacaccttccccagattccaactgtgcgaataaattatcatcccaatcacgcataattccatccctcccatttcttagattttattcgactaaagacggagtttttagttatcccgtaatgatctccacattctttcaatgttgagtattctactccatccacaattacccttcgtgcggctgggtttttgcttccagaaacatcacgaggctttctgtgttgaatcatgaccctagtggcttcctgtcttcgttttagtccttcctcgctataaaccctattttttgccttttctgacatctttattttagattcaatagatcgtttagaaccaaaattagggttatctgctggattataaaaagaagcacctcctttaccgccacgaactaaattaacacaattatcataagatgctatcaactcatcaacaagtaattcttcggcttccgctaataaatccttgtttggaaacggttttgaccattgtatattaacaatacattctcttccatatttttttaatgctcgtttgatgtataccccagatccgcaataacaatcatgtctaggatcattaaatggagaatggcgtttacctccatatatttttattcccgtagaagttttaaactctactagatataatctaaattgcatttttcctccttacatcatcaacactggaagtgcatcagacagtaacagaagttcttgacggaggttttctttttcttgcatagcttcctgaatcagtcgggttccatccggagcaacaccaccaggtaattgcataccctgaaacttagccagcacctgaccgtttacctctttaacaagagcagttgcgtaatctttcacccaacggttgttatacgcagaggatgaaccctgaacgcttgtaccttgaccagccttcacaccgcctgagacagctttgtaggggttattgtatatatctgctatagttggcttatcttcgccatcagaacccgctgtagcgtatccagagacgttaccgaccatactgggtacatcaacaaaggatctgatcattgcttcgataacaacaatatcaccatctttaacggttccgtatactgcaaactgtcctgtgtcgtcgttataccagtaatccggaagcggagacaggagatcttgcattgaccgctgatagctcatcatctgggtaaaatagcccatatccgcgccatatgcgttcattccgtaggtacgtgatgcacaaccaccaccgcccagagaaccaccagtaaggcccatcaggaaatcagtaaaccacggataaaccgcagtaccatccatcgatacaagggaacccatgttagtacgcaacactttagtaattgcgaaaatgtgttctttactcagatcgaaaatatttttcgggttatccggccccagggtaagaatgatataccctttgttagatccattgtaatgatattctgcatataggtctaatgctcgttgaatgcagtcataaacctgatctgttgtcacttcgattttgacgatcggagcacctaagcggcgcagaatttcatcttttaattgtgctgggttgttcgtaatcataaagatcctcaaaaggggccgaagccccttgttaatcgttaagcgacagtgatcgccagttcatcagaaacgatgactttatggcttgcatcagttaccgttactttgtaggttccggaatcagaaggctgtagcgaatcaatggtaaatgtgttagcattagtaccaacatttacgccgttcttcgtccactgataagacagcggagaaacgccaccagtcatagttacgcttagagacaatgggtcgccagtagtatattcagtatcaccagttaggttagtaccgaatgacagaggcgggtttttgctctcataacggagatcagcgtcagcttctttgatgtacagagccagtttagcattcagatcttcgatagttacgcgatctgcaagtgcctgtgcaatgttcaacgcttctaaatcctcaacacgtttattaaggtcggcaatcagtgcataaatgcccgtttcgttaccttctgcgttatcgcctacctgagtgaacaggttgcgggttgtcgttttcaaaccagcgcgagtaacaggatcggaactaacaccatcaccatagatttctttgttaatctgctggctagttgcaacgaggccactagaagagttacctacaatgccttgcagttcccagagtgcgctagtgttggtgcgcaattcaccctcaacaacactcaaacggcctttgatactggtaggatctgaatcttcaccaacgtcaccagttaagatcgcaacttgtccctgcaatccatcatcgccggattcacccagaatcatttccatatccatcaatctgcgtttagtttccgcaatatcataacggatactaccctgagcagaagccgtaccgatttgaccgttaatggttgcaatttgtgcagtgataccagttaccggatcattgatttgtgtagccagagaactaacggagttttccagactgttcacacgatcgttaatggaactggttgaacctgacgtgcgaccgatataactattaatcgcatcaagttcattttgcattacaatagaaccatcctcaaggatcttgattcgcgcatagattgatcgggttgtggcaagaccagaatcacccatttcagcacgaagttcttttacctcttctgtcagttgtcctacttcggaaagcgcccaatcatcttccagtttggttatgcgagtttcctgcatagaaatagcacgttggttactcagtacgcggtatttaaggccagtaccagtagaagaggggtcaacatcaccatcaacgttaaatccaggatatgaaccaacttctttcttaatgtaaatgatatcattacgaattgtgcggtgtttaggatctttttctggatcgtattcaccaatttcatcgttttgagcatttacagaaagggttaactgtgctaccttgttctgtgtttgggtgttagataaagttaatgcccgaacatcctgatccaactggttaacttttttgattacgctctcatcaccaatagcatcaatgttttcagtaatcaagttaacctgatcgattacttcgttgattttatcattatgggtgatggtattttgttctaactgaaccgcgttctgctggatgtttacaccagttcggttaagactaccagtgtttgacactttatctggcgaaccgtccagagtttcaccgtttttgatccaaataatcttcgtttgagtcgtggcgtcatctgggacgccatcaacaaacgggatcttcggcaacgggtttaatttgtcgatgatcatttaataacctctattgagtacgaattacgtagtttaatgcgatgtttttcatgcgggtttcttccccacccacaccagtggctttagttatagaagcatcaaatacgcgagcgctttggtcattcttttcggcgcttttcagttcgtaaactgcttgccatttaggaatattaccgccgttctggtagataagctgtaatgggtgttcatgccagcccaacatatcgccttcatatgtaccatacccacgattagggtttagtccacgcccacggtcatgaccacgtactgcaacgcctcgacaatctggaaggttaaaccaatcaccgccaccaccaaatgtataacctatacgctcaaaaagtaacggatagttatttttattcagtgagcgaccatcacaaatatacaaactaccgtggtcagtctgaaaaccagtcatgacaatagcacctactgggaaatgccaatcaagatctgtccatgtctgatatttgttgttatatattgcgctattctcataaagagaaccgttaattaccgcatttcgatcactaggtaataccgcagcgtttgaagaaagtgcagtgtttgccacataaccaacagttgttgctaatttgacaacaccgaactgagatccagttgcacgggtattgattaattttttcgcagtaatcgctttggtgtcatcagtacccgcgtttgcttctgcctgtgatgcgatacgaataacgcccaggttgctttcagttgcagttaaacgaataaacgtataaggtgaaattgcatacccttcacggatcgtaccagcctgaacctgtgcaactgttgccagttgtaccaaaccttgcgagctttcggtcgcgcttgactgaaccggaaccagggacgcgatcgcttgcttgactttaagcggagtcatagttacagtgttatctgtaccagcaaccgcctgtgcagtggtggcaattttagaagaaccccaaaccgattctgtacctttacggttattgaacacatagttcagagatcgcggagtaatagacgatgcatcgttagttaaggttgtagattccgcatcagtcgaatacttcgtataaccccatacagtttgtgatgctttagggttctgcatacgatatgctaacagtttcggagtaacaatcttattgttatccgtgccagcgtcaatatcagcttcggttgcgatctgagcaataccacgaacagaagttgttgcgataggaagcccagtatcagtacgcgcccaactacctattttttccaacgcatcttgtacgttggttatggtatcaggccaatcagtacctgttgggtcaaatgtcacgtaaatggatttatcacttacgtggttgattgtattgttactcatgtgttatccttatgcaattcgtttgaagtaatacacggttacttgcggagtaacatcaggtaagaaaccagaacccaacttaacccatgaaccatagccattttttgcggctacgtcgatagttccgatttgacgaataccgttttctgagatatttgttgccgggtgcggaacactatcaataaatcgacattcaaggatcgtaccatcaacacctttgcggttaacttctgcgaaatatttttccgctgcaacgaattcagtaaatttgttgtatgcagtttcacaaacggttgcggcgttagtcccattatcaaagatgaaagggaagccgtatacgtgaactacagcctgttcttggtctgaatcgatgttctgtacaataccatcaaaagaaacgctctcaacctgctgtacggcgattggaggtgcatcctcagtcatggtaacaacgccgttaatcgggatttgctcgataagcgtatacaggtcatcaattgcggattgtacgtttccatacagaacaccgcgttttgtttggtcaatgtttggttctccgatcgaacgtttaccgccgatcagaggcaacttaccataagtatcatactgtaagtaatctgcttctttagagaggacgcgagcgccctcccttgtttttgaaatattgttgtaagccattatgcaacccttatccagcgatgtgcagtcatatacggtggaatagttttgattttatcaggtaatgtgttaccctgattcactttcaatgtatcctcacggtatttagtgtatccagggccagaagcatcaggatctaactgacaaccaccaatgatcacagcaccattttcatcagcaatcagaactttatcttttgatacaagttcaggaacgttgatgattttaatttctgtaccacgatcgccaccagtaccacctgccgtatgactcggttgaccaccactatctaaatcattattgtttaatgcgaaatcaggatccgctgcatttgatgtccagccagccaggaaataaccttctgcgtaacgtttccaaccaccaaatcccatataatcagcagggtttgctgggttgtgtgcgttttcatagatggttccgatcgggtggataatatcaaacatagcctgaatatccagaatacgtccctgataggtttcccctgtattacgcattgttttctgagaagggttattataatcggtatattcgatacggttcgtcaatataacttcttcttcgttattgagataaaccttatcagctttttctttaataccgccagttccttcccaatccatcagagtaccaatatcattgttaaaccaacggatcgttacaacgtcgccggattccagtttctgagcaaacttgattgaagtcactacagaatcagtgaatactaaactataatcctgtcctgacggaacccatacaccagagttaccaacacacgtactttcatcaacaccttccgcaccttcacaggaaaacgccggatagtcagcgtcaccgcctttaaccagttgtttaccgttgagaagcagttcaaacgagttagggttaatcaacacgcgagggttaacaccaaattcagcaggtgtaaactcttttttggttgtcagatcgcctacccactgttcaccaggaacggtttccagagaagtatcaccagtctgatacatgcgcatcacatacgcttcatagctcgatcgccatgttgctaacccatctagataggtaacaaattgaagcgtatcaccagcgttacacgggtttttaaggcgtactgaattaccatcaagtgcaaccagttcaccaggagcagagccaatcgatccatagtctgagttatcagcattgaatccgtctttctcatcgatgaacagcaagttaccgcgatagtaaacttcgaacgattgcaggttgtattcattaccaacaccgaatacgttagggaagtcagtttgtccctgagtagcaatatacgtttcttttgctactgttgccagatccgaagttgtgattttgtcaatctgtttgttttcgacgtattcccaacggcccggagaacaatacaccaattccacatccataaaatctttaaacagatctttaggagttggggaacctttgatagtatcaccagttgcggggatcagtctaacgttgttggtagcccaacgcgaccacacatcacgcagacgaataaccttgttataatcgcctacgccgcctttcgggaggtttacggtgattttgtttgcactggtattcaacgcccatgattcaccaaattttggtgatagcgtcgtacccgcaaaagttttccaggcacctgctggatgggggatctcaccatcccccagcatgttatacaattctgtaaagttgttgttagtcttttgaccacctcgacgcaggtaatcgcctgtaccatcgtctacaatctgacctattaaaatttcttgtttcatgacgcgatccctgatttaatcgtatctattgctttaatcgtgaatttaattcgatcttctttgatcgcttgcacgttagcgtatacgacatcaccagcaccgacagtaaagtttaatgtaaacatttcatcttcactgtttttcaaaatagcgtattccgttgaataaatcgttttgtgtacacgatccacggtcattaaaacttctgccattttggtaactgtaccagctaagttttctgcgtatacaagcaccttagccccgctaaattcgctatatccgaacataggaatagcagtcgggtttgctttcagtacaagcgccgtagtgtcaacaggcatcgttttagaaccgaacatagattctacagaataatcccattttgttaccgcaccttcttttttggtacaccagatttttacaaaggtgtaaggtgacgtgatatacaactggtctgcaacccccgcgatagtatccccaacttgaggacgaaacgcgataggacgatcaacagagacactacccgtactatttatgaagtagcaaccttcgccaaccttaccagaaggaagaacaacggtaatcgaacctgttgaagtatctatgtcatgcagggaacccagttcgatcggtgtgcttgaatagtaagtgcgtggtagtttctgatagtatccggtagcatggatcaccatgttaccgacaccttcgtttgcagacagcatacgcacatcaccaaacgcattataaacgttggtgatcatttcgttcagtttaacaccaccatcataaagcgggtcgcctgttgatgggttgccgatttcaccgacatcaattagtttttttgctgtttggtaagccattgtttttccttagaattcgaatacaatactcacttcctcagtctgatcaagggagcgaataataggttgtctgttttccatgtaaatcatacgtccggaatcaggttcaagcgcgttagcattatagtaatcaccagttgctttcttttcaggctcggtcgggcttgcctttttaatcaacgggtttacaataatacttatctgacggaaccctttgttaccaggaagcgtagattgcgggaagaaaagagaatccatgtatgcacgaaaacgcattgaattcaccttcaaccgatacactagatcgtattgtcctggataccattgaatcacgttatcataaccccaacgtaccggatcctcttccagttcgccagggaaaggaactacgatatgttcgtttgtacagcggttgatcacgacatctggcgggattgtgtagaggtattcccatttataaccgtcgcccatgtcgatcccgttagcttctccgcgtggaggttcactagattcatgagacggactccagataccgccgatcctgatacattcaagttttccggtaatgctcgaaatggagcaagaaccgatatcaggaacatcgactacacgataaaccatccaacctttacccggatcagtacggttataaggtgcggtgtttacaacaacaatatcgttaaagtaaaagattttcgggtttggataacgagtatcaccccagtctttacgtggtaaaattgcatctatcatatcaccaggaactttagtagccccgatcatatgcgtccacatatcactaacaccatcggtgctatcatttggatatggaggggcgaagttagggtcggattcgttatccgaccacgattcagttcgtccaatagacatgtaaatcgtgtttagatcggcggcatcgccgatcatatctttgaagttcatcaagttttcggttcggaattttgcagtaattaccgaccgatacaagttttgttgtgccatttaatttcctaccttaatctgtgatggaggatttggatcacgtgggtttcctgcatcatctttcagtcgtttatccaccaaattacggaactgtgaatatttaacgcctgagcaatcgaacaacggactttgatcgaaccgtcgcgcagaaggaagaacaccgttaagcggtttttcttcaatgtcatattccggaggtacatcaaaaggttcccccgctcgcgggtgtacggtgtacagaggttcaccagtaaccaggtcgaattgttggtttccgttaccgtccatactcgcaatgcgatcaggccagaacttaggataaccactatcgaagcggtagtttctcagaatatcaatgattgtctcgttatgagtcattgacaaaccagagttgatgaatactgttaacatcgtaatacccataaagccgaatcctaccggatgaacaaacctcaatacgtcatccttataacgggaagtcggtagatttgaacgaattttcatcacatagtaagatcgtccacggttgatatagtcgatcgagttgttagccatttgtttaccgcgaacaccacgaattaccattccggtgaaattggttttttctgacttgacaacctgcccttcgataaagttaccttgagcattatgcagagtcattgaccaacgcaattgaccattttcatagtcacgttcgatgtatgtaacgttagcgcgtccagttggtgtatagatcgtccggcctacgatatcctgactgatatttgttgaactaaccaaaatatcatattcgagactgttggagctttcgatctcaacggaaacatcttcgttatacagcaatttaaacaggaacgtataacttgcttcgatcccttttgttgaatagaaatcacttgcacgtgattcgaaaaatctaaccactgcctcacgtttggttttatccaggtaaatgttacggcggttgatttcagaccacaaatattcaacgttgtttttctctctcggatacttgttccggatgaggttcagcaatttgttatagtaactgttgcttcccaacgaaatgtattgcagatagtattcaccaaatttttcgaactgttggttgtccagatagctttgcggagcaaaacgagtgatcatgtgactcagatcagggtcgattaatccaggttcaatatccggcgtatatgggttttcacgttcctgattaaccagacttgccaccattaaagtgttatcgggtttccagaaaatagtgagttcatcccttgcgcggtatgacagttcatagaatccaattatcctaccacctgagcgatacaacagaacaccgtttgtgtacttcgtaaaaccagtaaacttgatattattcaagtagatagtaactgttcctttgtcccaaacttcatggtttacacgaatcgttgacgcaggagacgcgctatcagtaaccagagtatacagggtttccggataaaccaccagaggacggttatcattggtgatccatgtgctaaccttatcgcggaaatgccagctaaagtttgcttcattgtagtactcttgcggcccaaagttccatactgtaggatcgttctgatttgcacgaactgtagcaaagttaatcgaaatgctcgcagtataaccaggaacaagatcgtatttcaccgctgaatgcacatcttccggatacttttcaaccagatctggatctggcaaagtgcctggatatttgtagttaccaacagaaatgtaaacttcatcgccattggttgacatattggtatattcatgagtgatataaaaacgttcatcttcggttttaccataaacacgggtaaacgtctttgcattctcatcccacagataaacgccagcatcgtttgatgggatcacgttagctttgacagtcggatccatcatcgccgttttaacttcaccagttaccagaacgtatagacggtcattcagcacgtccatttttttaacaacaattttatcatttcctggtacgatggtatatgaaacttcatcaaaaatacgttcaccaaaggtcggcgaaccaggatcagtatcaattggtgtgttacgtaacgcaatacggcgcataacgttcttagcagccacgtagagccattcattagaacaagctatagcttcggcatacttcgacactcctcccggtagacgcgcatatgtgttgtatgaatcaacatcaaaatctaaccctgactggttccccagcttcgcaaacgttacatcatcagaagaaaaacgaacttcatcagaagaccaacgaatatctgttgacgtgcgcccgtaaaatatgcgatcgtatcctaacacatacgtagtgttagcgctctgataagcaacggtacgggaaaccggattgcctacacgatcgtttaatgctttgtagtaataccacgtttggcctttgtcatttgacactttagccatattctgaaaacgttcaaacaggtaaagcaatccgtttgagtataccaggaacgtgcgatctatatcattacaaacgtgttcgatgtgatcttgaatttcatggtagctttcttgtttcaggatcttatcgctgatctggcttacatcagaatacaggggagagtatacaaaatcctcaaccatcagagaagccataataacatcatcgttaaaatcgacgtaatcacgattgtttttggcgaatttttcattgataaacgaatcagcaggggtgaattcacgcatggttgtatatgcgtaggcgttctcatcaaacgtccataattcatcgctgatcacccaatcagaaggttcaaacccttcatgagttgtttgaatacggaatttataacgtgtatttggggcaacctgatcgctaaaccattcgttttcgtagctataacccaactgcgtccagattaactcttcgtctggaataatagttccgtccatatcacggctacgggccaattcaaccacataatagaaatccatgccaacatcatcccatttaaggtaaacgaagttagcagccagcttatcaacgcgcaaactcgtaatcgaaggcgctttaatcattatatttctccaaatttgcggttatgtatatcacgtatttataaaaagaaaaacccctatccgaagacaggggttaacgattattgactgataggattcatagtcaatgtggtgtattgaggacgcaggtcattttcaaacacgatcaacgatccatcgcgagtaaaaatggtttcttcgagaggctttgcggttagctcgatataagcagcactgaaactatcggcggatacgttcagaacgcccagatcaaagctaatgaaatcggtataatgagacaccgatccgacttcgtaatatttattacgggttcctgcatctgttaatttttcaaagtcatcacctgtataagcagcgatcgaaatatccccatccttgaacgggcctattacaatttttgcgttaccatcctgatccatttccgtagaagcataacgaacatcataactttcgtcttcttcgttggtgaacttgaacgtactggaaatgattgatttcgattccacctggttcaagaaatggatcccagacataggagcactgtaatagttgtcaatttcgcggagcaatttaatatctgcttccgaaccgataatagaggtatcagactgatcgacataagtcaacatcttagatacactgaaagatttgttgaaaatttcaacgttgtcagtatagtaagagtcgatcgacgaaataacctgaccgcgtaaccattcctctgattccgtcaacttactgatatcatacgttacttttacagattgcacaatatacagatagttaggatccataatcgacggggtgatcgtcgcgaggttatatttcgaaagatacgtttgcatatcttctttctgtaccgatgttaggcgcaaacctgactttggtttaacagaaatgaaagcataaccgggtttttcgttatcagtaaagcactgtaccgcctggatgatagatccaaacctgtgagacaggaaggattcataatccgatgcagttacacaacggcgttgtgtttcacgcataacaggggccagttctcgaatacgctcgatatcttctggatcaccaccaccatcagcaccgacataatcaggggtgttggttgggttctctttaatcgccgtgatgctaatattggttaatgtatcgacatagataaaatcttttgcaccgttagccgcttccccatcggttgacagatattcaataacgatagtcgaaccattagcaggtttcaagcccccgatatattcggcggttagtgcgccacccgccacttgttgacttgcttcaccttcaccgaaataaacttcggtatgtccatcaacagtttcacgcatgtagtaaatcgtgcttgcgcctgttgcgtttacaatgctttcgtttgtccagtcttcccattgtgcgccgtttacagttaaacgtacctgactacggtcaatgtttggatctcggatcaggatacttgaaccgtcataaattagttcagtacgaactaaacggccttgcaccaggttcagcattgatgtatagttgttattactatcacgaacgataacaacgtcatccgatacaacaaaagaataactgtctgtattctttacagtaccgatgaattttgtaccgcgcgggatacggatcgatgttggggtcagtgggttagcagccgtaatcattactgctgtgcttgcagccgtgcgcgaatctggcatataccccagttcttgagcagactgtacaacagaactacgcaatgcagccgtgcgaataaacgattcaaatagagccgtgttacccatctgctgaatataaagagtagcatacgacagaaggtcgatcagtacgttcattcgcgagccggaaaaatcgtaatccttaaactcttcttgtccacccagccaatcaatcagatctgttttaatttcttcgaaagtacccccgataaagatatcggggatttggttaatctgttttttgacagtcttagtcttagcagtagccattattataaattcctcttgatcattcgactatttagtatttcagtactggaacacatacactaatcgaaccgaagttgattgctaatcctatgagagacagcaatttattcacatattgtgtgactttactcaacgccaacgtacaaatttggttatagattactttgcagtgatctttaaacgagcgcgaactatcaatgaaatttttgtacagagactgagcaccagtaatcgcattttcatatgacttgagaagatcatcaaatgcgacaccacagaagcctaaaaactcgtttattgtactcatcaaaggcaatttctttaattcttccatcgccatgctgtatgtatctttcattgcgtcttgtagagatccaatctgttcctgtatagcgtcatacgcggcctgtgttgcagctacagcagcgtttgcagcatccaatgcagattgataagccgctgttgcttcgtctgttacagcgccccacatccagtttaagtactggttgaattttctctgaattgcatcacgttcgaaaatctgattttttaacgttttgtaaagttcctgcccttgttcataaagccctcggatctgttcgtatgactcatcaataaaagccttgactttttcctgtgcttgttgatacaaatccattgcagtgaatccggggaagttaccgcccagaattatatcaagtggtttgatttgcatcatgatgttacggatagccagcaccgcagaccataacgggtttggaacttccggagggatagcccatgtttgcatgatccgaccgtataagtcgattaatgcaacgcaaccgttttggaacatcgttaaacaccaatcaaataacgcgctacacgcatccacaaggtcgcgagcgccagctttgacatattccacagagtaattgtatgcgcttcctatggccccgtatattgcgtttatgacggtttcatatgtttgttgtccggatttgatgattgcattaaatgcatctttcaaagtctgaacagaattatcaccaaacaccagatcgtaaatgttgatcgcaacacctaagatggttacttgaggcaagaactgattaatcaatccccatgcaccaccgataatgttaaacgcagcgctaatcacttgtctgaaaactttcatagcagtttgccatgcttgctgtgacaatgcgagcgcccccgccattacttcttccatcgatacggataacccgtcaaacatcgtcgcgatcccgaatccattctgtacagcacccgttaacatgttaaactgtagcttgaacgtattacgggtttcgttccatgcctgtaacatagcatcactgatatttgtatatgcgaaaccaacagttgccggaatgcacgaaatatcagcacggcttaattcactcggtaatgctccataagtggaaggcattgcaggaggaacaggaggaatgcttgtatctgcgttggtgttaacctgcatacccgtatatttgcactggtgcgcccctgtttcgtcatgcttcatatatgctatacgattaccattccaataataatcaatattggtgaatgcgccagtgtcctgattatacgcctgacgtatgcgagcatcacatacagggtttgttccggaaagatacccgccactgttttcaaccttatacatagccagttcgccagggtttttgtataggtttgattttgacagatccgcgccgtaccaatcattaccaccattgattttagttgcaccgatggatgtaatgtaagcatcaatctctgcttgagtgttgaaataatagccaatcttcggaacaaggatccctgttggttgtccggtatttggatctgttcccggtgaattgacaacaggtagatccgtgcttctatgtccgaacggttcttgagtataaagatgagtaccgattttgattatctcggtatcccactcaaccccaacagccggataattttctgtatgcccttgccagataacccgccgataatagccagcggggatctcagcatcacaaggatgctgataattttgcataattccatcaattattgattcataatccataatcatttaattaccccacttggacggtgccgccagtgatttttgttaatgcgccagaatcaataaacgtgttattcgttgctttgatattgatatctttagcaccgatatccatcgtttcttcaatctccattttcgcattttttgcagtgatcgttgcgtcttctgttacagctacggttgcattctgtttcacatttgcggtaagattctgatcaacgttaactgttgcatctttgtttacagttagttcagcgttacctttaatcaggccaacgtactcaccttcaacagtttgttgaacgttgccacgaacaaactcagttacgttaccatcaaccgtttgttgaacgttacccatgttgtaaatgaatgcgtcgccttcaataactacctgcaagttgcctttaacattgagtttccggccctgcatcacaatttgataatcatcccctacgattttaacaacgcgggttccatccgggcgaatttcttcgtaactccctgctgggtgaacacggttatatcgttcgtatcctggggtatcatcgaattcctgaatgtgtccggatctcgattcaaacaccatgttatacggatattccgcattataagatgatgctggttcttcaaacatcacacgggtatcaccaggagtaaacggatcttccggactagtagccgacaatgtagcaccgttatacgcagcgtaagcagcactcagagagcgcccttccggatctggtacttgcaccccatatgattcaaggttgcccgtgaggacgattttagacacgcgagaagaacggcctggagtttgactagcccacagtgaattgcgaagaccattataagccgcttgccaatcttcatttttcatcgcttttagggtattggtgaatttagcaacaccaccgacgcccatttgaaacgacatgttttcgatcgccatttgacgaggacggtttaggttcacatacacttcacggacgttagcggttctctgaatatcagatcttactttggctaaatcttgagcaaataaggttgaaacctcttctgccgtgattgtcccgtttgttacttctcgacctaccgctttactgatcgcagcgttaatttttgcagtgtcgcgagtcttttcgcggataagcaaatgcccgatcccaattgtcggatatccttcactgtctgtataccagcgtgtgcggatcccctcatcctgcttgagcatcttttcgatcgtaaatccacccgtatcagggcggttatcttctggtatctcatccagtgggcgatcgtctgggtttactgctatgcttgtgtttgaatcacgaatgatgacacttgatgatcctttgcctttcaaaccacctaaagcaagggagttaacatcgttaccaacatagcgagggtattcacccataggatcgcaaaaacctttctgtgtgtctggttgttcgacatattcaccagcgacagtaccgattatcataccatcttggtgccatttgtcacgccaataaccaacaacaaaggatccgcgagtgataccagttggagagaagcccacaccagagatcgcagcgcttctaatatcctgaataggcatcatccagggtaaatcttcaacaggaacaccgatcgcatcggatttttgtttttgggctgggtgttgtccaaatacacggacttgaacacggcccaacccgcgcggatcatcaacgttttcaaccaccccatcaaagaaaggggagtgtaaatttccgcctaatttcatgagttagccttttccatttctttaataaaatcattcagaaacgcctggatgtcagacggactaatgatttttattgttcgttttgcttcattttgcaacactgcatcttcataaatatctacaggagctaatacaccttgatactgtaaatacagcattggtttgtcacctttgtcataccaatgaccagggttattggggtcttcgacaaggttataatacttgttgttgttttcatctacatgatacagaacctgttcaccgccaacctcagaataacgctgtatagcgcactgatacgcggcttcctgatcggagatccaaccatagaaagggtcataaacagagttaagcatcaacaggatccagtagtattgctggtttccatataatgattctgcaagttgttcaggtcgtagtgtgcctgttatctggtaactacgggttttatattttccaatcacacgattaaaataaaatcgatagtctcggaaaatatcagttgtctgggtgcctttgtaatcaacaggcgggaagtatgaaaatagcacgataagttcccctatctaaacgttatattattctatttaggatttacgcaatggctggaagacagacgtataaagggtcgtttgtacccgaaaacatacagaagtataaaggcgatccgcgaaagattacgtataggtcatcgtgggagcgctacgttatgaagtggctggataaaaacccacacgtaaaacgttggaattctgaatgtatagtgatcccgtatttctgcaatgcagacggtaagagaagacgctattacatggatttctatgtggaaatggaaaatggtactacatatctttgggaggttaaaccccttaaagaaaccatgcccccaccgaagccagtaaacaacaacgtacacaataaaaagaaatttattgatgctctttacacctatacagttaatattgataagtggaaagccgcaaatgagctatgccgtcaaaaaggctggcagttcaaaatcgtaacagaagaatcactcaaaaaagtttttgggtggcgaggtcagtaatccctggagggaaacatgagttttatttttgagtttgagatcatcgcggaagaggataaaccaaaagcaccacccaaacgcaaattgagtgattgggttgaactggggatcaaattccgcaaggcaaaaacgaaaggtgtttctgctaaacgttttgccgattctgagggattaaactacgcaacgttcacaaagtcaatgcatcgttacaaaaaacagatcgatgatgagattgaacgacgttccgcagagacagaagcccgtaaaaaacgtaatgactaccgtaaaaaacacgggatcgagatcatcaacgatttccgtaatagtctgaaaaagatcactgttggtgtatcagcagcaaagcgacagaaagattcaacagaatggtttggtaatttcatcaaaaccagtatcaaaacacaccgtgtggcaaaaccagcaacgggtcgcctgtacacgtttgcatatgatgcaaaatataaagacaccctgccgtattgggatagatttccactgatcattttcttaggatccggaagatcgaaagcgggtaacttagtgttctatggtttgaacttgcactatgcgccacccagagcacgacaggagtttttagaagagttattgaagcgagggtacggatccactaaacgcctctctaacaagactgtactcaaaattaactggggtaacgtgaaaggtatgcgaggcgcaacagaaatgatcaaagcatatctaccatcacacctcaaatcaccattagcagagattgcccctaaagattgggcgaaagctgtttggctaccgactcagcaatttatgtccaaagggaaaccttacggcgcgaaaaaagtctggagcaaatactaatcaaaaagccccaaccgaaaggaaggggctttatttttacagggtgctaactatttctgcaagtttgccaggggtcgcaccaggtctaactttcatagcatctttcaggtttttgtcaaccatcttttctgcatctttttcgttaaacccgcgtttcaccatcacagcaataactttttcgcgaatgcctttagccgcttcattcagatcttcggattcagccagaaccagtttagaaaccatatcgcctttatattcttgggtgaattttttaccagatactaggcgaggtttgccggaagcatcaactacggtaaacactgcatattcaccgcttgctttagttttagaacgcccagtgtacagaagacgcatatcgttgcttgggagtttgtaaactttacctttcaccagagcttcatccatagggatctcgatttcgaaatcttctgctaactggttatacagatccagattttcttccgcctcttcatacagagtagcagctttgaatttttctggtttgtcgaaatccagatcatcatccggattgccactgtagaaagaaacagtacctttagcccaatcgacataagccgcttgaactttaccagtagtcatacctttcaaacgtacaatgtttttaccgaagtatgccagatcgtgagaatccggtgctaaaacttcgaaatcagaaccatgtttgaagtgaagaaaaccgattgaatgtttatcggaagttttagcgcgttgaccacgtgctacggtacgagcgagggttttaccttcggtcagaaattctttgaatttcttcaagtgagtcattttgtttttcctgatttccaatatgggaacatagtaccagtatttagtgacggggtaaaggaaaagttttcagaaaaagcataaaatttattagatctaagtattgatcttcataaaaatttatgataaaataaaatattaatatattatagatcataaaatttatgaattcaagatcagatctaaaaatttttgataaattatttattaaattttacttgatcttgttagatctttttgataaaattttaattaataattattatagatcaaagattttaaaaggtcaagcattttcttcaaatttttatattaccccgtcaggccgctttgatcccgttccccgctaaatagaggaaaggagatcctatgtctacagaaatgattttaaaccaaatctcacctacaaactttcgggttgatattcctgataacagttacatgaaaggtttgactttacaagttcaaggggttacactaccatcaatgaacctcccagcagttgatattcctgcaaatatgatggttcgaggtaaagtacctggttcggcttttgagtttgatcctttgatgatccgctttgtagtcgatgaggaaatgagatcgtatcttgggatttacatatggatgttgagcacaaacgattacaacgagtttaactctgttgcgtgggatgatcctaagcaatcattcgctgtgcatatcctggataactcccagatgaaaacgatcgccacatttagattttatggtgccttcccaacaaacttgggtgaggttgaattgggttatactaacgatagtgatgaagcggttacgtgtatggcaacttttggcttccttcatatggaagttgaaattgacggaaaagtagtcacttctcaaaagagaatgagctaatgatttatgtgattagtggaaaaaagcgaactggtaaagatacggttgctaaatttattcaagaggcgtacaatgatgttcagtgtgaagcactggcatttggtatcaaaagaacgctaagaatagcaatgcagcgatatggttacgataaaccatacattcgcaatatgattgaaggacaatattctgatccggatgctattttttacaaaggcgatcgagagaaacctcttgtgatgtctaatgaagatgttctaaatattttcaaaatcgggcttgaaatcctcaaagaacgtggatacaatattgtttatagtcctgatgatattgataacctgattatgagtaacgatactccctggagtatcagacgcttgatgcaagtgtttggaactgatatcgtatgcaagtatgataacacggtttgggttcgttacacgttggaaagattcgtcaataaatatactggtgacgaatacaaccatcttctggtcactgactgtcgtcaagaacacgaatacaaatacctaaaacgcttaggtgctaagtttgtgtttattgtaaaggataccggaattgttgatgaacattccacggaaaaaggtttgacacctcaacctggagatagtatcatcactaacgaaggtactttgaaacaactaaagagcaaagtgctcgatacttttaaattttaacaatgggtaataaaatgtctgatattcaaaaactgcaaaatgaagtactggtactgaaaggccgcgcattcgatctgaacgaagttatcgcgcaaaaagaaagtgaactctctgttcatcgtcaacttctgtccgacctgtgttcggtactgggtattgacgcaagccagccagtaaccccagaagcggtaattggcgcggtatccgctctgatcccttccgttgaagtcgaaaaagtcgcggaagatgaagccgcctttggcgaagaagcgtaaaaacaaatttattacaaaggggctacggccccttttttattggggtgttttatgaaatcatttcttgaaatcacaaaacctgttgtagatcctggtatctacatgtgtgctaaattcgatcaggcttcatgtgaggctttgaaaaatgttcaaaagacattaggtatcacaaagaatgctgtttcagccgaaaagatgcatacaacgatcgtatacagccggaaaacggttgatttgttcccgcaacaggacatcacagaacctgctaaactggttgatgttgaaaagtgggacacaaaatacggtagcactattgtagggatcctggaatctgaatacctgcatagccgtttcaaagattctattgatgctggcgcaacatacgattatccggattacaagccgcacgtaacccttgcatacgattcgatgcttgatgatatcagcggagtgaaaaggttgttgacactgcccgtggatttgactattatctgtgaagaggctgaatcactggatctggataagtcgttaaaagatattacagaacacattgaacagcgtggcgataagtgggttgttttgaatcacgatcgcacaaaagaacttggtgaatacaattcgaaagccgccgctgaaaagcgtttgcgtcagatcgaatacttcaaaaatcagtgaggattatatgaacagaacacgtttaatgtatcttgttaacagtgtacgaaaagaagttagcgaggcgtttactagcgcgttaggtgactggtatacaatcaaggtagcggctactgctgaccacatttcagatcgctttaaagaccgttcagtatcgattaaaaaagatattgaaacttatcgcgatatcatgatgagtctagcaaatcattattcgtgttatgttctaacctacgctgtgaaggccaaaacagaagggacacaggaagttattgtttatcgtcgggtaaatggtaaaatctttgcttgtcctataactgttcaaatgttctttaacgaaggcgaagagaagccagtgatcgctatacggttacgaacggtgatccctgagtatgtttctttagctaacagaaaaacaatccaggtcaactacgttccaccaaaaattaattttgaatacgacggttatcgtcgggttatgtcccgcctggatcgtctaatcgcttctaaagattgtcctccgcaactttggatgctgaaaaattgaaaaaagcccttgcattcgtgcaggggctttgttatattggccttgtcgaaacaaaggaggctatcatgaaactttactggttaattttctcaaacgggtttgttatgaaaggaagtgttcactgtgcaaaaacgtattgtgagtggaacaattgcactttcaagatcctgagtgttgcggtgtaggggattactaatgactggtgataagtgggttgataaaactttgttgttgactttggtttatattatggtaagatacttaatatagaaaaaggaggatatcatgagaaacttaatgaacatcgcagaactcatcgcatacggcagctcactctatgttttggcgcacggtgacggaaaaggttacttaattttctttggtatcggccttgctatctctttcatcaaaaaattctttaagtgagaaatatattatggctaaaccatccggcaaaaaatataacgtcatcgatgtttataacatgactttaaaagactttgaaaacatgtgtcgggcttatggtagttctactacccttcgcgaactggcagagtctgctaaaaatgaacgtcctcatgtttgcccgaaatgcaacggaaaaggttatgaaaccattcgttataacgcatatccgtctgggttgccagattctggatgggtcgaagatatgaaagatttcaacaaagaatgtgacctgtgtaatggtcatgggcgcaccaaagataaatttgttgcaaaacctgttaaagtggaatatgtaaaatcatgaaaatcgttgatttgattaaaatggctaatagcctggtaacaagcgatcattatgccgactattgcgaacagtatgaggtgccgctgcaacgcgcgatcaatcaatccgggtatgatggtgttagcgaaattaccaccgaaaacctgaaaacattcatcgtgtttgctaacaccttctggatgtatctaccggataatcctggtattcgtcaacctgcattctttacgctttgcaccttctgtgaaacgtatttgcctgattgtgaggatttcgaagaaatctatggctaaagtagagttgatgtatcttgataaaccaactggatctgttttcccttgtgggtttgctgatagtgcagaacaaatgatgtctatcgcgttttctcccagcatgaagccgatccctggtttagatgaaaaagtaatgaatgagtgtaaccagaacggaaaagtatggtatactcgacacgaagggaatgttgtttatcactccaccctcgaaaaccttaaatctgaaataggctatacaaaatgaatattgaacatgtatttgcacaggcattagaacagaaattaaacgcagaactcgatctgtaccgttacgacatggaagaacagattcgtggtgatcacaaaaacagtctggagcatgaatccagtcgtcgtgaagtgtggaaacatactttcttcgaaaacctttctgctggtgtgacaaaagccagtgctcgcgctaacaacgcacttaaagcatttgataacgcttttgcaggtgaataaatggaactatcagcgggtattatctttattaaagatggtgccgtgttgatgggccatgccaccgaaacgccccattgggatattccgaaggggcatgttgaaaagggcgaaactcatattgacgcggcgatccgcgaatgcttcgaagaaacaggatttgaagtgttcgcggaggaattggttagcctgggtgttctcgattacacgaaaacaaaaaaccttgctttattcctctatgtagggcaagattacccagtagcggaagaatgctattgtgcatcaactttcgttaagaacggacggactatacgtgaaatggatgattttaaatatgtcccgatctcacagattccgtcacatgcacgtaaaacgatggggcaactactgcctaaaattttagcaagatgagaaatatatcatggaaaatcaactgactttaatcgatatctgcaaatcaattcgcgatgctgttttaaccaaagcatccgaagtcactatttactcttcatggagtgctgaattcggctatgaagaaattgtaaacttccccgaccgcctcaaaaataccaaatggttccgttatatcgatcctaatgagctttcccttgatgaactggaagaactcaatttcagtcgctgggatgaacatagcggcctacgcctgatccctttgtggttgcttccatacatcgatccggaagcaaaggtcatctgcattgatggtaacgaagttctgtttaaagatgcagataatgatcatcgttttggtatgttggcctacggtgtgaaaccaaaggcataatatgaaatacgtcgattttaatactctatctgaaatgggccttgtttggcgcattaaccgcgaaatcttacaccctctggggcttgcgctttcccgtgatgtagaaacaggttcatcacctggcgcgttaatagctgatgatggtgtatggcatttcgacgaactcacaaacgaaagaaacgcagagaagttttctaaagttttggatttacatcaaagcggaaatctgttagattatctacagaagaacgcaaaataggggcttcggcccctttgaggatcatattatgaatggtaagcgggttattgtcgttggtgaatcaaagcataacgaaaaaggcgatcatctgatcattaacaacgatcggggtggatggtacggggcgacacaaataaaaagcggttatgcaacgctggttgaaaaagatgcggttagattggcaactgctaacgatcctgggtattatggtactcgcgaagagtttgaaagcgaaaaggatcaagagatcgcagaattgaaaacacaggttcataatgcgcgggtgtacgctgcaatgtgtttcactgtagcggttatgattacgattatatactggatggtgattttataatgacagacgaaattgtaagaaaccgtattcgtgagttaaaaactttccaaagtcgcgatcatgcgatcatggttggtagttacattcattggttcaagaacaacgatctggatctgaatccgtcctatcagcggccctacgtgtggaagcagaaagagcaagatgctttcatgaagactttgattactgggtttccttgcggtatcattgcgatcgcggttgatagtgaattcaacgaatctcgatgggtagaagtcatcgacggaaaacaacgcttgacaactatcatgaaattctggaacaatgaaattggaataccgatgcctaacggttcccgtttgttttggggtgaaatggaaagacatgaacaacgtgcttttgaaaacatttcattaccagcgcttggactcgatgagtgcaacataaaagatcggttgaatttctttttgaaagtgaactttgcaggggttccacaatcaccggaacatatgcaagcaattttaactatgtatgagaatgcaaaatgaattttacaacagcgccttttgaaactggtaaatggtacttcaaaaaacggcagagtcgtatccatagctatacttgcaagaaagaccatctttactatccgcaagtaatgcaagctatgtgtgacgcagaaggaaacattcacgctgttattgttccttctaataattgtaaactgagcttggttcagcgcaaaattcctaaagaattctatgttctttatgaagagtttacccctactcacctggaagaatcgttatttttcaaacagggtaagcgttacaaggtttctaaccgtgggatcattgattgcctggctgaaatcgatttagggaagtatggtcataacacatcgttacgccgcttcctttcttatggtagtaaccgacaggaacagcagaacgttatctatatcaataaagttgatatgcatggcaacgcgatccacattctgggaaattcatgcaccagtgaagtacaaagttctttccggactaaaattcctggatggatgttgatgtttttggaagaagtaggtgaaaacaaaccagccgtggcaaaggatccggtcgaaacgatgatccagaatcatgaaacactggaagaaacaacccgccgtgaactcattcaggatgaagttgtggatcttccaaaggcagaaggaatcatggtaagtcatgaagatttagccctgcttgatgcggtcaagtttctcattgaacaaagttctgttgattatggttcccgtgctcgtattcaactgagtgcagaaggttacacgtatggtgtagattctcctgaattcctgatcaagtgggccgaaaaacgcctatggttggcgaaactgttaccgtaagaaactatccggtgaatctggatcacgtaacatggatcgaagatgatgcaacaatcatcgttgaagggaagagacacccagcaatcacttttcacctgatttgttcaaccccgattacctgggctggatatgaaaacaaagaacagcgtgataacgctatccatgcgattgagcgtagaatgcagtttgcggagatcacattctgatgatttatcaatcccataatgattcaacgatgcgaatggttccggtatctattgacattccaacaaaaccgcgtacactggaatcgttgattgaaaaatactctggaatggttatttgtccttctaccgcacaggtggcaatggcagaacgcgatgaaattgtatttgaatgtgatatgaaaggttatcacaccgttgaagatatgcagatgattgaatatctctggggaatccgaaacgctgtagtacatcacatactgaccgctgaaaagaaagccgaagccgtgagagaagttgaacagcgcgaagagatccgctataatcggatgtctgcacaggaaaaggatgaagcatatgaagtgtaccgccgtagtcgatgaattaatgagcgcgtttaaaacgcgtcgtacagatgggcgtattaaagatccgaagtcaatcgcgatcatcgaacggtacgcgatgaagttaagcgaacaggaattcacgccaaaggcgctcaatagcctgatggttctgaaactgctgatcgcttcgggtgacgatatgccgctcgatgaatacagtgctgaatcattccaaaaggcttatcgttcatggggagtgatttactcccgctcgctgggttcgtatgactcggttatgtggaacctgatgcaccttgataagctgatctgggaagtgcttgaagaagagggatttgtatgatttttacacataccggaatggttgaaacgataacagcaggtaagaagcgtatacccttgatgaaatcggggaaatactggaagagtgaagaacataagtttgatcataatggtaactcatttggttcttcttatgctaaactacacctgaaaaccattaaaccgatttaaaggaaactctatgttaactaatgaacttagtggggctattcgtaccattgaagggatccttcatgatttgcgtatgggtaacgaaatttgtgtaagcgacattgaagcaaatctggttgaatggcgcggcgctctgtatggggcaacacaaggaaaagatccgttgtttacggaatatgatatgtatacagtaaccattgacaataaaacttatcgttttcagtggcctgatgatgcatacgatcatatcaaaacattttacagtactggaggtgctctttttgctaccagtatcggtgttaacgaattgccttttcatcctgatggattgagaccttccgatcatttaggatgtacaactgtgttactgggtatgtgcggtaactattctgatcccgtttactggattgaagccagtaaaaccaacttaaaaagagtttaacatgaaatatattattgctttggtgttagtcgttattgtcgttttagcacaatccggatgcaccgatgagaaagaagccgaacgtattctgactgctaacgggtttaccgatatcacgtacacaggccgcgcctggttcgcatgtgatgagaaagacacctacgcaacagggttcgttgctaaaagccctacaggggtgaaaattgaaggtgcggtgtgctctggattatttttcaaaaatagtacaattcgcttcaaataagtgttgacgtagatacggggttatgagactatagccctgtcgaaacgaaacacactttaggagagaaaaatggacatcatgaacgaaatcttagctcacatcgaagccaacaaagaagcaatgaaagctaaagaaggttgggttgttgttgacgattgcttcaatcctaatatctggactccggttttcatcgatgagaacggtaacgaagcccacgggttctatgatgccgcaatcttcgatactgccgaagaagcatgtgatttctgggcctacgttagcggtgatgctccatttacaaaatacggtgtgtgccgttgctgtgaactctaattaactagccccgaaaggggcttttttgtaggtaaaattatgattacgaaagcacaaaggatcattaatcatttagaaacagggttcccgtaccagggagatttaacccgcgatattattgatatcctttctgaacacgacggcatgaaggccgaaatcgaagaactgttacatcctgatgctaacgtgtttgcttcattgatgagcgatgtagtgaacattgacgccgatgaacttggatgcattgaaacaacaaatgatggtgataaaaccatactgaaacaggcttgtgaacggatcgacaaccttcatgatcgtttgttcactctaacttttccgtcaaaaaacgataaaccttgttgacattcagaaaataaactagtagtctgtagttacaccaattgagaggaatatattatgaaaagtgcttttgaaaaacgtgctgttaagaaagatgttaaaccaggtgcgatcatgtatgaagtattctgcgtggacggcgaaaaggcggaaatgggtagaaagatgattgttactggcttcccttatatgaatcgcggtatagggctgtttgcaaaatgcatcaccctgtttgatgactgggactgtcacacacaattctctcttgacgaccgtagtatgaatgggcgcaacggatataacttccatgctttcttcctgaccaaagaggatgcacaggcttacattgatgaagtcaatgaagaccgtcttcctcctgatatgaaagagcgaaaagaagaacagatgaaacgtaaacgtgaatttgaagaatgcttcggtgatctttacgattattaattatcgaacctcttaaaccataaataccctgtgtacccaaacagggtatttttacaagaggtgatttatgtttaaattcagtcaaaaaagccttaacaaccttaaaggtgttaaacctcaactggtgaaagttgtagaacgtgctctgcaactgtctcctgttgattttggtgtacgtgaaggtctgcgtactgtggaacaacagcgcgagaacgtccgtaagggtgtatctcaaacaatgaactcaaaacacatcacgggtgatgctgtggatctgtatcctagcgtattgcctcaaggttggcaaacaaaccctaaagtgtggttgcctgtcctgaatgctgttaaacaagcaggtgatgaactgggtgttaaactgcgttttggtatcaactggaaaaatgacccgaaccttccgatcgaaacaaaattcattgatgccccgcatgtggaattagcgtaacaaaggggctttggccccttaaaggtaaaacatgaatagtgaattttatgtaaagacaattgaagaatgtcgtaagatgcatcttatgcgagagttggaagaaccaacgcataattacggccctaacgattttatggtattcgaaaccaggctggatctgggcagagaaacgcaaaagactaaaggcgcgtttgattttatgaaacgttccgatagttcccttaacatttacgtagcgcatacgttaaatgcagcacaagaagccaaacggctacacggtgctaccggatgtgatgtattgaccagtaaaggggcgattcttaatcatttccgtggacgtcgaatagagcaccaggcaataaaccttatttttgatgagtgtgatctcacacacaatgaacgcatggacattgtatataatacaatcatgcattgtgtacaaaagagacacccattagcatatattcacgtaatttcgctgggtatgtaatgaaaagtcatggctattcatcaagaaccatacatgaagagattcaagggatcgaatctcttctgaattttgtagatgttgatacatctacaggtaaagtgtattggaaagttcagcgcggccctatgtctcctggaagtgaagccggaagcaaaaacgagtattcccaaattcattttaaaggttctatgtatttgcgacaccgaatagtgttttacgttgagaatggttatcttcctcctatcgtagatcatgtatatggtgttgagaatggagatacagcaagaaatttacagaaagcgacgaaccagcaaaatgcgatgaaaaagaaatgtaactcaaacagtagtacagggttgaaaggtgtttcttatcataaagccaatgggaagtacaaagcgcagataaacatagatgaaaaaagaaaatttttggggtactataacactccagaagaagcaaaatccgtttataaccggaaagcaaaagaggttttcggtgcattttttaacgaaaccacataaggttaatgtatgtcaaaatacgtattagacaccaatgttttgattagtaacccctattcaatctattcattcactcaacctggtacagaaatcattattacctctgctactatgggtgaattagatcacctgaaaacgaaagaacgaacagcgcacgaagcacgattggcgatccggcttctgtcaaaagttattttcggtcagtcatatgatgcgattacgaaatcaggtattcctttaaacctgacaaacccagcactgtctgacactatcacccttaaagtggttgattatgtcggaaacaaaacgtttgctcttgacaagcaagacgaacgaatcattgaaacttgtatgcaacaggatgcaaccttagttactcgcgatattatgatgttgctgatcgcaatgtcccgtgggtgtaaggtagaacagtatactggcgacgatacgttaaaagatagcgatgtattgtattccggttacgtagagatccctgatttctgggataccgtggaagtgttgggatatacggataatgtagcccaaatcacttacagttcgcttcctgacgaagatttttatcctaaccagtacattacctcaaatggtgagttagtcgggcgtgtggtgactgctgatgagatttgcttgaatgtcttacctgttaagcacgaacaggctatgaaacgcaaactcatgaaagctatccagccccgtgattctctgcaagcggcttttgtcgaatccattatgagcaatgaaatcgatgttgctaccattatgggcggcgctggttctggtaaaacaatgcttgctgtttccggtgctatgcacctggttaatagtggacattacgctaacttgatgtatgtgaagtcagatagcccgttatcaagtgaaattggcttccttcctggtacattgggcgaaaaactccggccttctatcgaaccttgtattactagcctgaacattctgtttaaggataatccggaatctgaaaaatacattgaaggtttgattgaaaaaggggtggtgcaattccctagcctgtattacttccgtggtcgcagtatcggacatccggatccgggcaaaggttctgtgctgattgttgatgaatgtcaaaaccttagcaaccacgaaattaaatctatcatttctcgttgcggagagaacacacttctgatactatgcgggaacattaagcagatcgacaaccctcgaaacactgccgttaacaacgggtttgtatgggctgttgaaaagctgaaagaatacgaacactcaagccatatcattcttgatacagtgtatcgttcccgtctcgcggcgtttgtcgaagacaatttctaatgatggggtgaaagcccccttttttgtgaggtgtatatgattactgttatccatagcccaaaactgattactgtttgcagttgctgtaaaagtgggttagaatatgaactatctgatatacagcaaaagagagaatcgatttacaatggatttttctctgctgctgattatgtcgtgaaaaaatttatcacatgtcccaaatgtggtaactctgtgaaattatttttgaattgaggtttccataaatgaaactagaaaaacgttattatgtagcaaaattgagcgatcttaaagaactgacgccagaagatttgaaaacgttcaacgaaatttgcacgaaaatcgaaatcgggcgcgggattaatggtaagaaaccgtttgatgcaatcgtgatcgagaatgattggcccgaatacgataaagtgttggaaatgctgacttctcgtattgttcgcgaagaaaccgatcgcaagtttgaaaagatgctggacaacaaagaacgcctcggatactttttcgttgtggaaactcaccagggaacttttctgatcaccagtgatgcgcacagcacgaatcgtctgacgaaatacagtgggtacaaataccgcgcgttgttcagccctaactgtggatttgacaacagtgagatccttactactagctggagcgtctactttaaacatgccgttatggtatcgttagatgaaatcattgcactatacgatcctaacgaggctatttcaaattataacattgctgagtttatcaacgataaactacgtgacgcgaaaactatctaaaatagttgcataaatataaagtggggtgtattattgccactctttttgcaacataggtattaaaatgaagaaaattattattgctgccagcattttcttgtgctctttttctggcaacgctgcgacggatccgctaggggatttcattgcggatttgcctactcatcaattgcctttacaaaaggctactgtgaagcctccggcaaacaaaaattctccatcctacatcaaggatttggataatatcacaccgaagcagaaagaggttctggagtatgcttatcgagttggacacaactatgatttgaagactgcaaaacctgtagaaaaagataaggctaaacgtttaggttatcatttagcggctattgtctggatcgagtctcgcgcatgtgagaatgtcggtaaaggtaaaaaaggccatcacgcttatggatgctggcaagttaccgcaagtagcgccagcgcacgaatggataagtcatatcctaaacgcgtagtaatcaaaaagctcgaaactcttcaaggtggatcgaagtatgcgatctatgaactggagtactggcttgattaccacaaaggcgacttgaaaaaggcgctggcgagctataacgctggtttcaagtatacaaagaaagaagcccgtgattatgctcgtatggttaatacaaccgcgaagctgttagaagaaaaacaaatcatttgacaaaaagcccttgacttcggtcgggggcttttttattatgagtgcatctaattgagaggaatacattatgagtgacctgatcctgaacgaaactaaacgcgtactgtttaaagctggttcctacatcgtagcgactccgaaaggcaatacttcccattgggcggttgctgattggatcatgtacatcgacaaaaacggggaatgggtgcaatgagaaatttagctttcgaagtgtccgtaattgatcaacggataaaagaacttcatgcgaagatagccccgctgcaagaagaaatttctaccttgatcaaggagaaaagagacctgattgaacttatcgatcaggatatcattaacaacgtcaaggacggggaaaagatccctgtgatgttggaatatcgttcttctagtgtgtcttatcacgcggcgacaaaatttttcgaatctatcggcctgggtatcgatggtatggatccggacattaaccaatactgtttgcggattgcgatggatgaagacggttcgaacattaatcgagtgttaaccgctttagaaatggttgaaccttttgtaaggccgcaagcaaatgggcgtaagcgtttcgatctgttcgaacatactctgtctgaatgggattgctactggctgacatacaatccagctaacaaacgttgggctgttgaaactggtagtgggatgagacgaaatcaggatccgacattctctgatatgtctctgaaaaaagttcttgcgtatatctgcaatgcgcattattatacccctatcgaagaggatgaataaggaatcatcatgaaaaagttagcactgcttttaactctggttgctggatttgctcacgcgggtgatgctcgcctggatgagttatgcaacaatcgtgatatcaaagatgtcgcagtatgtaagcaagtgatcgcagaacagttagatgttgcttatatgtggggagaggaaaatgctcacctgtataaacgcggtaagttgctgaaacaaaaagagtttttgcagtctgaaccaatgatgaatctatgcaaacaagcgccaaataaggaacggtgcgaaaagttccgtacttatttggttgacgaattcaatgctggcataggactttactaatggctatctggatttttattattatggcggcggttgtggtgttcttggcgtacaatgctggtaagcatgagagcactgggccttgttactattgcggggatgatgactatgtttagtgctggatactttataggcgttgttatcggttttataatttttggtggtgttttatatatgtgtcatcaagaagatcgccgccgtgaacggaaagcgagaaaatgagcgtaggggttcaattcactgtattgtggatccttgtgattttgatgggccttgttgtggccctactatatcggaaaaataaaaatgatcattaaagaagtgaaaggtaatgctgtcaatatgtatctgaacggtgaaggccatttgatccacggatgcaactgctattgcaatatgggcgctggtattgctcgcgaaatccgcgatcgtattcctggtgcatttcaagttgatgccaatacgttaaaaggttcccgtgataagctcggaacttgttctgtttacattggcgaaaaaggcaacattgttttcaatgcatatactcaatatgatttctggacacctgggccgcgtgtcgattatgacgcaatcggcaatgcttttaaacaggctgtagggcttgctgacgccgttaagactggaaagcctatcatcacacctttaatcggtgctggcctcgctgggggcgactgggaactcattaagcgcattattaatgaggtgactggtgattacccgatcattgtcgttcatttcgatcctcgtaaggcgaattaatcatgatggatcctatcaaagcaggtcgggagattaagaaagcgaacaaacggatcgccgtaatcaaaggacaacgcgccgcactggttaaaacctgtaatgcattggcgcaagcgatgaaagcgaataacatcaacattatgcagcgtaaagaaactgttaatgttctatgtatcgttgacaattgtctgagtaaggaaatggacgaactgaaaagtaaaatcaatatgtggtatcttgatatacatcaagcacaagataacgaaatgagtggttataatcatgactgacaaaatcaaagctaaagcaatgaaggtgattgcgacatacggaacactccgttggtgtaacgcgcaggtgtgcgggtgtatgggttgcgcaaatcataccatgacaaaagaagagtatgacactgcgatccagatgccagaaatcaaagagtatcttgcgcgacataatgaaaaactcatgggtaaaggatggttttcaattggctaacgcacacattatagaaaaagttcgttgtcgggattgtcatttccctttaatttgcgtaatgaacattaccaaacccccttatgatgagtgggattggtggatctactgttcaaacaaaacatgcaaaaaccatgaaggggaaggaaaattccagaataccccagattttgttgagaggataaatggctaaactgtattttcattatgcatcaatgaatgctggcaagagtgctcgtttactcactgatgcatacaactaccaggaacgcggtatgcggatcctgatgtacaaaccagcaattgatacgcgagaaggtaaacagagtatctcttcgcgcattgggttggaagcaacatgcaccatgatcacgcctgatatggacttgtattatgatgttcacaacaatcatttttatagcgacagcccgaatctggtttcttgcgtgtttgtggatgaagcgcaattcctttccaggaaaaatgtcatggatctgtgtcgggttgttgacgaattagatatacccgtaatgacatatggactaagaaccgatttccagttgaacttgttcgaaggttcttatatgttgctggctctggctgatgagatcagggagttgcgaggggtttgtcattgtggaaagaaagcaactaccgttgcccgtattgatgcaaatggcaaatttgttgctaatggcgaccagattgagatcggggcagaagacaaatatgtttcactttgtcgaaaacactacttgcaactaaagaacaaccctgatacagtggaagcataaacaaaaggagatcattatgagtcgcacttaccgtaagaaatacaatcctcttcgtgaccgttcatctaatgaaaatatagaagaagtaaaagagtattctcgttattatgctcaacatggtattgatccggatgggttacgttggtacacaaccaactggaaacacaaatcaggatgtgcatacattcgatttgataataatctgtgtcgcgacggtaacaaagctcatggcgatctgaatgcaatgctttctattgcagtaaagaaaattgattcaaaagtacgtacccgtttacgtcaggaactgaaacgtatgaaagctggtgtgatcggttgggatgaaaacgtagaaaacgtgaacaaaatacgcgctttcgaaagaagtttgtgttggtatgacattacttgattgactttacagcaaaaatattataacgaggcttcggcctcgtttttgctataaatatatacaggagtagacctatagtgggtctatgagtaaaagagtaattgttatgaacattaaacgcatatcaatggctgtgctgttcggattgttgatgatgacacccacaacacacgccgccgaccgtccggttcagaaagaatttgacgattatattaatgcggcccttcaagtatacatcacaacgatccctcccagcgtaaatacaagcgaactattctacaactacatggaacgaaaatggcaccaaaaacaatgccgatctgaatccgaatgcgcaaagctagggattagggtcgcgtatgagtttgcacgtatccatcgttcataaagggatcatcatgcaatcatttaaacaaattacagaatctgagaactcaagcaagatagatgcctttattggcatgtgccttatgtccgttacctatatgcatagcgcacattttgcaacaggttcatactcacaacataaagcatatgagggtttttacgaagatatgcaggatttggttgataaattcaccgaaatccacataggaatcacgggaagatacaaacctgtgctaaaaaccgaaaatgtgcttgacacggtggcgtatctccgtaaaatagccaacgaagcaaacgagatctacgaatcagtagatagttctttgaagaacatcctggacgagattaagggcttgtgctatcaaacaatctacaagctgacaaaactttcttaaaaatagtttgacagcgtgaaatgtgatgatagaataactatcgaattgaacaacaacttatggaaattatgatgaacttaaacactatcgtgaacaacccgaagaaaacctctctgatcgctctgggcgtagtcgcagcactgtggttagtgcctaacatgtataccattgtgcaagacggtacggttaaaactgaaaccttcatgggtaaagtatcaccgaaacccgtactgcccggtttccacattgtaaacccgctggcaacgtttgatacgttcagcaccaaagacatcgcgatgaagttcgacaaattacaggttccgtcccaggataaatttaaatccactgtggatatgaccgtaatgctgcaattcgacggtagcaaagcaccgatcaaccgtatcaacgcgggtaatcaggatcaggcactggataagtatgtaaccgaaaaactgctttccactgttcgcgaatttggtaaatccgtaccaaaagcgcaagacctgtttgatgcgaagatccaaaaccaactgcaaattgcgattcagcaggaagtagaagattatgcgcggccttacggttacactgtgaaacaggtattcttgcaggatatcaccctgccggaagttatcatggaacaggtaactaacacgaagatccgcgaagaacaggttaacgctgctaaagctgaactgcaaaaagtagaacagacttcattacaagcagtaaaacaagcggaagcagatcgtcaggcgcgtgaaaacgctgcaatcgctaacgaacgtgatgctgatgcccgtctgtatgcagcgaagaaagaagcagaagccaacgccgccctgcaacgcaccattacaccggaaatgatccgctggaaagaactggatgtacagatgaactactctacccgctataaaggtggcgtacctcaaactgtaatgggttcggattatgctggtaaagtgattttcgattctcgtaaataatgttttaaagccccctctttgggggcttgacatctaaaacgagaatactataatgaacataaaacagatcgtactgactatactcatttcactattctttggtttcgttggtggattgtttggtgtgttgataattgcgtctgttttatgattaacctttaaacgtggagcacgttatgaaacacaaatatgataaagctgtagtaattggacgttttcaaccttttcactatggtcatgagaaaatggtaagggaagcccttgctgttgctgatacggtttacattctgatcggttctgcttatgcatatccgaacacattaaacccattgaccgctaaacagcgtcaagcaatgatcactcgctggtctatctgcaaacttgatgttgaagatgcagccagaatcaaattcgcgcacattccggattacctctataacgaggaaaaatggaaatcccgtgttcgtatggcaatcgatgaaactcgaaatgatcgaattgcgatcgttgggtacgaaaaagacaaagattcttactggcttaaagcattcggatggaatcatattccggttgaacctgtgaaggttggagaccaggatctatcctcgaccaatttacgcaaaattatctgggaacaccatgaaggctgggacgaagatttgttaaaatatgcgcctagcactacggtttcctttatcgatgaatggacacaaacaaaagaattccagcgtttgtcccatgaagatgcgcactggcaacgagagattgacaagttcaaaaaatatccgtatccggattctctgaactgttgcacggctgattcagtggtcgtatgtaataacaacgtgttagtaattcgtcgtaagtttgcgcctggtaaagatgcgttggcgcttccgggtggacacaaaaacggtaatgaaacgttccttgattgcgcgatccgtgaattgctggaagaagtacgaattaaagtacctgaaaaggttattcgtggttctatccgtaattcgatgctgttcgatcatccgaaacgttcggtgtacttctcaaaaccgactgtagcacagtatatcaagctcgaacctaataacgatggttcattgcctcgtatcatgggcggtgctgatgatgcagcagacgcgttctggctacctatgcatgaggtcgtgcaacgacaaggggaattcttcgatgatcatttccagatagtaaacgcctttactggggttgcttgaaagcacattcatctaaacaaaccttagaacaagaagccgcacataaaagatcatctatatgtgcggttattgtgaatccagatttatacgaaatttaataaaaagcccttgcgttctcgtgag

SEQ ID NO: 14 - DNA, 176717 bp, Unknown
  bacteriophage strain capable of infecting bacteria of the genus Klebsiella
cccgccatcattcgttttttccacatcttacgctgatcaaatactttcttgatctctacggggatcacgcctttgatatcacggcggaacatccacccgttaggagaacagctaaattcatcgctagggcgcggcgcggtcttattaatatactcttcaagagcacgtaccgcaaaacttcccataatcgtttcagggcttatattcacctgtcggatgatggaagggtacaggcttgttaagtcaaacgataccatgtatttgtaaggcccaggaactggatccttcacaaatgccccagggtaaggggttttagtatggcgtctgttttccggaataacaaccttatcttcacgcagagagttataaatgatcgcgtcccacgttttcagcggagacataacccctgggaagttaatttttgcatagtacgctacagacagaaccagttcaataaagtttcgtttaccgtcaatatcaagtacgcggataacgtcaacaatgttgtacgtgatgtacagttggtgatctcgctggcgtagttcagacagtgaaccttcatactcaactttatttttaccagtttcgtattccgcgatcgcgtccagacggtaagatggttgtggggtaaaactgaatttcttatacagcgccataccatccatttgagcaacgccggaaatgtcatatcctaattgttcgttgccgtaagcgtcggtagtggttctggcggttactttaccaaatgggctaaaatgccttaccacgttttgaccgaaaatgttcaggtatcgcgtgatgatatatgcaatatcgaatttgtcagagttccatccggttacaataacaggggttcgctctttccaatctttgatatacgcagacaataacgacttctcggtctggaaagaccgataaacaattttgtttaaatcttcttcgctaatgtcttttcgatcaacgtttgccgcgcaccattccgcaaggccaccctcaaccagatcgtatacatagaatttatcttcaatgctatcgtaatgggtaatcgcatcgattggatattttgcttcacgcggatccggaaattctggggcggtcacctcgatatcgatagaagcaatgcgaatgtgttcgcggttgtattcgatttcattccggtacatgtcagaaatgtaagccagtcgataatcgtccatacctagcgcttccatcccaacatcgcgcatacgctgcatccagtttttagcttctttgatgctgtcaaactgttttttgaggcaaggcttgccataaatgtctttgtatggggtttctacgccattcatagcgtgttgatacattacgggcgcatatttcgtcttacgtacctgttcggtgccgttagagtcaacgaagcgctcataaatggtatctcccatttgttcaactgataggtaaaattcattcattggatcttgtcttctccattaatataatgttccattgtaacaccacctacagcaaattcaagtttactcgatgttctaaaaccaacaaaccttctgctaacaagtcacggatctttctcagttgaacaagctggcgttcaagtttaaacccgtcgaataacatgctgaaaatactggaattgacactatgatattttgcttctgcaattccctggttaaccatcatgatagctttgttaaccattagtttcctttccgttactgtatgttcatccagttgacaggttgcaagggaaaccaaatcatcataagcacgttggtcaataacgttatccatacgggccgcgaaaatcttattcatgtaagtgcggatcattgcgcgtcctccattcttttcataaagacttcttttgcttgttggatcaagcccagagattttttaatacgctcatagaaatgagtggtttcaacttgattgcataacaatgtgtactctgaaatgttacgatcgtaaaatccaggaaagtagtgttgtgcatagctgtaagtgcgggtatctgacagattgcaagttaacgataacaagatgtcatcttttacaatcgggatgatcaaagtttcgttggatttgattgaatccatgatttcgttaatagtcataatatatccctctcaatggtgtacaccaaatataacaaagcccctgcacgaatgcaagggctttttgattagtgaccgatccggtacttgtacttgaggatccaatctgctttttgcgagtgagtcagtacgcggaagttgttttcttctgcaaacttcaacccagtggttacgatcttaaccatgccccactcttcgagaagtcgcgcaatgttgttccggcgtagttcgtcttcttccgtcatatcgacttgacgaccatcaagtttcaacagttctttaaaatgcacgataaaatacttaccttgctttttcagaatgtggcacgattgccagagcattttctttttgttgttcgcaataccaatacgggttagcgtttcacggatctttaaaaaagaatcgtcgctgattagttgaatttctaacatacatcaccattgtttaatcaatttttccaatttcttttgttcagctttgtttttcacaatacccaacaaagacagagcgacctttgcgtgttttcttttccaatcctcgaacattccgaggtctttaagttcctgcaaatattccatcgctgtacgtgtatttacactgtatttttcgcgaaggatttcgataataattttctcttcaaaatcttccgatagtttagcccatgcaccgaagcgtttagccttcctaacagagttgagataatagttatagtgcatttggtcagagatactaccgcctaccagattcatcacataagcgttatatatcgtgtctatgtgctggctcattgcgttgtctacaaagtacttatcatacacatcatcgataaccaacggagttttaccgttgttgatttcgtctatgatgttaaacaaggtgttttctttatccttgccgtactctttgaccagttcttcaaccttatcccaatctttagaaagccaagcggattcatgcggggataactcttcttcatccagaaattccgccaggctcatgattacgcctcccagaccatagaaagcatcaggttcatcaacagatattgcagatgaatttctttattcatcgccagcccgtattgcgcgttgttttcgcctacaatctggatcagtgcgattttcgaatcctgattcacgatagggtaaatcgtatcagtcaattttccgataaaggtatcgtattctgacgcatatttaataacctcagagcgcaaccctttatagttcttttctttcaacagggtaatgatatgagacacatcagaaccaacgatctcatttaggatccctgcatcaatttcaccacgtttcgagtagaacccgatcgctttgataatagaacgcgcatccggataatgctctttaacaaacgctgcaatgactttaggatcatacttgatattctcgatttcaaggataccgaaacaacgcttgattaactgtttcatcagttcgatacgttcagcatcagacggaacaccgaatttaacaggaggacaacgagaaagcagagcactatgcacaccgttaatgttgttcgccgttacaatcacagacacgtttttactgtatgcttcgataaagctacgtaagtgtttctgtgcttccgccataccagaacgatcgaattcatcaatgatgataatctttccgcctggtttctgcgtcattgatgaagcaaaacgatccagttcattacgaatgaagtttacaccacagttcgaaccgttgacaaagaacacctcagcatcaacctcacgggccaatacaagcgctagggtcgttttaccagtgccaggggaatcagatacaagggtcatgttctcaacgcgcccagatttgattatgccccgcatagcggctttgtcgccagaaggtaaaatacactcttcaatcgttgttggtcgatagcgctgatcccatgcaaattcatcaggagatcgagagattttaccgtatttggtttcgatgatttcaatattttcactaagttccataatataccttcaaaataaatggtgtaaaagaaaggggccgtagccccttaaaactatcttacttgaatgtgctacttgcttcaagtactacgacgtaagcaacgccgttatcagaagagaattttgcggcccctttggaggaaatctctactttgtaatcgctgttgatgaactgcatgttatcaatcttcatatcaaaattgaaaacattgtcgccttcatactcaccgacttcaacagagaaagttgattgactttctttgcttttcgcggtgatgaccagtttaccatcaatcggttcaacggacaggtcggtcagtttcatcatgcgagacgctttgatcagtttttcgaaatcgttagccgtaatctggaaaatcagatctgctactggcataaccagacgttttttcggtttcgggatcgtggttgcgtctgctgaacgttcgatgatcttcatcttgtcaccgcgaatcacgatttcaccagtggaaatatcatgagtgatttccgcgtcagtgccgacgatgttcagcatgttcaggaatgagttgagatcgtagataccaacatcttcatcaatcacatcagcaatttcagcttctgcgtatacaacgctgttgattgatttcgtcatgatgaatgaacctttggtcagcatgatcgaagagttgatttgagaaaagtttttaaggatatcaatagtttgtttagagaatttcatattcagcctttagttttcaataagtgttacttaataagtgattttacaacggtttccgctgctgtgtcaagcatatcagccatttctttaacggttgtacgcttcggatcttcgcggcgttcgctggtaagtttacgatgttccgcaaccactttttcatcaatgtcacgataatgtttaaaacgttcctcttgaggcatagctttaaacagttcttttgtttcgtccgagagtttagcaacccaggatttacggacgcggttcatgtagtcaacaaaaacattactttcattcatatatttcttctctaacttagaattctttgggtgggggccgaagcccccgcttgtattacatgtctaacagtttatccaggtcgtcatcaccggagctaacagaatcatccaggtcgaacggtacgccgtcatcttcgcctaccggaaccgatgatacaccaccagatgatttcacatcagatgtctgattgtcaaacttagccatttcgttatcgaagttgctcagttcgctatcaaggtcagcggaagcgctggaaccagcagaaccgatcgaactacccataactttattgaagcgagtagtcaggtcagccagcggtttgaattcgctttcggcggtgatcgggcggagatcgctcataccttcgaaaattgctttctgaacttcttcatcgtcgatgtttttgatcttagccggaacaccaaacgaactatcgtcatagttaggccaatcaccaacttttttcgctttcagggtgaagttagcaccatcaaacggacaggttacagcaatacccggttcatcaagttctggattaccgttaattgcggcggtgatcttgtccatgattttcttaccgaagcggtatttgaacaccttaccttcgttttccggagcgcctgggtctttgacgatcaggacgttagcccagaaactttgtttacgaccgatctggctcagtagcttatcttctggcccgtttttgttggctttagccttctcatacagatcgttttcggaaatgtacttacatgcaggacagccgtcataatcgccgtgggtagaggaacagttctcaatgtaccactggttgtttttcttgaaagagtggctcacgatacggacgaacgccagttcatcatcggaacgtgctgggaggaatcgaataacggcggaaccgtttttctgtgcgtccagggtcagtttccattctttctcatctttctggaagccggaaccacctttcagatttgctacctgtgcctggagtttagcgggatcttgacgtttaaaaatgctgctcatattctgttttctcgtttagtttagtttgattaacgtttgtttcattaagtttcgatattttatgatatctttttcagtaaggtcaaatatttttctgtatgcctttaacttaatgctaaagtcagaccaaataatatcatcagctacttgatcgtgtttatttatgatacctaaaaatgagtcaaaaatcaaaaacgattcgtaagatatcacatttgacaggacaagtttgcttatgtaggacgttgatgatttttcgctgtacttgaacaccagagacacggggatctctttcattttggcgaattcgtacacgtttttaacgtcatccacaaacacgttatctagtctttgtaactttcctatgtactgcctgtaaaagacaatactatcttcatcaacatcgcctacccagaaatccggattggctacgaagttggagaggaatataaaatagatttctttgaatgtaaagcgttgagctaattttacaaagaaatatctatcctttcgcttgttaaaggcgttttcactaactttgatctgccagttgtattgaaggacatcaaaacgcccctggaaatgagttttcatcgccagatataacttgtatacagacaaaggcacaagccgtgaattcgcctcactatcagcaaacggagctttaaatctcacatgaagccgtccagagtggttgatgaactatgttcaagcgcaaccgatgggcgaagcatgtttcctttgatcgcttcgtcgctaatcttatcaaggatcgcgcgaggaaccgttttattcagcatcgcataatcaatggaattttcatccatccattgtagcgttgcttccatgtatgttgccccctcagaggcaaccagattttcgatatacaaaccgacttcggtcttatttccgatcatgctttacgccttatcgatcatatcatacagttcgatcagttcgttgttttcttcttcgaaagcggtacgggcctgttcgtgatacagtttgaacagtttcccgaaggtttttccgtcgataccgaaatcagtttttgctttggatttaatatccttgaaagtaccgttgaagatctcaacttgagttttcacgttggatgcttctttgatcagttcttttacctgttttgctacatcagggtttgtttgtaaaaattctacactcattttgttacctcaaaaatcactcagtttttcgaacatacgggaaagtttgttatccatgaagtaacgttccattttggctttacttccggattttggagtattatacgcttcaataatcgaattttcaatatcttttggtataaattcgaaatcgcgtagttcctcattttctttgtaacgagcggcccattcaggggtcatcaacgttgtcgggtcgtctgcctccagccatgcctctaactcagaggattttaccgctggggcgcgttcgccttcaaccttcgtcacaatataatcatttctaattttaatacaagcgatactatcttttttatcgcctttgatatttttgtatcgcagatcgttacgtggcgaaccgtacttaggcgttacccattttttctggggaggcgaccattgacgaacaccgttatatttctgtagttgtgtaaagtcgctatcagcggaaaccactaatactcgtctaccttcaccaacagcttttttcgtaacaacagcaattatatcatcagcttccgcgaattcaacctttaatccaagataaggcatattctgacggatttcttcgaacactgggttcaggaagttgttcagacgatcccaatcccattctgattcttcatgttcgatctgacgacgttttttgtagtaccaggctttttgcctacgccagtaatttctgtcatcgaaggcaatcacgatttctggatactcacctttaaattttacaacgttaaaccgtaaagtgtcaagcaccagatgacgaatcatttcgatcgtgatggatgcttgttcctttggtttgaagttgttcatcagtgtagcgatggaaatgttagagatatcgatgaccatagtatcatcgggttccccttcatcttgcatcagcttgttcaagttaaacatgcttgcaaaactgctcatacatacctcaatttttcaaagaacggggttattgtagtaacttacgaaatgaagtcaatacaaaagaccataaaaattttgatcaataatacttgatctgatcaaatttatgatctataatttattaattaataattattttactacaatgatcattgtaggtcaagtactaaaatcaataaattttatataatttagatctgatctatagatcattagatctactttaaccttaaataatatagaatgaaatttgattttgtctacagttattatataatattcttaacttcaaagaggaaatatgaatactatgactaaagaaacaaccaatatctacgcagacaatgaaaaactataccctatcctctgtgcatggaaaaagcaaatcgccgaaacaggtgatcgcaaaatgcctaatgagttgggggctgctattatggatattgcaaacgggctatcacgtcgttacaacttcaaccgttattccgaagattggaaaatggatatgatcgatgacggaatttccgctgcaatctcaggactgcataacttcgatgaaactcgttataccaacgtttacggttacattaacaaagcatgttggcaagcattcgtaacacgtattctgtacgagaaaaaagagaacgcgaagaaatataaattcttccttgagcacgtttacgactgcgaagattcagatatggttagtattgcagacgaaggtttcattcaagatctacatgacaaactatctcagtacgaggcttccgccaccaaaaccaaagacaaggaagcggaagtattcccaacattggaagattttctatgaaagcaataattgacttaaacaaaatattaactgatatcgattacgaaattgacttgctaccctacttcgtaaaattggagttgcaaaacgtgggaatcccggttatcatcgatccaactgacgtaagaaaccccgatttcgaagtagaagaaggggttttgtcttatatgataaacgccgaaactatgatcatggagatcacttatgattgatgaagagaaagaagtactaaccagtgtggaagaagtggatccggaagaggaaattcgacaaaagatccaggcacgtgtagaagccgacgcattgaagcgagcacaaaaattcattaagaagaaccggactgagatcaaacgcctccgtagacacgcagaggaagccctattcaggggtaataaggttcagtatgtgtatgcggttaagaaacttcgtgatatgctcaaacagccgtatacagaggatttcattgatacgatgtggaacacttcactggcatcaattcgaaatatcgtagcttcacaacagaagcactaacaaacaagtagccccgaaaggggctatgagggtcttatgagaaagtacttaatgatcggggatacacacgctggcttgcgtcaggacaacccctggaatgaagaaaacctatacaatgtattcgtgcaaatcgtagaacactgcaaagcaaacggcattaccgaggctttccatgctggtgatttctttgatgtgcgaaaggccaccacacaaaccacgatgaaattcattcgtgaacgtattgtgccactactggaagaagccggattacatatctatgttctggttgggaaccacgattgccagtttaaagacaagatccgccctaactcaccgcgagagattcttgatcagtatgattgctttactgttgttgatgaaccgatgacagtaaatcttgatacttctccgctacaatcaatcgatttgatcccgtggatttgtcaagaaaatacacagcagatttttgatttcatcaaaaagtcaaaatctcaatactgcttaggacactttgaactgtccggatactatttctataagaacagtaaagcggatcatgggcttgaaccggatttcttaaagaaatatgatatcgtgtattcaggccactatcatcacgctaacgaaggcgctaacgttttctatatcggtacacctcttaccatgagcgcgaacgatgaggacgaaaccaggggcttctatgagctatcttatggcgaaggtaaacgtgaattaactttcattgctaacccagtatgccaccatcgccggatcacctatccggatcaaaaagatgttgatgttgccgattacaaaaattgctctgttcgtttgattgttcgcgaagttgataacgatttgcctaagtttcaaacaaaactggaagaaacagtttatgagttgaacattgtcgatcgtgtgatcactgattcagaagttgatactgactttgaaatcaaaagcgtatctggattgattagtgagtacatcaacaacatgcagatcactccagaagaaaagaccgaagtatctgcaataatgagtgcattgtatgcagaggttacgagcaatggaaatagttgattacgttaatattttaaacgaagaagggcgatataaagccctttataaaatgtttggatttgatgtgattgttgcagtacagcaggattcctataatgagtatgtgtcattggggttcactctgattaaagacaactatcacgaaacaaaggtttggacatttactgtcctgaatagcatggatgaagattccgtgatatactgctttgatagcacgattacaaacatgattagtgatatatcccaaaggataattgatgaaactcaaatttaaaacattgacttatcaaaatatcttgtcggtcggtaacgtaccgatcgtcattgattttgattcagcaaagaaaaccctcattacgggtaaaaacggcggtggtaaatccaccatgatcgaagcgcttacatatgctctctttggtaagtcatttcgcgatctgaaagtcgggcaactggtgaacagtatcaacaagaaaaaatgtctggttgaactgttgatcgaatacggcaatgatgaatataaaatcatccgtggacaaaagccgaaagtatttgagatctggaagaatggcgaaaaactgccggaagattcagccgctggtgattatcagtcacagcttgaatcaatgttgaatattaacctggtgggctttaaacaggttatcgttctgggtactgctggttatgtacctttcatggaactgaaaacaccagatcgccgtaaattggttgaagatttgctttctctgtctattatcagtgaaatggacaaactaaacaaatcatacatccgtggtgttaaccgtgaactggatacgctttcaatgcagattggacacgtacaacagcagatcgcaacacatcaaaagttcattgacgaacaacgggcaaaagcaaatcagaatacggcgcgttaccaggatatctacgattcccacgtagaaacagcaaaacagattaaagcgcaattagttgaacttcaaacccagatcgcagaatgcgtgatcaatggtgaagaccaaacagcaaatattcaaaaactgcgtgatggctatacacgcctctcaatgaacgtagaacagttgcagcgtcttgaggtgatgtatcgcaagggtggtgaatgtccggcctgtaaacagccaattagccccactcctgaacgcatggaagaaattgccgagaacattaaaaacggtactcagaaacttacgctgattaagaacaagcaagatcagctacagaaaatcatggatgatttactaacacaacaacgtacactaaatgggctgaaatccaaatacgaatcactacgcggtacacttcaaaatgaagttgcagcggctaaacgtgttcgggctgtcatggataaagcacaggaagacgtggtgatcgacgaatccccagttgaaaaactccgtgaagatgaaaaggaacttgattctaaacgttctggatttgtcaaggaaaaatattttagaggtattgttacggatctgctgaaagattccggcgttaaagcgagcatcgttaaacgttatattccttacttcaataaacagattgcgtactatctggatctgttgggtgctgattatcagttcactctggatgacgaatttaacgaatcgattaaatcgctgggtcgtaatgattttagttacgcatcgttcagtcaaggcgaaagagcacgtattaaccttgctttattgttcacctggcgcgatgtaaccagtaaaatttctggtgttgatttatcccttctgatcctggatgaagtgtacgatggtgcaattgatcgtgatggtagttttgctgtaaaagcactattggatgggataaatggtaacgtaattgttatcagtcatcaggatttggatccggaagatttcgaccgacatattgttatgtcaaaagtcggtcgattctctaaaatggaagttaagaagtcttaaacttgcagttatcaaaatgccagcgattcatattgctggcatcaccagatttattgcaatatggacaaatcaactgcttcctttttgctggcgtctttctatttgggttatttctgcaatatggtatatgtgaacgcagataatgtaatgacgattctgttccgcaatatggacaattgccccgttctttaggtacgtttccgttcttatgggaacacgggataccctcgaacttatgtttcaacccttcattacctggtttcagtttgcagttgtcgaagtgccaacgagtcatatttccaattatacccgattttccgcaatgaggacatacaaccctttcttgttgctttttggctttactcattcgctgtctggtttcttcggtgaactctctgttcctatgtgcttctgacgcctttttctttaaccattcatagcgacggttagctgttctttcctttgacctattggaaccaactgttaacatatgtgctgcaaaaacaagtttgttgtttcctgggtgcatcttgactaataacagatgtgcaatataatgttgacgtgctgtaagattaaccaaattatcatcagaatctgttccacctatgcacttaggtatgatatggtgtgattctgtatatccatcatactgcgtttgtttagcatgttctatgatagagttataaattttgttatagttcataaacatatctcttgtttgatgggccgttagatacccctatttaagaggatgaaattatgttattagaaaaatcttttgaattagaaaccgctccggaaatagagcggttttatctccacaacaattttcttgaagaaaaacatatagttactatgaaagatgttgaagaagcattcaaagataaccctatagagttgacgcgaatcaagaacaacaaaagttctgtttggttcctcgaaaaaatctattgaccgaaatccataaatacagtaaagtagcccatgtaacgaaacgtgggctttgtttttatttgaggaacaataaatgatcactgaatccaaaatgacttatcaggaagcactgaaagttttgggcgcaactggtagcgaaaccagcgctgaaatgtccagactcttcaaacgtgcatccttacgcaatcaccccgaccgtggtggtagcaatgaattaatgcagaaaattaaccaggcttacgacgtagttacaaaaactgggcctagtggcgcacgttctgagactgctggtgatgttcgcgcacgttatgcacgtcaaaagaaagaatgggaagaaaaagttgatgcttactttgtagtggcgaaaaactatttcagcaccaaatttaacgcacaggaatttgcggaatacttcaccaaatacactggattgcctaccactttcaaacaggaagtaacaaaaggtagtcacggtgtttatgcttcgttccgtttcacttctggtgatgcttactttgatttcggtttcaactgcacccctccgaatggacaagggttagccgctccggattcatctgcactgggtaacgtttctgttagtacctttgtactggttggaactaaaaaacataaaatggcaagccgtgattatcaatggggcaaaaacccagacaagatcactccggaaagcctgttcccgtctaaaaaactggaaatcattttcagccctgtacagaaaaatatcaaatacaaacgtgctgactacctggcgtcattccgtaagctgttaggcgctgacgttagcggaaacgatatctttgttgaagttggtacactgaaagttcgtttctatcgtcacgtattcatgcgtaaaggtgcgtatgtgtttagcgcggtgtatgatcctgctgtatctaagtatcgtccggctgcacaacttcgcggaactatgttcgaagatgaggacggcgcttgcctggatatgatcgttgatacgttcaaagagttgcagaaactgaaaccgagtgttcaaggcgttgtgaacgcgatcgataagatgaacgcagagtttgcagcgggacatcgttcagcatcttttgttaaacgtgtagctgctcaggaagccgcaccaaaaccagaagagaagccgaagcgcacagttaaccgtattggtaaagaggaatacttcgcagcactcaaagatattggtgctcgtgtaatgcctaccagcggttatgttgaatttgataacggcgctggtgttactatcaacttcaagcgtattgttgtaaaccgtaaagcatactactcattcagtagctttgatttcatgtactctggtcagaaacacattgagtggttgaaaggaatcgatatcgcagaagataccaaaggcgcaagcattagcctactcactgatactctgaaatctttacgtgggatctctgactggaacactgttaagagcgctttagatcaaatgaattctaacttcaaggcgggtaaattctccgcacctcatgtgaagaaggaagcagagcaaaaagcaccgaaacagaaagacgaaatcggcgcacagcctaccaaaccacaggcggctaagaaagatacaccggaagtggaaaaatcacaggctgttcatgcagcacgtgagaaagcgaatatgaacaacactattcgtaaaatgatgactatgttagtcaaagcacagcgcaaagacactccggaagatatcaagaaggaagttgatgcagcaattcaattgtggcgcttgacttattaatcaaatgaactataatgggaactgttaacgcagttccctttttatttgaggaaaatattatgagttgtccaacatggttacgtttggaaaatctgaaagaaggtacacaaaaacggatttatattaatcttggttgggttcctcctaccgattttcaaatggctgagattttaatcaatgctgttaaagaagtaagcgacacttacgaatgggaaaggctctattttcctttgattggtttgtatatgacgcgaaataaatttgaagaaatgaaacttgctgttattcgcgctacgattattaattcccaacaaagatttactttgaaaaatgcatggagttctgaatgattattcaagtatctgtacagggtgacactctgactgtcaccgaatccatcaataccgctcttgctgtatgtcgtgaccatatctcacaaaatcctccagtgactgagatcctggaaattgatgtttgggatcagattgggatgatcgacgcatcatatggatttaccccgcgagatgaagaactatctcgtatcgaatcatggctgaatgaacaggaaacggaatgaaactccctaagaacacaacactactaacccgcgaaaaacttcactctgttgattggtgtcctctggatatcatgatttttgatattgaatctcgcgtgatcaatgcaaaatatcaggggtgtagtattttctctgttgaattcgagaagattcgcggatatgatgagaagtacaaagaaaaactgaaagttatgattgaagcattaggctatattgtaactgttgaagacaacaaaatgtggatcgcaatatgagcatagtaaaagcggtgtttgcattgggaattgatatctatcacgatgatttcgcttttggatatcagcaagggttgccgtggggccactgtaaagaagatttgcagaacttcaaagaagaaaccgcagatagcgttttgatcatgggtgcaaatacgtttacctctcttccgggtaaacttcctggtaggatccattgtgttctgtctggttcaggtagttttttgaaaaccaaaaaaggcgacgttgctgattacgtgatccacggtggcgggttgtctgctgctattggtacaatgcaagcaacacacccagataaaaatgtatgtgtcatcggtggtaaggggttgcttttagattcaatcaataataaaatggttgatgaagtaattttgacaaacatttacggacatcatgtgtataacgcaccagcgtttaaacgtgatgttgcatttactctttctgaactgggtggcgcattattaaaatatgaattttctgatttaaaaactcagtacataaaagaacatgaacgcattgaaaaaatcgtagttgaacgatataaaaaggtataaaatgaaacaatatctggatattattaaacttgtacttgataacggtgttgaatcaactgatcgcactggtgtaggtactattcgtattttcggcgcacaagcccgatgggatctaaacagaggtttccccgcaactacctgtaaaaaactattcttcaaaccgtgcaagcatgaattgcaatggttcctgtccggttcaaccaacgttgaagaacttcgccggatgacctggggtgaaaatagcgataagcgcacaatctgggatgataactatgaaaaacaagctattgatttaggatacgattctggttatctggggccaatctacggtcatcaatggcgttcgtttggttctctttatggggatgatgatagttattatggcggtagtggtgttgaccagatcgcaaaagtcattgaacaactgaaatcaaccccagacgatcgcgggatcatcgtttcggcatggaaccctgttgatcttgatgatatggcattgcgtccgtgtcactgtttctttcagttcgttgtaatcaacggtaaactgtctctacagtggtatcagcgttcagttgatgtcttcttagggttgccgttcaatatcgcctcctatgctctcctgacgcatattatcgctgatatttgcgggtacgaagtgggcgatctggtttggactggtggtgatgtccatatctataaaaatgcggttgaacaggcaaaagaacttttacagcctaaccgttcaccaatgccattaccgattctaaaaatgccgaaggtaaatagcttacttgatttagatcaagaattctttgactcgataaccttagaagggtatcataatcacggctctctaaaagctgaaatggcagtatgaaaaatggggcttcggcccctttcttaacaaggtaagagaatgaatgacattaaagtagtagtaaaatcctctggtgtacgccagccgtttgacaaagaaaaaatatacaaagtgctcaagtgggcctgtgatggtcataatatcgatgttcgtgcattccttgaaaatgtattagaactgatccgcgatggtatgactaccaaacaaattcaacgtatcgctatcaagtatgcagcagatcatatttctgttaaagaaccagattggcaatacgtagcatcgaatcttgaaatgtttgcattgcgtaaagacgtttacggtcagttcgatcctatcccgttctacgatcacatcgttaaaatggttgaagcgggtaaatacgataaagagatcctggaaaaatacagcaaacaagatattcaagttttcgaacgtgcaattgatcatgataaagattttgaattttcgtatgctggttcccaacagttaatcgggaaatatctggttcaggatcgcgatactggcgaaatctttgaaacccctcagtatgcgtttatgcttattgcaatgtgtctgcatcaggaagaaactgggttagcacaggttacgcatatcgttgatttttataacgcaatttccgatcgcaaactgtctctaccgactccaattatggcgggtgtacgtactcctacgcgccagttctccagttgtgtagtaattgaatcgggtgattctcttggttctcttaacgctgtaacctctgcgatcgtgaagtatatttcacaacgtgctggtattggggttaacgcgggacatattcgcgcaatgggttctaaaatccgtggtggtgaagctgttcatactggtgtgattcctttctggaaacatattcaaaccgctgttaaatcctgttcacagggtggcgttcgtggtggtgctgcaacactgtattatcctttctggcatctggaagttgaaaaccttctggtgttgaagaacaacaaaggcgtagaagaaaaccgcgttcgtcatcttgattatggtgtacagcttaaccagttgatgtataaacgcttaatgaatcgtgattacattacgctgtttagtccggatgttgctaacgatcgtctgtatgatctgttctatgaagctgatcagactgcatttgaagaactgtatgaaagcctggaaaaagatccaactgttcgtaagaaacgcatcaaagcggttgacctgttccaacttttagcacaggaacgcgcacagacaggacgcaaatacattttcaacactcatcacgtcaaccaacagggtagttttacggttcctgtccgtatgtctaacctgtgttgtgagattgcgatcccaacgtcgccgctggatgacgatgataaaatggctggtgaaatcggattgtgtacgctaatggctatcgttctggataacgctgatatcagcgaattcccgaaactcacgcgtattgcagtacgtgcgcttgataacctgttggattaccagaactaccctgtaaaagccgctctgaaagctaaacagcgccgttctctgggtgttggtatcaccaactatgcatcatggttagcgagcaactattgcgactactcagaagcgtatacagacaaagttcatgagctaatggaagcgtttcagtttaaccttctcgttgcttctatggaactggcgaaagaacgtggtgcatgtggattgtacaacgataccaaatacgctcgcgggttactgcctatcgattggtattgcaaaaccgttgatgaactggtagcacctgtttataattgcgattgggaatggttacgtagccagattaagaaatacggcttgcgcaactctactctttctgctttaatgccttgtgaaagtagttcacaggttagtaactctaccaacgggatcgaacctccgcgcggtttagtgagtatcaaatcttcgaaagaaggacactataaccaggttgtgccgaaccagaataaccagattgatttctatgatctgctctgggatatggctaaacgcggtaacaaagggtatctgtctcatgtagcagttatgcagaagtttgtcgaccagtctatttctgcaaacaccaattatgacccggcaaactatgaagacgggaaagttaaaacagaagacatcattgatgatctgctgtatgctaactactacggtgttaaaactctgtactatcataatacgcgtgatggtgctggtgatgaagatgaagccgccgacgattgcgcgggttgtaagatttgattaatgccccttcgggggctttttaaaggtaaagacatgttaacagtaatgaatacaaacccagatcataaccacttagaacaacctatgttttttggtgaagatactggtgttgcacgttatgaatcgcagaaacacaaagttttcgaaagcctgacgcaaaaacagctttctttcttctggcgtccggaagaagtcgatctgtctactgaccgtatgcagtatgcaaaacttcctgaacatgaaaaaatcattttcgattctaacctacagtatcaaaccctgttagataccattcagggacgtgggcctaacctcgcatttttgccaattgcatccgatgtgagcatggaaacctggatcgaaacgtgggcgtttagtgaaaccatccacagccgtagttacacgcatattcaacgtaacttgcacattgatccttctgtacagttcgaccaaatccttcgcaatgaagcgattatgaaacgttctgcatcaatgacacggtattatgatactctgattgatgaatgtcataagctgaaaaccatcatgatgctacaggaacaggttagcggctataaaccaaatgatccggctgtcgtgtattataacgagcaatacactaaacaggccactaagtgcaaagaagctctgtacctgtgtatgcacgctgtgaacgctctggaagcgatccgtttctatgtgtcgtttagtttcacctttaactttgctgaacaaggcaagatggaaggcaacgcgaaaattatgcgcctgattgcgcgtgatgaagcattgcatcagaaaggtactcagagtaaaatccgtttgtggcaaatgggtaaagatgatccagaaatggttgaaatctcccgtaggctgaaaaaagaagcaacggctatcttcctggaagtatatgaacaggaaaaagaatgggctgaacatttattctctgttggtgatgtagaaggtgtatcgctgaaaagcactatcgcttatattgaacaccttacagatcagcgtatgcgagcggtagggcttgattcgccattcaccccgatccctaacccgtatccgtggatgaataaatggctcaaaagtgataacgtacaggttgccccgcaagaggttgaagtaagttcttacctcgtcggaaacttgaatactgaaatcagtgatgaagcgtatgcaaaatgggccagcaaatacgcgtgattgtcgggtagtaaacaagtacaaaactgattgggatgtcgatattcaaagaggtacgaagttcggcaacccttatcacacaggaaccaggggagaaaacattttagcgtttatcccctggttccagaatcaggttcgtactggggcgatcacgattgaagaattgaaagaacttgatggaaagaggcttggttgtacctgtgcgcctcttccctgtcacggtgattacatcgcgcatgtggttaatgttttgtgtggtaagaaaagatcacttgactttttggatatataatgtatgaaatctgaattcaacttaacccttgataaatgtggtcgcatcgatcgaagttttgttaagtgtggtgaacttaggcattgtgtttattttattgcaattaacgatgaaatagtatatgttggtaaatgtcgggatatgtggaagcgtttagacacatatcgcaatgcaaagtattggagagaagccaaccccagcaacatcttaaaaacgtgtcgattggaaatggctatcaaaaaacgaaaaactgtgaaacttatcgtgactactcacgatgaaaatacatatcatgattatgaaatcaacatgatacgaaaatacaaccctgaatggaataaacagcactatgacaaaggcacaaactaaaattatcaataccctttacaaacaactcatgcagttgtgcggtgaatctgaaacatttttcttcgttgatcaagtaaccgtgatgggtacacctgttcgaatctttaactatcgcatggcctcatatacagactggctaaagcctggtgctctggaatgtcgcggtatcatgtttgaaatgaatggagatacccccgtatcaatcatcagccgccctatggagaagttttttaactatgccgaggtaaaggcatgggaagcgcttaacgagtctcctattgaattaggcgacgttttagacgtgatgattaaagaagatggttccttgatctcaactttccttgatggtggatttctggcggtcaagtctaaaggttcggttaaatcagaacaagctatggatgcgcacagcgtgttaatggcaaatcgtgaattgctgacccgcttaactgagatcgctaaagaaaactatacggtgaacatggaatacgtttccccgaaaaaccgtattgtcgttggttatgattctcctgatctgcgtatcctgaacgttcgtcacaacatcacgggtgaatacatcccttatgatgaactctttgctgacgcgctgttacgtgcgtatctggttaagcgtgagaatatcgaagtactggatctggatgcattcgcaaaagaagcatatcagaatgaaggattcgaaggctatgttgttctgacaacgaaaggttttgtaaaaatcaaaacaaactggtatgtcaacctgcatcgcacaaaagatagcattaccaacaataaggatcttttcctaaatattgttgagaatacggtcgatgacctgaaacagctattcagttcggatcttgtctctctgaaaaagattgacgatttcgaaaaacttttccttgatagtctcaatcggttgagtgcaaaagcattcaaagccattgaagataacaaagggaaatcgcgtaaagattttgctatcagtctaagcgcggatttgtcaaacgacggtcggatcatcttcgggcctcttatgaagtatttcgaagaaaccgatcctcaaaaactggttgaccggatcattgatatgatggttaaaaattacgaccagttcattcctgaacaatataaatgaggttcataatgcctaagatatcatcttgggtatggcctgtaatcgtggggctatctttgatagcccttttttacattgcagtcgataccaaaatcgaaaacgcatcgttacgtaaggatatcaaatctttgcaagatgatgtgaagaaagtaaaagagacaaatacaagcaatactgttatctacgtggaacaaaaatccaaagatcagcagttagtcaaggatgcagggcgcaaacaccttttgtttgagaaacctggattgattgaaatcaaaatcaacaaatccttcgacgaatacatgcaggaatttgaaaaatgaaattagcaatgatagtattacttggtgtttttctcgttggttgtgctgaacagccacctgttaaggtacttcctacgctacccgcaaaggttaacccagtgaaggtaaaatggaaagtaattgcagacgttagagaaatcgacgggaaacaatacctcgtaatgccatatgatggtaatccttatgttgcattgacatatccagattcattgattttacgtagctggatgaatgacgttaaaagacaaaaggatcaaaccgataatgttctgtgtacgttgggataccctgagaaatgcaaatcaaaataaccaaaacgttttttcgtgacataacagaaggaaaagtttatactgcgaaaaaggataaagaaggtctatggatagaaaacgattggaaccgtgatatgtggctcaatcttacgaatgagtataacaaagaactaattgaatatgagatagtgaaatgaatctgtttatgactattggcgttccgggtagtggaaaaactacctgggcgcatgagaaagcccgtgaattgggtaatactgttacgatctctcgcgatgatctgcgtagctctttgtataatgctggtaaaggtgctggcggatacaaatacaccaaagcgaaagaagaaatgattgcagaaatgcaggatcacgttgttatctccactctgaaagatggtaaaaacgtgatcatccacaacacgcatctgaaagaaagtgataaaaatcactggcgtgaaattgcattggaacacaaggcagattttcatattgaatattttgatgtgtccattgttgaattgcttcgccgtaaccacaaacgcggtcgtgatgcattacccgtttcgcgtgtttgggaaatgtttaaccagtatcgtaagatccgtgggttcgtaccagcaatggaaatcgtcaatacccacaatcagaagtgtgtgatctttgatgttgacggtacgctaacaaaagtagggcaacgtagcccgtatgactttaccaaagtgatcaatgatccgccaaacatcccgattcaacaactgtttcacctgtacaaaaatgcagggtataaatgcatcgttgtatctgggcgtgaaggtaatccgcaatgcgcacatgatacatgggttagcctgttaagttatggtgttgaaccggatgaaatttttatgcgtcaagaaggcgataccaggacagattttgaagtaaaagaagaaattttgtttgacaagattttagataagtattatcctgttattgcagtggacgatagagacactccggtcggaatgtggcgagcaaacgggattccgtgcttacaagtcgattatggtgatttctgattgacatataatgtgggtatgttaaagtacccacacaaaagaggattacattatgaacgttattcgtgaagataaaggcatcatggttgaacttggcgatcgcattcgcgtagaaaatctgggcgattttaatcaaaaagttcgtttgttgtgccaaaaaattgctaacaaaatccaggaacagagaaaagcaccaggcgggtttgaagttagcgccactccggtttctcagtactcgtacattgtgtatattcatgacgtggatactaacagcacccaatctttcgggctggtgttaaatcctattactggctacgttacatgggcggttgtattatgaacgtaaaaattattgatagagcgatgatcacggacgaatctgtatacccggatcctcgttattatggcggcgttttcggatacatcaaaggaactgatattgatgtagtaacaagtccgatcgctgaatatgatatcaacaaaaatcaaacagaagttcgcgttactacaatcaacggttcagaatatatcgttgaagcgactcctgattttatcaaacagttactaaaggtgatgaaagatgcttgatcatcctggctctatgagcatggttctcctggaagcattaaaggcatatgatatcccttgtcatttcggtgaagtaaatgttaatactattgttgacgaaatcgacaacccaaatactttcattgcttgtcttgttcgaaaattcacaagttgttttcgtccgagtccagaaaaagtagtgattagttctgtttctgcacatcatcgagtgttggatgatagaaagattcaagtttactggaaagttctttatcacgtggtgtatcatgaagattgatgatattatgtttatgcttagagcggtaagcgcttctaagttctctcaatgtgtctctgttaatgtcggtgctgcgttgagaaatggtaacgggcgtgtgtttgtaggcgcaaataatacggttgatcctagtcatcgttgtacagatcagtgcaatcacttattagatgataacgggaaactgagtgaagaaaagcgccctgaacattcacaatggtcagatcgcaacgaagtacacgcagaaatgcgcgttattatgctggcggcgtctcatgaacaaatcaaagacgcaactttgtatacaactcattccccttgctcacaatgtgcgaaaaatatcgaattttgtgttgcaacaggtatgattaagcgtgtagtatatctacataaatacgatcgtggtggcatcgagtggatatggcgtctacagcaatacggtgccgaagtagtacaacttgaccccgaagaaatgaataaacatttccggatcaaataaccaatgagtaaatgtatgtctgaactgagtgtaaaagcatcctttgaatatgttctgattgaaaccaacgctaaagcggctggaactgaaattgtatcaccttctggtattgtgactggtgttcgtcaacacggcgaggaaccgatctacggcacagtgttatcatgtgggccggatgtaccggaagaatataaaaccctgcttatgggtaagcgtgtaccgcttcctcatgcacaaatggcaaacgtgccggatcctgaactgattgcaggaaaggcaacaaaagaagaagctcgcaagtatccggttaaatatgtaaccgcacactataaagcgattcaagcaatttacgaataagagatccaacatggctaaacaaattcaagcaatcatcgccgataccgtcgcaaaatccaaaaaacttttcgacaaaggcgacatcctcgaagcaccgacccgcatcgatgtaatgacttcaatgatcattgatgctcaccagggaaaactaaattcccgtgcttcggaagtaatggaatacatcgtacagttcgaggatgtatgcaaatacgccaaagctgttgatccggctgttcgcgaaatctaccgcaaacagttctaaaaatattggccccttagctcaataggtagagctaatcactcataatggttaggttcccggttcaagtcacgggaggggccaccaaacaaggcaaggcacttagagaagcgggaggaacagaatctgattctgttggttgtaggtgcaaatcctacccttgccaccaaatttgggtgcgtagcgcaatgccgttaaatggttcggaatatgcaaccttatccacaggaaaggctctgttggtatccggtaataggttccccggaatgcggggtgaagtaaagaaacttccagcccactaattttaatgaggtttatatgaaatttcgtgaaactgtgaaataccataacgcggtcgaatatacgcagatttttgttgatatgtctcctgcaaaattcaaagaacgctatggcatgacatttaatgaatggaaagatggattgtccgatggggattaccgaaaaaacttcaaattcagtgaatgttatgtggatgatgacccttacgatctggatgtttgtagtaaaacaacacctctcattgagaattcaccagaacagctttacgaatcttgtattgattctgcatacgaaatttaaagagataacatgaaaaatttacaaaaactgtttaaaatgtctccgacaattagaaaaatcatcggagaaagcaatccaacgaatcgcaataaaaagttgatggaactttttgtaaaagagttcgatgattttgattctgaacttcataaagcgcttgaggcatattccaaacaagggttctttgcatcgccgcaagtgaatagtaagaaagagtatagcgaacgattctttgattgggagattgtcaacctcgttcgtagaacaaatatatctccgagcaatcaccaattgatttctcttgatacttcggtattctttatccagtatcttatcagtggtggtttcaaaaatcctgaaattccgtttacaaatgaagcagttagcagtgaatttgatgaatcatttgtatacatcagcacaaacaaataatcaaatggctatcttcggatagccttatttttggggtgtctatgcgctttttaaagtatgcaagttggatcgtactcgtccctcttgacattattactggagtattagcaattctgtttgccccgtttgttgtaccgttctacaacgagaaaacagggcatcttcctaaaggcttccggtggatggaaaccttcgataaccctattgatggtgatggtggacatatccgccgttgggcgtccatacgctatcatctgggggcttttggggtgtacatgcaacgtgttggctggttgtggagaaacaaggcttataacttcgcatatcacgttttaggacgtgaagcgacaagcaaattcaactggaaaggcaacccaaaaaccgaaggtgggccgaaccctgtaaataatgggtatctgctcatgtggaacgaatcagcatggggtttgtacgtttacaaaccgtggctacagatccacaaagtgcaattctgtttgcgcgtttatgctggatggaaactgaaacaagaagttagcgactcagttaacctggatcgtgcaatgctggcgtttcatttcaacccgttcaggtattatgtaatcaagtaaaggtaatacaatgaaagcatttcaaattttagaaggtttacatactggtacaatctatctggaagaaggtaacgacgttcggatcgtagtatcaaaaacattaactatggattctgtgatcggcaaagctcgcgttactccgtttgcaaagcgagagatcgagatcgaatatcagccaactgttaaagtggaaggtggacaacatttaaacgtaaacgtgttgcgccgcgaaactctcctggatgcggttgaacatcctgaaaaatacccacagttaacgatccgtgtttctggttatgcagtgcgttttaactcactgacccctgaacagcaacgcgacgttatcgcccgaacctttacagagagtctataatggcaattgatgatatcaagggttataaaccccatactgataaaaaagtagaaacggtaaaccgtatcaaagatgctgaaaatgcattaggtgcaatcctggaagatatcgaacagcgactatcaaattcagatattgattcactgatagaggaagaattagatgaggtgcttgaacgtatccatcaaattcaactagcgaaagaccgactgaaagaagcctctatgtgggcgtgtcgtgcggtgtttcagcctgacgaaaaatattaaaaatcaaaccgttgccgaaaggtagcggctttttcttttttggtgtaaaaagttgttgactcccttctcacattcccttatagttaatcccgtagacaagaaaacacttttatgaggatgacattatgaaacgctcttacaacatgaatgaactggttttcttcaaaactcgtcgtgaagcacgtgcttacgttctggcggctggtaaaaatacttctgctgctatcgatatgggtactgataaagctgttggtgctcgttgggccgctgttatcgttatcgctgctccggttactccggttaaaactctggtacttggtgcgcgtcacgccgaaactcttaacactgctgcaagcggtaggggccacgaagttaaagtgttcaagaagcgttcttatctttcatgtgcaaggggttaactatggcacgattcatatataaagtggaatacgaaaatactgagttatctgatacctttttgaaaatgattcgtgatcacgggcaacgtctggaaagagtaacgattgatactgcgtttgattgtcctgttgggttggttctaacattatcttgcagccccgcaaaagaatcagcccgtgtagaaatgttacataaactaaatgcattttatgaaggtggtagtgtatggcgagtattgtaaaatttttcaccgactcagtgaaagaaattaacagcgctctggaacaatggaacactcgctgtgatgtatccattaaatcagagtacgaaacaacttatgatcgttatgatcaggcccgtggtttgcacaataacccccatgaggtggaagtgtgaaatactacggattcaaaacgagtcattttggtaaagcgtatcgtacagaaaacatcgatcgcaaacgtccgtactatgattctttagtacgcgcgggacgcaaacgcgctcgccaggaagggaagaaggaagcagaaaatgaactttgatcaacccattgcaatgataatcggtgctgtcctgggaatgcttcttttgtttggcggaatcccattaactgcatatatcatgaggttattctaaaatggacatcggatcaggtagtcagtatccctcatgcgctttaagcaactttgccccgcatccgtttacgttcgacggggtagaatgcgcatcgatggaggggcttttacaaagcctgaaattcagcaatccagacatgcaagcgcatgtatgtacgctggttggtaaagccgccaagttcaaaggcaagaaaaagaaatggtatcgcgatcagaccttgtactggaaaggtacaccgatccatcgcgaatccgaagcgtaccagattcttattgaaaatgcgtacaatgctcttttcctgaatgacgggttccgccgtgcgctggcagcaaccggaaaaagtaccttgacacattcaatggggaaatctcgtatgaacgaaactattctgacagaacgagaatttattagaaatttgaacaggttgagaaatttgttatgaaaagcgctgataacctaaaaaaagaaattgaaggaatcaagaaattattgcattatatcgatgttgatatagagactggaatatgtacttggaaaagacccagaaaatctataaatgttggtgatgttgctggatgtaagaaagaaaaatatcatgttatttgtttcgattataggttgtatagacgacacaggattgtgttctattttgctaaaggttacttacctcaagtagtagaccacattcatggtgttgaacatggcgacggtattgataatttacaagaggcatcgcaaagacaaaacgttattaaaaagaaaggacagaaaaacaacaaaagtggttatcgaggggtgtgttggtcgtctcgtgctgaaaagtatcgagcaactataggtattgatggaaaacaaatacatttaggatatttcgatactccagaagaagcaagtaaagcatatcatcaaaaagcgaaagaaacttttggtgatttttataatccattggttaaatgagatctgttatgagtgaaaaagaaagagtagaatgcgtgttcctgttcaaaggcgcgattaatccattagcgttactgtatgcacaacatgcattacgttcaacgttgattcagagtgttatctataaagcaggtgtgtattatgttaccatcggcgcaaataacatggttgttattgaatcctatgttaaggaatgtgcatcaaacggcgttgtctttgataaagtcgattttgatgctggggtagatgctgtttatatgtataagggttgatatgagttacgtagtttatttcgattgttcggatctcgatccgtttgtgcttcaacaggcaaagaaatatcatcaggatgtcgttggcatcggtgtaacaaatgatgatatgctgtgcattgaatttgattactatcgtagattcgagcgtgatcacttcctgggtgaattgaacgcattcaaaagtacccttttctttgatcgttatgaggttatatcttgaaacctgttattcttaccgatattgacgggatcgccgtaaaatggcagtcggggttgcctttctttttgtctaagcacaacatgcctactgatattgcattggaaatggttacggatgaaaaatttcgtgatatgaccgaaatcttcggatgtgatcagcagttggctaaaatccttatggaagaatacaataacagttctttcattcgttatctgaatgcgtatgatgatgcattgattgtgatcaaccgtctgaaaacgcagtatgatttcgttgccgttaccgctctgggaacaacaccaacggcaagccttaaccgaattgctaacctgaatactcttttcccgtctgcgtttaaagaggtgatggtcgtgggccacggtgaaacaaaaactcatcgttacctggaagcaaaagcaaagtatggtaatcgtctggtttgctttgttgatgatctcgcgataaacttaaacgaatgtcataacgtcattagtcaattgccgttattccatatgttgcgtggtgaacgtgaaaccccgtggtcgcctcaccagtcagttaaatcatggtttgaaatcgaagagaaattacatgatcttgtcaatccttaatgaacttgcgtctactctgaaaaccaaagagaaagaagcaattttaaaacgtaatgccgataatgaattattgaaagaagttttccgcattacgtatacaaaacagattatgttttatgtgcgtcaatttcctctggtagaagggaaaccaggcacaacaccgctttccgatgcaatcaaagcattactggaagatttagcaagccggaaatatacaggcaatgcagcgcgtgatcgtttactggatattgtatcatcagtgaacattaacgatcgtgaagtgctacgccgtatcattaaccgcgatctggaatgtggtgctggcacaaccttaccaaacagggtatggaagaaactcattcctgaacagcctcaatgcctcgctacgccgtttagtgaaaaggctttacgtcgcatcattttccctgcttactcgcagcttaaagccgatggtgcgcgttgcatggctgatttgctggaagcattaaaccgtaaggtatcgagagcgggtaacgagtacgaagggttaactcagcttgatatcgatctgaaaaagattcgcgattatctgggatatgatgtagttctggatggagaattgatttatgttccttccggaaccgtaccaacattacctgaacctgaaacagacatgcctttttctttatctgctttcatggacgatgatgataacgacattgcgttatttgcggaagaagttcgcaaagtatcgaccccagaagaagaacaggccgaagcaaaacgcgaagaagggaacgggatcgtaaacaaatctctgaaagggacgatcaccgaagaagaacagcgaaacattgtttatgttgtttgggatattattccatatgaggtgtattacggcgaagctgaaagtgttcagacttatgatgagcggtttagcctgttgcgtgatatcctcctggatctttctctgccttctgttcgtttgattcagtctaagctggttaataacattgcagaagcgaagcaggactataacaattaccgcaatgacggtaaagaaggttctattctcaaaaacagaaacttcaaatggaaagattcgcgagtagccgatcaggttaagctgaaaaacaaaaccccgattgaactacggatcattgatatctacgcgcacactaaagaagaccataaggtcggcgggtttgtggtggaagatttatccggaatggctcgaacgaataccggatctgggttaactgataccgattatcgttacgatgatgatggtattacccgtgtatacattccattagatgaacgtggtgaactggatcgcgaatacatcatggcgcataaagatgaatacattggggccattgtagaaatggaagttgacggcctccagaagtcgaaaacgcgtaagaaaggggaaccggaatacagtttcttccttcctattatcaagaagataagacgcgataagaccgaaccagacgatattcatgttgtctttgcagatctattttaataaaaagcccttgactccggtcgggggctttgttatattgggcctatcgaaacgtaaatcactaagagaatatattatgactagtagttatcagaaacacaaaacccttatggcaaacctgtccggtaaacatatcgacgaagtaaaatctctgctgacagtgaccgaaggttcccgattcgaaacaaatcacattatcaaaccttctgtgaagaaagtactgaaagtgatttaccgacatccggtgtatcagtgcgttcatatcatgaacagtaacgcatttattttcgtatataacgaatccgatgataagtgtgttggtattttccgaaaacctaactttgaatgcatgagcgaagcggctgttgcaaccccgatcgttgaagaatatccggattatgttcaacgcaacatgcgttatgtgcaatcccgacttgattatgcatacgatttcaattctgacgcggtagaagcgctggcggatatcctttgcaaaaaccagaaagatcgtcaaatgacaaaatatctgactgatccaacaccgccaacaattcgaatttctgttgaagttccgtttgaaaatcatttcatggcagttgaagcgcttgctaaacttggtttagaagtgaaaacagaagccgtttaatagcactttttgttaaagaagcctcttgcaatgcagggggcttttttgtatagtgtgttcattgaaacgaaacacggagataaacaaaatggctcacatgatgaagaaagcagaattccttaacctggttaaagattgcggattcgctcacttgaaaacttttcgtggtagtgtttacctctatgaccgcgaaatccaggttgccgaagtctattgcgcttctaacatgcaagaatctggcattatctctgcaatgaaccaatcaatcaaataccgtaaatggatgggctgattatgaaagttaacgtttcttatgaatctcgcgttaatggcgcacagtggcggaagctggataacggacaagtggaaaggcgcttacctggttccgatgagtggacacttgcggcagtgttggaaaccgaaatcgatctggcaacaaaagacggtattttgtttgaggtgaagaaatgatcacactcagtgattatcttctgtttactgctctttgggcggcttcgatattcataactgctttgatttacaataaacgtgatgattttgggttgtgggtattcattcacgggtttcctctgtctatgtggatcgtgatgactgctgaaattctccattaatagcactttttgctaaaactatcttgttcttgtttggtatattgtgttcatcgaaacgaaacagacaaaaggaacatcacatgaacttcatcgatatcaacaaagatttagaaggtaaaaacatcaaactcgttaaccgtgaaatgttagagagtcttggtaatggcggcgaaaaattcagtgaagaattctataacaatttatcgttgatgactgttaaacgcgttgatgttcagggtggttctggttgggtttctgcaattccggtttccctggtagatcaagcaacatatgacccagttgccgattcatgggatctagaaatgccgttggtattcgaagaagtcatgaagtgctacgaaatcgcataagggtattattatgaatagcggaaaattacaaatgaaagttagcgaagaagaagttaaagagcggttatcggtagcaagaagattccttgaatctatcgaccctgataaacttggaaaatgccctgatacgatttgccttaattgtgggcgttctgttcttgttggtaagtgttgcgataatccaaatatagttgtgatggaaaaggaacaagtatcccccgaaacatgggatcagatccaggaaatcattaaaaaccctccagcgccaaccaagaaattacgtgaattgatgacaaggaaaatgaaatatgagcaaatttaaattgagtgcaaccgttcgccttattcgttggaatggtgaagagatccgttatgatgaccctgaattcgcccatgaaattctttcacatcgtctgggattgaaaaacgcgtcattggttcaaactgttaaaacatcagcagagccggaaatttggcgttgtgttatcctggatctcgataacaacattgactatgatgatcctaagaactatcctcttctggaagcacaagttgagaatgctccagaagacagacagtgttttttggttgagttaccacgcgaacattacgaaaacatcataaaggcccgtaaaaaggtcaataacaatgttttcgatctccacctcggattgtttgaggattaagtactgctagttgtgttcgtagtagcggcgctggtaggttcccccacctgtatacattcaagtgtttgcaggtggaaatcttttgatacgtctcgaacacattcaacgatcagatattttcctgcatactcttccccaaatacctcaatgattgcccctaccttaacatctaaacgaccctgctttatatcgaatcggatccggcgttcatagctggataacaattgcattttagacgcctggaaaggtttaccttctgaatctgggttctgaaagttggtatcatagattgcattacggtttgtgaagatccatgtattttctgtgtctgtatcagccagtatgtcaccgtacatctttttatcagtcaatgacagactaaagaaactggcatctttaaacagcgttgtgttatccttatgggtaatatactgggcttctgtgaatactacattgtcaccaatgaatatattatcaacgttaaatttgtatgctgggatcggtatctgggccagaatgtcagttgaacttttaaggaaaataccggaaccatcttcccacagataacagaagtcagaagaaactacactttgcccgttgtccctgatataatcaaatatatcctgatatgtaccatttagacatccaggagggatacgtatgttaccgccgtcaacttcgggggtaagtagtttcattttgctatacagtgccgtcatacactctgtaatcgtctgtacggcgttattgctaaatgaacgggcaaacttacgtctgaacgttttatgcagcggagagaggttcatacgtagcacagaacggtttttatcgtcagtatctacgttagagtaaagcaatccgtaatagtgttgttcttgcgtaccgttatactggaaagatacctgtatgattggttggtttagtttttgatagaccaactgtgcatcgtatatctgcatcagcgtttcagatgtaccgttaatcatcgtcttttcactaaacgagacaagagcgggtagcaattcagtgtatgcattgtctacgtatttttcgtatgacgcatataatttaatcgatagtattcgattgacgattttttcagccataaaaatccctcctaatatatcctatttactaaatagtaaataatgacccaggttcaatttgaggcaataatgaaaaataaaactcttgataaatttatgactacacggcttgaaatcaagaagacaaacgttaaaaccgttcatcttccggatggaacagccattgagatccctaaaatgtcgtatcgtcattttgtaaagattaagactctgaaagatgacccagttgcgatcatgcgattcatcattgatgacatcaaaccgcgcgaactgacagcagcggaaattgaatttgtattgatccatatgtatgcacacaataacgctgattatgccaatacgcttaaagaaattgggctaaatcttgatgacctcaaaatctccgaaccttgctatgattttacgtttaacaatgtgcggctagtttttgacaaacccagcctgttaaatgctcaccttccgttcctcatcaaagaggcatatgttgacggtaagccagtagaattaactaaggataaacgagacgaattaattaattgcctgtaccgattcgaatatgatcaggtatcgcgtggtgtcctccaggaagtatacattatccatgaggggaaaaccatcaaagggcttaacatcattggtgaatgataatggctaactcttatttcaacgaagaacaaaagaaaaagtttctgaacagaaacagcaacaaacaaccagcggtcaccaaagtaacagcctcccttgatgctgaaagcgcccgtgacctaaaggaaatcaacgataatacccttgaaagtgcaatcaatactcttgatatcaaagaagggttgaaatcgtttgaagaaaaattccgtgacaaattcgcgggattcaaagaacaatacgaagaggataaaaaggaatctttagccgaacaactacctgatttcgtcggcccgatccgtcctatatccttaaccgatgataactcaaaaactgttgacaatacagtaaacgttaaccaaaatggtcagttcggtaagctggaagaaaacactgaatctatttttcatgctatcaacaaacttgttgatttatatgaaaataccgataaacataagcctcttcctgaaccagtggaagaacctgatccgtatgtagacaataaaaagaaaaaaatcaatgatgatgagaagaagagaagcaaaactctagatagcattgctaaaagtctcgtttctatcaaaggattcacatcacagatcctgagtcgtatcattggttactctttggaagctcttgctaagtttgcaaaatggacactcattatcggtagtttggtatttgctattgatgttattagagatatcatcaaaaactggatggaagatattctgaacgaaggagaatcatcaaagaaattatttggttcatatcttggtaatgtcaaggctatagttgaaaaaatacaaaacggtataaaaacatttggcgaagaaaataaaacgttgggtgagtcgttaaaggatcttcttgttgaacctatgaaactattaggacagactatacaaactgctattacagagggcataggtcgtcttattcaatcattaggagaagcaacgggtagtgataaaatcacgtcagttgggcgcagtatgcagatcagcgcgttgcgtgataaacaagaatttggtctggaattgtctaaagaagacattatcatgatcaagaaacaggatctcgccgatcaaaaagaagcctatgaaaaagccagtaccgaagaagcagcaagacaagcattaaccataggagcaacacaagttccaaacggttctatatacaatgttcctcttacagactatcaagaaaagaataaaaaaattactgatatgcataaagaagaaatcgaaaacatgaggaacaaattagaagcaacacaaaaagaagtagaaatgattgaaaataattccgaggaagcacagaaattagccgacaaagaaaacgaaatcaatcgtaaacgtgttgccgaagaaacgaaacgtttagcacaagctcgtaaggaaggcaaacaaccgccagaaggatctgaaaaaaaaggtgatgatcttctgggtaaagcaaccaattacgccaatgctgaaaatattgatgccgatgacatcaaagatattaacggtatgttagaagaacttgaaaagcgtcgtaatgaaggaaatctggacgatgtacagaaggataggatctctgaccttatcgaacaattgcaaaacaaaattgcagcccgtacagaatccagcgccccgatcgacgcaccgccaccgttagcagcaaacaaaccggatgctgataagtcaagcaacatccaggttaacaacaaaactgttaacaacaacgtaactcattcagtacaacgcacagagcataaaccgcttgtgacgctggcataaggaacatataatgaagttttctattattgatgacagtataaacactctcaaaaatattaaaaatcgcggtatcccctctgggggtgccgcaataaccgaagatgcgttaaaacaaccaatagttactgccgagtttccggcccaacgtgccgcaggtattgataacgcatataacgcttctagtttgtataacaacggaatgttgttcaccgcgtatgatatatctagtcatggtactaaagacgactatcgttcgttgagacaagccgcccagaacgcacaacaagtattagcaaatggaactggtaatgtcaagtacaaacaaattataaatgggaaaggtataggaacactatcaccagtttgtcaaatattgttgcctagaagcgttaacgataacgaggttaacagccatcgatatcaagatgcaaacgatagttggttgactaaaggattaagcagagttgcatctaactttgtatggggggttgtggaatctgttactggtggtatattagcagatcgaagagaagcccttgatgttggtacaagaggggcatttcagggttctgataaacgtacacgaatgtactataatacgtttgttatcgaaaaccgtaatgacttgcttgaactggttaaaatttattacttgttcaccgtgcttggatatggttccacttctgctgggggtactgttaaagaagttgctaacgaagtaaaaaatgttttcaacaaaggcggggcgtttttatcaaatctaggaagtcctgatacaactgctagtactccagggaggtttagtgatggtagttatattaacatggggattgatcttttatcgaatacggaagttatcaaatcacctcctgtctggtttattcgtgatttccagtctggtgattctttgcgtttacctcattcgacctttgggccagcaggtattaccagtgttcgctttgggcgttctattgataatattgtaaatacattaagagaatcaccaaataccccgatctcacttgagatcgaaattcaatttatggaactgatcgatatgcgtcaggattctatttttgatacaaattactaaggagatatgatgttttacaacgtagatgaatttttatcaggtatggctaatcgcgattttcagcgtagcaacctgtttagcgttgtatttgcaaccagtcccgcatcacgtatccttgacaacacgtttggtagtattcgagatactttgattgatggatctattagttctatcaacgcgaacaacccgaacgaattcattaatgctatcactggcggtgtgagtaaattgtttagttacaccgttgataaggcgattatgtcgctgaacaaaacaggatttagcaaaatcatcggggcaattagcccccgcttgattacttccctgtttggtgatagcatgtatggacagttgttagctgaattccgtgataaaatgatgtataatatgggtttaagcatcatgggagttaacctccccggtaaatccattgggtacgaatacgtttataatggtggcgtacctcaaatcagattcactcgccctgagaatggggaattgtcgctgacgttccgcaccgattcagaagcccgtaacctgaaaatctttaacgaatggatttccgctattcgcgatgatgtaacagggcaatacgccttcattgatgaagtgacaagtactattcaggttaacttacacgatcgtgatggttcaccgcatacaacatacgtatttcagaagtgcttgcccgtcaaaatcagtaacagtgaattgagctatgagaacaacaacgaaatctggacatttactgttgattttgcctataaaacatcatgggttgtcgaggctgataaagaaggctgggaagggttcaaacaatccgtagaggaaggtttagccattgcagcacgtaccgcaattacaggacaataaaggggctacggccccttttgaggatcttatgtttgatattattcgagtaacattaccatcagggatcaaacgattccctatgtttacagttaaagaccagtttaaactaatgctgacccgtattgatatggaaggtcggccccttaaagagcaacaggaaatactggatgaagtgttggatctgctttatcctgggtattccaaaacagaacaggaatacattttcagtcgggtgtattgtgcttctttcggtaaaaacgtcattaaaatttctattggcggtaaaggtggacacaccgaatcattcatggtgattaatgatatcacgctgaaaaatgagtacaagttgaatgacgatatcacattggggtttgatttcccacgcacaagaaatattacagaagagttatttcttgaatgcattagctatgtgatgtacaaagaaaaacgttatgaatggacatcgttaatagacgaaactaaagaaaatattctcgatatcgttgagttggacgatatcgagaaaatcgttattatgttaacaaagtctatagatgtaacggtgaaaggtaaatcatttagtggtatgttaaccctgttcaagatcctgtttagtcgtggggatctggatgaatttgtgaagaccaactatctgctaaataaaaatggcctgaacctggaacctatcatgaatagtagcccgatggaaaggcaaatttatactgcattgcttgcagaagacttgaaaaaacaaggtgctgttaaatgagaaagcatgaatataaacacgttgagaaatataatgttgattatcgtcctctgacacatacagagtttacccccgacgcagattttatcaaaggggatgtttacctgtatcaaagagaatatcttttcattctggcacttctggaaagtaaaaatattgatacccgtcaactgttcatcaactgtgaagaatgtcaggaaagaattgaattccagcttaaacgcaatcaaataatggttgaagatttcgacgataaactatacgggaatgacgggatcgcgttatctgttcaccctcgtaagactggcgatgaagagatccccgatcttatcgattacgtaatgatagacggcgaacagatcatgtggagtgattgcagcgacaaagataaagaaatggtgttggatgcaatcgactatgcaacctataaatcgatttctaccgccctggataagccagcagtggtcgcaaacattccggtaaggtgttcgtgtggacatagccatatagtctctctgagaggcttacagcaatttttaaaggtggtctaaatgggtgtaaatctgaggttgctatatagcgatatagaacctaacatgcaacgagattggaataatgacgtagcggcctcaaaaggggccgcagcagtgagaaacagtttgattggtatcgtaaccacgatcaagggtacgcgcccgtttgatagtaactttggttgcgctattagtgatatgttgtttgagaacatgaaccctctgacagcggaatcaattagaacttctatcgtatctgcgatccggacatatgagcctagagtatataatctttctgttgaagttattccacagtatgatgataactcagtaacagtaaccatctattacagtatcattgatgacccggatgacgtagagcaaatcaaactacagctttccgcatcataacaaaaagccccttcctttcggttggggctttctcttagaattcaatgaatcccattagtgtttgatatcgcaattcaaacggggagatataactttgcatctggttttgatcggatacgatgtaataatacacctcatcattatcatcatatagcgcttctttgatgatgcaatatcgatcggtttccacgttcacataaagagtatccatgtactttgtaactttggaaccctgtgaactgatttcacgaatagcgttatctatgaaaagcgacaatgcttgcatgaagttatcaaactcaccatattcacagcccataatagaaattgcagtgtattggtgccagcctttgattgtgtctccacggcggatccatccaatttgtctacccccgatagatacacaccacactttaccaacgggactatagaaccgcacaacttcttttaataacagggacatgatcccacattttgtataaggattcatttcaacctcatttcatatcaagtagccaggaagggctagtttcaagcgaaattgcagtatattcgtattttacagtataacctttgaaaccgaaaggaatgactgcattttcattgagatattttactttatgctttgcttcttcttcattcagagcagcacagactgttgtttgttcaacgttaccagcaggagaagtaaatttttcaatgataatgtatacgcagttcatcctattgccctctttccattttttcaagtttcatcgtatccacttgcagttgaagtttaagaatacaacctttcgatatgttatacaagtagtcactaacgatttttgactttacctgatcgtaatcagaagataacgtaatccaatcatacatcgtttggtatgatggaagatacgtacattgttcttcttttgataacgctttaaatgattggtaatcggttggaggttccgaagcaattgcggttgtggtcataagactaagtgcaagtagtagatatttcataatgtattcctcattgttttcgatagaaccaatatagcaaaaagccccgaccgaagtcaagggctttttcatcaatgcaagaaagatttcacgtactgttcgatcttttcacgacatgtatcaactgaggtgctttccgcaattacggcatgacataacgcctcgcctccgacccagaaactcatcatgtactgaatatcacgaccttccatttctttttgatgcgctttgattcgatcgaaagcgttttcgattgtttcagtagcagtaagcatttcggattccccgtcaacctccgccagttccccatcgatcatttcgctttcgacttcttcccagtatactatcgttatcatgcattaccccagtggttaaccgtcgtaatccccgccacaattcacatcgccttcaatgaacagttcgcggttatcacgtaataaattatactttctttcgagttcaggcccgaacgcgtcggcgtcttcataccagctataattgtatcttccgcattcatcatcatattctggttcatcaccgcgctcgttgaagtgaacaattttaatatcgtccatccccagttctttcagcttatcccagatatacgaaatctcaacgctatgggaaccgaacgcttccagtgagatcgtaccgtcgctatcgacttgaggaacaccccacttcgaacgagtatcatcggtgatcatatctattaatgactcaatattattctcaccgtagatatcagcaacttccttttctttaccagggcgaacaagtccgatcccgataataaagctactgcttgagctattgctcacaaacccagaacgaattttcatcgcatcaccatattaccaatcatgaatagagggattagcgcgaagacgataccccatagaatgaccttatcttcacgacggtcacacccataatagataacacctccagcgaaaatcaatacaacaactgaaacgaacgcgaataaataaatcatttgcaggtatccattctcatagaaacttctttcaggatcttattcagatcgtgaagcgcatcttttacgttaccttcgttataggtaagcatatcctggtacagccctttcaagcaacgattgattacatatgctttttcagaaggtaacattgtaccagagcgattataatctctgaaaatgtccatcatcgtgccgttgttaccaggtaatgacgggttgaagttaaccataccggacatcaaactatcaacatacacaactgttgtgttatcagaacgatacgcgccaccaactttaaaccagttgctgaacacatacggagattcccgcacttcgctcaaatcggttccgatttcatcgatgtttacacgaatgttgttaaaatacaccgattcatcaatagaaccatgacgccataagatagcaccattgttatttttgaatccgactacatcaacctgccagccgttatctgttaaccggacatcatcaacgacgatgaaatcaggtagctgtgaatgaaagccgatgttttcaggacgggaattacgaaacccatcacgattggagaaataaaggatgtcgccttgattcagttcgcatatattcataagatttttaaagtccaattcaagtaattccacaagtcacctcaaagccccctttcgggggcgagatctcattagagtttaacttctttttcttccagaacgattgtgcaatcaaatttcacatctttccagaattccgctgcaacgatatctgttgcggtaacgcttacgctggtttcttcgaaatcaagatccgcaaaccatgcgtgtccgacgacaataccgtacattacacgactcaggcgattattaagggcgcgaacctctttaatagtttcctttgtctgcttatcaagatactcgatcaggtcattcttgtcaagcgcttcgatctctttagatacggtatcgtaagcccacagaatgatcaggtcgccattgttgagtttcttcttaccttcggcgcgttttgcaacggtagccgcaacagccggaagtgatgaaacgcctttgattttcacgttcagttctttcgacatgtaaacatcagtcgattctgtgcgctcaaccttcggagagaagccgtaatcacggatcccttgctcagacaaccattcaccagccgcctcaccaaagcgctgtttaagcccttctgcgttgcgtaaaccaatcgcgttatcacggaagaacttcattaccttctgacggcctttcaggatttccagacggacgttatcagcaacaaattccttaccagaaataccgcgagtcatcgaacggttaaccagaggcagagaggtaaagtcaaccagtacagacatacggtcttcaccaattttagccagcggtttgatagtcagaccagaagcacgtaagtttttcagagtcggaatatcggtttccagcggaagtaccttaacgttcacgataccatctttaacaatggtaaagttacgcacttgtttggtttctactttttccggcaatccaaactctttttgtttgctttccggaatggttacataaccttgcagatccgtattgatggaaatgttcggacgggaactgttacccaccaggtgtttcactgcaactttcgttgtggtttgggtaaattccggtttccatacttcatgcgctaccagttgcgccgccagtgctttacgttcttccggagtagaagcgtttgcaatctgttctgacagtttatccagagtatcatcatctttctggacagtctgacggcctgtacgattgtacgcccagtgttcagaagacaggtcgatcacggtgtcggtttctgccaacagttcgagagcatcaaccaaagtaaacgcgttttcatcaggaaccatgttgtagtcaacaccatccatcagacgtttagccggatcaacaaccgcttcggagatcatatctttagcgttggaataatcctgtttggtaaagcagttatcgtatgctttaatcagacgcacatcacccagttttttcagaactttccatgccagatctggattcatggtatgaagcgcatgatacagaaccacatacagaacctgttcgccttctgctgttgccggatcgaagccgtcaacgtcattgatcgcgttttcacccagcgcccaaatgtttttgatatgttccggaaccagaacaacaccatttgcagcattcaggacatacacacggccttcatccaggtagatcgcatgggttgcatcgccaactttgacttcaacacgtgcggaggtttgcgcggtaatgatttcatcaaatgcaggtacatacgcatcaaacccttcaacgaatttgtgtaatgcgttggttgcttccgccattttttccagcagaggacggtttacataataaccatattccaggaaagcaatgttgttaaacgtcaacggcagagtagaacacgctttcaggatatcatcagtacgccagcagttatcataaccatcagtcaggaagatcagactgttcagattgccattatccgcttgcagatcggtagcgacttcaaccgccagttgcagaggttcaacgaagccagtacatccggtcggacgcagataacgatcgatagcatcattgattttgctcaggtcggatacagagctaaccttttcgccaacgaatacagaaccgaactgaccacggctggagaaatacagaatagatacggtatcatcctgtttaaccagcgttgccaggttgtttttcaggtgctgacgaatgcgcgggagttcgttatacatcgatccggatacgtcacaaacaaaaacgtggttagtcggggttggtttggctacggcgtttttgaattcaatgttagtgatcataattttctcatttataggtaaatttgattaaaatttcgtttacttttttgctaattatatctaatgcatcatcgcatccaaacttactactcaacaatgaaacaaaatcatccatcgttgttgtttgagactcgccaacgtcaaaagacagagcgtaggcaacaggatttttaatccttacgatttgaatagtatactcattcaggtcaaaccgttcaagatattttcgcaaagaaaataaatcaatcggtactggtagagtttgactaaacgttatttcttcccccagttgataggggggcatttttacacagatttcgtattccatcagtgatgactcttcatagtgtgttccagattacggaaaatttgcccgtgttcaagctgggattggaattctccgcattcatcagagtaagtaaattcataaatgaatacaccgtcctgattgccaaatttagagttgtactcttcatacaaccacatcttgatcagagcgtctttctcttctgtttccagatcataccagtcacgcccatcataagcaagcgcaatttgaggattagaccgatatcgagtttcggcgctatcttcggtttcccattcataacgcttatcatcatagtatgattcgaagctatttcccatatgaccgcccaggtcgcggtgtacctgctgtacaacttcttccgctgtcgggcaagtcatccagctataaccacagttaggaacacagtcacccatcatttcgcggagattgttgatatcagtcggatccttcgggaaccgtacaataaagctacttgatgaactattgctcacaaaaccagaacggattttcattataatttctcccactcaaacgttgtgaaatgttttctttcgttataatcaacagagcaacgatgtgttggctttcctgtgaatccatcaaacacagttatacaatagtaatgcaaagatggaagcggtgtatgcttaatgtagttgatcgcgacgttcaggtcaacagtagaacatacacaatcagacgtttgatcaaaacggtcatcaaaaatcaactcaatgctatagatgttcatttttcacttccttcatgtttttcataacttcttcaaaagttacagggatctcgttgtactgttgcgattcttcatcccatacatcacgatgcccgaatgttgaactttttgcaatgagtttttcattttcccatacatcaatagtaacatgatcaccaagataagggaaattaggaactttgttcagcgcatcaacgcagttttgcaatgattcagaaacatgggcaatttcagtgaattcataatcagcactataagaagctacgtaaatcatcaccaccccctaacgatgctaatcaacagtaaccccaggatccagaacacagcaaccgcacaaatacgggccattactacatttccgcgactagtccactccgcactaaggaacaagagaacaaacgttaacgcgtataaaaccatttcaataacttcggtaatcatataaacctcactgaacataacgattgtagttgatgtgccacatgagactagacacaacatcggaaacaatcaaaaggaacaaaccagcaatcattatcaaaaggataactaaccaagtggttccgatattttgttttaacgacaatagcaaacacataatactgacaaaagcaaggaaagaaataacaagcatcacgattgaaggggccataatataaacctcacgaaaaagccccgaaaggggcttgtttaattaatgcccgaacacaccacgaatagactctgcgaatgcatacagttcaggatttttagctttcactgtttcgatttgctccagaatgtaatctggtttatatttcgcaccgaaccagcagtaagagaaagagcgatcccacatgaacacgttatagtattcaccgttgcgaacttcaaccatcacataaccaggattagaacccagcggataatctttcagaagattgaatttcgcgccagcaccagtacatccgttaaacaggtcattaaaagtcatggtatgttccttttgtcagtttcgtttcaacaaggtcactatactattcttcgttagcctatgcaagcgcttttttgatttgttttgcaattgcttcgatcaccggaacagatacagagttaccagcttgtttgtacgcctgtgttttgctcttatgcatcttgaatgaatccggaaatccttgcaaccggaaacactcgcgaggtgataacattcgagggttcttaccttcctgcaataccagacattgaacaccatccttatagtattgggctgttatcgtcccagtacacacagaatcaactgtaacggcctgatagccaaaccccttaccgtttgccttgtttcgttctttacgctctctaaagcccttccaggcacgatctgatatggtgtattgatcattatccggttcgagaatgtcaccgacccttgtttgggtacgtggaggaacaggaaaactaaagaacaccggatcgcgaaagcagacaataaacacgcgctctcttcgttgaggcaatccaaaatcttttgtattcattacctgataatggatatcgtacccttcgtcctgtaacagcctgtagatggttttaaacgtgtttcccttgtcatgtgttaatagctggggaacattctcaaagaacagcacagagggctttttagcccgtataatgcggagtatttcaaagatgatagtaccgcgaggatctaacatgccctgttttaaccctgctttactgaacgcctgacaaggaaaccccgccaacaggatatcgtgatcaggtacgtcgttttcatcaatggcgaatatatcaccctgaatattttcatcaccccagttatcagcatatgtttgttgtgcatgtttatcgatttcagacgttaaaaggcattcgaccccgccgaatgccttatcgaaaccgagcctcacgccaccaacaccagcgcaaaggtcaattattttcatacgtcgaaatcaacctcatcgattttgtatgattcttcgccaatatcagcccatagctgaatattcacactttttgcatcacgataaagagattgaccacaaagcccacctgtataacaagtttctgtaatctcgttaacttccaggcggaggctattgcgcataattttaacaacagccttttccattgccgaatctagggttttagtatcacccaatactacatctttaacgttcaaaataacatcactcattatcgccactccgtttcaattccgtgtttgtatgcgtcaacgcccagaggggtgatcactaaacacatatcagtatttttcgttggtgaactaaacgccatagatgcataacctttttgaatcagggcatcacgccccgatttactgggaacatcgttgaaatctaaatccaacatttttgacgagtatctgtaaagtttacacagaacatcaatttcagcgccggataatttcgggtatgtcatttgtagtacctcacaacatgttcagaatacacacgttcaatgaaatcattccagaaatcgcgatcaacttctttcggataaccagatacagccgccagcttttcaacttcacacatcgttgattctagcgcctcttgtacggttgcgaaaggaacaccgccagctttaaccattttcaaaaatgcgctatccggaagaggatacacaatatcaccttctttgaaaatctggatcaattgcataccaccgcgcaacgcatgagaaagagctttccagtcgatcccgttgttggcttctgcttgccgtgcgcgttccccgtattcatcccagagtttatacacggattttttcatttccgctacggtgatcgtagactggaatttacgccccagaacttcgtaaaattcctgacaacctgatttcagtgttttgtctgtaacgaatcgacaaaactcgttggtcgggaatcggttagaaatctcaccaactttgatgcgcttgccgtagttagattcatctacgttacccagcaatgatgtgccataccagtaatcaggaatcatcagtaacacatcgacaacttcacgtaatgcagccaggcgagaacctttaacgccatacttcgccgcttgcttacgaacataaccaaacaggccagttagttccgtagtgtagaagcgtgaacggttagcgcggagatattgccagatatcagagttagcgatcagtttgctatcatctgcatgaagcatatcaatcgccacggtgtcaccatcacacgcgaggctgataaacttttgcagactgtaaatctgacggtctacgtcattaacaccgttctttgagtttttatcgccagttgatgtatcgatagacttcttcgcagtgcctaacaggatttcgcgaggatgagggagatagatccctttgtagtctttatcgcttgttggtgtttccagtccgtacaggtgagaaccgaatacggtttccataatcattttcatcagaattcaacctttaatgtttttgcgatcccgcgcaattcagcggtagtaatatccggaatgtttgttccgtagctattcccaaatacttttttaatcttatcacacaaatcgcggcgatacaccatttctttgtattcttcttcgctacgatacagttgataacccatccacccctcagcccacccggaattgcgcttgattttaatattagtacaacaatcagacccatcttccggtcggaaagatgcatacaggtactgacgcgcaactttttgtacgtaaagggttttggggttgcgattttgtcgctggtcactacggatcccagcatcatacaacgtatcaccaactttcacatcacttaaatcaatcatttacgtctccaacaattagttttttcacagtagtgaacgggaacagacacgcccaacgtttctttactgcttctgttgtatgttatcacaatgaatcgattttcgccacccctaacacactccagatccaaaatctcgcgggttcccttagtgttcatgtctgcaacatagtattcttcgttgttgacaatcactatatccgacataatcaagcgaggtttcatgcagcatacacctctgattcatcaagccattccagattctgattgagtgattcaatcagctttttatcgcgtctggaaataacaacggtagaacctttttctgccttcgcgatgatatcaccagaagaagtgatgtattcaacctcataatcacggcgagggcttccgagtttatcaccagggactacattccgtttaacagattcatgggatttttcggtgaataccaattcattctctacatgggtaacaataccatcaacagcagaacgagaattaatataaattttgctaatttccgccatgaaaacactatctctcagatatcgagcagtcactttatctaaacactgagaagacactttatctccgccaggatataccgagataatcattacatgaccctgaacacgggcggttcctactttatgcagaatgtaaaccgttgaaccatcagaatctttagatatcaagatcacactgaatgattctttcttttccttccgagtttcaccacaggtaaaactcacatccagaaaatcaccaactttaacggcacggggttttgctacttgttcacgaacactaataacagggatcataatcatttcctcacagtttcaaattcttcatcagatttccaatatacgttaaaattacgacaatcatgatcggatgtcaacgtgtatttttcatttgttttttcgtcagtgataaccatagtttcattctcgatcgagttaacaccgtaaacgaaaacattctcaccacgtttgtttaaaaacgcatcacccttttcaatcaactgccaacaggtaacaggcaaaccacccggactaaccgggcgggtaacaagacaatagggatgtttaatcatttaaattcttccattgcataggaagtaagatctttgaaataccttgcggtgttgccttctgggttgtttgtaatctccatcaggataacagcactatcaactcctgctttcttagccatgaatgaaagggcttcggtagcaataatcgttgctttcataacatcagctttagaaacgttgattgtattcattttttcttccttttcattaatcacttggtatgtgtgtataatacaaaagccctcacgagaacgcaagggctttttattaaatttcgtataaatctggattcacaataaccgcacataaaagatcatctatatgtgcggcttcttgttctaaggtttgcttagatgaatgtgctttcaagcaacccccgtaaaggcgtttactatctggaaatgatcatcaaagaattccccttgtcgttgcacgacctcatgcataggtagccagaacgcgtctgctgcatcatcagcaccgcccatgatacgaggcaatgaaccatcgttattaggttcgagcttgatatactgtgctacagtcggttttgagaagtacaccgaacgtttcggatgatcgaacagcatcgaattacggatagaaccacgaataaccttttcaggtactttaattcgtacttcttccagcaattcacggatcgcgcaatcaaggaacgtttcattaccgtttttgtgtccacccggaagcgccaacgcatctttaccaggcgcaaacttacgacgaattactaacacgttgttattacatacgaccactgaatcagccgtgcaacagttcagagaatccggatacggatattttttgaacttgtcaatctctcgttgccagtgtgtatcttcatgggacaaacgttggaattcttttgtttgtgtccattcatcgataaaggaaaccgtagtgctaggcgcatattttaacaaatcttcgtcccagccttcatggtgttcccagataattttgcgtaaattggtcgaggacagatcctgatctccaaccttcacaggttcaaccggaatatgattccatccgaatgctttaagccagtaagaatctttgtctttttcgtacccgacgatcgcaattcgatcatttcgagtttcatcgattgccatacgaacacgggatttccatttttcctcgttatagaggtaatccggaatgtacgcgaatttgattctggctgcatcttcaacatcaagtttgcagatagaccagcgagtgatcattgcttgacgctgtttagcggtcaatgggtttaatgtgttcggatatgcataagcagaaccgatcagaatgtaaaccgtatcagcaacagcaagggcttcccttaccattttctcatgaccatagtgaaaaggttgaaaacgtccaattactacagctttatcatatttgtgtttcataacgtgctccacgtttaaaggttaatcataaaacagacgcaattatcaacacaccaaacaatccaccaacgaaaccaaagaatagtgaaatgagtatagtcagtacgatctgttttatgttcattatagtattctcgttttagatgtcaagcccccaaagagggggctttaaaacattatttacgagaatcgaaaatcactttaccagcataatccgaacccattacagtttgaggtacgccacctttatagcgggtagagtagttcatctgtacatccagttctttccagcggatcatttccggtgtaatggtgcgttgcagggcggcgttggcttctgcttctttcttcgctgcatacagacgggcatcagcatcacgttcgttagcgattgcagcgttttcacgcgcctgacgatctgcttccgcttgttttactgcttgtaatgaagtctgttctactttttgcagttcagctttagcagcgttaacctgttcttcgcggatcttcgtgttagttacctgttccatgataacttccggcagggtgatatcctgcaagaatacctgtttcacagtgtaaccgtaaggccgcgcataatcttctacttcctgctgaatcgcaatttgcagttggttttggatcttcgcatcaaacaggtcttgcgcttttggtacggatttaccaaattcgcgaacagtggaaagcagtttttcggttacatacttatccagtgcctgatcctgattacccgcgttgatacggttgatcggtgctttgctaccgtcgaattgcagcattacggtcatatccacagtggatttaaatttatcctgggacggaacctgtaatttgtcgaacttcatcgcgatgtctttggtgctgaacgtatcaaacgttgccagcgggtttacaatgtggaaaccgggcagtacgggtttcggtgatactttacccatgaaggtttcagttttaaccgtaccgtcttgcacaatggtatacatgttaggcactaaccacagtgctgcaactacgcccagagcgatcagagaggttttcttcgggttgttcacgatagtgtttaagttcatcataatttccataagttgttgttcaattcgatagttattctatcatcacatttcacgctgtcaaactatttttaagaaagttttgtcagcttgtagattgtttgatagcacaagcccttaatctcgtccaggatgttcttcaaagaactatctactgattcgtagatctcgtttgcttcgttggctattttacggagatacgccaccgtgtcaagcacattttcggtttttagcacaggtttgtatcttcccgtgattcctatgtggatttcggtgaatttatcaaccaaatcctgcatatcttcgtaaaaaccctcatatgctttatgttgtgagtatgaacctgttgcaaaatgtgcgctatgcatataggtaacggacataaggcacatgccaataaaggcatctatcttgcttgagttctcagattctgtaatttgtttaaatgattgcatgatgatccctttatgaacgatggatacgtgcaaactcatacgcgaccctaatccctagctttgcgcattcggattcagttcggcattgtttttggtgccattttcgttccatgtagttgtagaatagttcgcttgtatttacgctgggagggatcgttgtgatgtatacttgaagggccgcattgatataatcgtcaaattctttctgaaccggacggtcggcggcgtgtgttgtgggtgtcatcatcaacaatccgaacagcacagccattgatatgcgtttaatgttcataacaattactcttttactcatagacccactataggtctactcctgtatatatttatagcaaaaacgaggccgaagcctcgttataatatttttgctgtaaagtcaatcaagtaatgtcataccaacacaaacttctttcgaaagcgcgtattttgttcacgttttctacgttttcatcccaaccgatcacaccagctttcatacgtttcagttcctgacgtaaacgggtacgtacttttgaatcaattttctttactgcaatagaaagcattgcattcagatcgccatgagctttgttaccgtcgcgacacagattattatcaaatcgaatgtatgcacatcctgatttgtgtttccagttggttgagtaccaacgcaacccatccggatcaatgccatgttgagcataataacgagaatactcttttacttcttcgatcttttcgttagatgaaaggtcacgaagaggattgtatttcttacggtaagtgcgactcataatgatctccttttgtttatgcttccactgtatcagggttgttctttagttgcaagtaatgttttcgacaaagtgaaacatatttgtcttcggccccgatctcaatctggtcgccattagcaacaaattttccatttgcatcaatacgggcaacggtagttgctttctttccacaatgacaaactccccgcaactccctgatctcatcagcaagtgccagcaacatataagaaccttcaaacaagttcaactgaaaatcggttcttagtccatatgtcattacgggtatatctaattcgtcaactacccgacacagatccatgacatttttcttggaaaggaattgtgcttcatcaacaaacacgcaagaaaccagattctcgctatcactgtaaaaatgattgttgtgaacatcataatacaagtccatatcaggcgtgatcatggtgcatgttgcttccaacccaatacgcgaagagatactctgtttaccttctcgcgtatcaattgctggtttgtacatcaggatccgcataccgcgttcctggtagttgtatgcatcagtgagtaaacgagcactctttccagcattcattgatgcataatgaaaatatagtttagccatttatcctctcaacaaaatctggggtattttggaatttcccttccccttcatggtttttgcatgttttatttgaacagtagatccaccaatcccactcatcataagggggtttggtaatgttcattacacaaattaaagggaaatgacaatcccgacagcgaacattttctataatgtttgcgttagccatgcgtataaccgcccatttcgctatcttgtgcttgatggatatcaagataccacatattgattttgcttttcagttcgcccatttctttatcaagcccactgtcaacaagacagagaatgtcaaccaccgttttacgctgggtgatgttgattttgttcgctttcatcgcttgcgccaatgcattacaggttttaaccagtgcggcgcgttgtcctttgattacggcgatccgtttgttcgctttcttaatctgccgccctgctttgataggatccatcatgattaattcaccttacgaggatcgaaatgaacgacaatgatcgggtaatcaccagtcacctcattaataatgcgcttaatgagttcccagtcgcccccagcgagtccagcaccgattaaaggtgtgatgataggctttccagtcttaacggcgtcagcaagccctacagcctgtttaaacgcattaccgattgcatcataatcgacacgcggcccaggtgtccagaaatcatattgagtatatgcattgaaaacaatgttgcctttttcgccaatgtaaacagaacaagttcctagcttatcacgggaaccttttaacgtattggcatcaacttgaaatgcaccaggaatacgatcgcggatttcgcgagcaataccagcgcccatattgcaatagcagttgcatccgtggatcaaatggccttcaccattcagatacatattgacagcattacctttcacttctttaatgatcatttttattattcctatataattcgcgttcgattagcatatcgatgaaatcagtaatatcatcaaaccaatccttagtttcttgagcatgagccaaatcaccatcatctaaaaacttttcgcgagcatcagcaaaattatctagtttgttatagagttttgctttgtctatatcattcataaattaaccttaattattaaaagaacgtaagaaaaatacgtaatgtcacacctgtttacctttccgttcacggcggcgatcttcttgatgacacatatataaaacaccaccaaaaattataaaaccgataacaacgcctataaagtatccagcactaaacatagtcatcatccccgcaatagtaacaaggcccagtactctcatgtttaccagcattgtacgccaagaacaccacaaccgccgccataataataaaaatccagatagccattagtaaagccctataccagcattgaattcatcaaccaaataagtgcggaacttttcacaccgttccttatttggcgcttgtttgcatagattcatcattggttcagactgcaaaaactctttttgtttcagcaacttaccgcgtttatacaggtgagcattttcctctccccacatataagcaacatctaactgttctgcgatcacttgcttacatactgcgacatctttgatatcacgattgttgcataactcatccaggcgagcatcacccgcgtgagcaaatccagcaaccagagttaaaagcagtgctaactttttcatgatgattccttattcatcctcttcgataggggtataataatgcgcattgcagatatacgcaagaacttttttcagagacatatcagagaatgtcggatcctgatttcgtctcatcccactaccagtttcaacagcccaacgtttgttagctggattgtatgtcagccagtagcaatcccattcagacagagtatgttcgaacagatcgaaacgcttacgcccatttgcttgcggccttacaaaaggttcaaccatttctaaagcggttaacactcgattaatgttcgaaccgtcttcatccatcgcaatccgcaaacagtattggttaatgtccggatccataccatcgatacccaggccgatagattcgaaaaattttgtcgccgcgtgataagacacactagaagaacgatattccaacatcacagggatcttttccccgtccttgacgttgttaatgatatcctgatcgataagttcaatcaggtctcttttctccttgatcaaggtagaaatttcttcttgcagcggggctatcttcgcatgaagttcttttatccgttgatcaattacggacacttcgaaagctaaatttctcattgcacccattccccgtttttgtcgatgtacatgatccaatcagcaaccgcccaatgggaagtattgcctttcggagtcgctacgatgtaggaaccagctttaaacagtacgcgtttagtttcgttcaggatcaggtcactcataatgtattcctctcaattagatgcatccataataaaaaagcccccgaccgaagtcaagggctttttgtcaaatgatttgtttttcttctaacagcttcgcggttgtattaaccatacgagcataatcacgggcttctttctttgtatacttgaaaccagcgttatagctcgccagcgcctttttcaagtcgcctttgtggtaatcaagccaatactccagttcatagatcgcatacttcgatccaccttgaagagtttcgagctttttgattactacgcgtttaggatatgacttatccattcgtgcgctggcgctccttgcggtaacttgccagcatccataagcgtgatggccttttttacctttaccgacattctcacatgcgcgagactcgatccaggcaatagccgctaaatgatagcctaaacgtttagccttatctttttctacaggttttgcagtcttcaaatcatagttgtgtccaactcgataagcatactccagaacctctttctgcttcggtgtgatgttatccaaatccttgatataggatggagaatttttgtttgccggaggctttacagtagccttttgtaaaggcaattgatgagtaggcaaatccgcaatgaaatcccctagcggatccgttgcagcgttgccagaaaaagagcacaagaaaatgctggcagcaattataattttcttcattttaatacctatgttgcaaaaagaggggcaataatacaccccactttatatttatgcaactattttatatagttttcgcgtcgcgtagtttatcggtgataaattcagcaatgttataatttgaaatagccttgttaggatcgtatagtgcaacgatttcatctattgataccataacggcatgtttaaagtagacgctccagctagtagtaaagatttctctgttgtcaaatccacaatcagggctgaacaaagcgcggtatttgtatccactgtatttcgtcagacgattcgtgctgtgcgcgtcactggtgatcagaaaagttccctggtgagtttccacaacgaaaaagtatccgaggcgttctttgttgtccagcatcttttcaaacttgcgatcggtttcttcgcgaacaatacgagaagtcagcatttccaacactttatcgtattcgggccaatcattctcgatcacgatcgcatcaaatggtttcttaccattaatcccgcgcccgatttcgattttcgtgcaaatttcgttgaacgttttcaaatcttctggcgtcagttctttaagatcgctcaattttgctacataataacgtttttctagtttcattttacggaaacctcaattcaaaaatagtttcactgagttaccacatttaggacatatgataaattttttcacaacataatcagcagcagagaaaaatccattgtaaatcgcttctctcttttgctgtatatcagatagttcatattctaacccacttttacagcaactgcaaacagtaattagttttgggctatggatgacagtaatcatatacacctcacaaaaaagggggctttcgcccccatcattagaaattgtcttcgacaaacgccgcgagacgggaacgatacactgtatcaagaatgatatggcttgagtgttcgtattctttcagcttttcaacagcccatacaaacccgttgttaacggcagtgtttcgagggttgtcgatctgcttaatgttcccgcatagtatcagaagtgtgttctctccgcaacgagaaatgatagatttaatttcgtggttgctaaggttttgacattcatcaacaatcagcacagaacctttgcccggatccggatgtccgatactgcgaccacggaagtaatacaggctagggaattgaaccacccctttttcaatcaaaccttcaatgtatttttccgattccggattatccttaaacagaatattcaggctagtaatacaaggttcgatagaaggccggagtttttcgcccaatgtaccaggaaggaagccaatttcacttgataacgggctatctgacttcacatacatcaagttagcgtaatgtccactattaaccaggtgcatagcaccggaaacagcaagcattgttttaccagaaccagcgccgcccataatggtagcaacatcgatttcattgctcataattgattcaacgaaagccgcttgcagagaatcacggggttggatagctttcatgagtttgcgtttcatagcctgttcatgcttaacaggtaagacattcaagcaaatctcatcagcagtcaccacacgcccgactaactcaccgtttgaggtaatgtactggttaggataaaaatcttcgtcaggaagcgaactgtaagtgatttgggctacattatccgtatatcccaacacttctacggtatcccagaaatcagggatctctacataaccggaatacaacacatcgctatcttttaacgtatcgtcgccagtatactgttctaccttacacccacgggacattgcgatcagcaacatcataatatcgcgagtaactaaggttgcatcctgttgcatacaagtttcaatgattcgttcgtcttgcttgtcaagagcaaacgttttgtttccgacataatcaaccactttaagggtgatagtgtcagacagtgctgggtttgtcaggtttaaaggaatacctgatttcgtaatcgcatcatatgactgaccgaaaataacttttgacagaagccggatcgccaatcgtgcttcgtgcgctgttcgttctttcgttttcaggtgatctaattcacccatagtagcagaggtaataatgatttctgtaccaggttgagtgaatgaatagattgaataggggttactaatcaaaacattggtgtctaatacgtattttgacatacattaaccttatgtggtttcgttaaaaaatgcaccgaaaacctcttttgctttccggttataaacggattttgcttcttctggagtgttatagtaccccaaaaattttctttttccatctatgtttatctgcgctttgtacttcccattggctttatgataagaaacacctttcaaccctgtactactgtttgagttacatttctttttcatcgcattttgctggttcgtcgctttctgtaaatttcttgctgtatctccattctcaacaccatatacatgatctacgataggaggaagataaccattctcaacgtaaaacactattcggtgtcgcaaatacatagaacctttaaaatgaatttgggaatactcgtttttgcttccggcttcacttccaggagacatagggccgcgctgaactttccaatacactttacctgtagatgtatcaacatctacaaaattcagaagagattcgatcccttgaatctcttcatgtatggttcttgatgaatagccatgacttttcattacatacccagcgaaattacgtgaatatatgctaatggatgtttcttttgtacacaatgcatgagtgtattatacacaatgtccatgcgttcattgcgcgtaagatcacactcatcaaaaataaggtttattgcctggtgctctattcgacgtccacggaaatgattaagaattgcccctttactggtcaatacatcacatccggtagcaccatttagctgtttggcgtcttgtgctgcatttaacgtatgcgctacgtaaatgttaagggaactatgggaacgtttcataaaatcaaacgcgcctttagtcttttgcgtttctctgcccagatccagcctggtttcgaataccataaaatcgttagggccgtaattatgcgttggttcttccaactctcgcataagatgcatcttacgacattcttcaattgtctttacataaaattcactattcatgttttacctttaaggggccaaagcccctttgttacgctaattccacatgcggggcatcaatgaattttgtttcgatcggaaggttcggatcatttttccagttgataccaaaacgcagtttaacacccagttcatcacctgcttgtttaacagcattcaggacaggcaaccacactttagggtttgtttgccagccttgaggcaacacgctaggatacagatccaccgcatcacccgtgatgtgttttgagttcattgtttgagatacacccttacggacgttctcgcgctgttgttctacagtacgcagaccttcacgtacaccaaaatcaacaggagacagttgcagagcacgttctacgactttcaccagttgaggtttaacgcctttaaggttgttaaggcttttttgactgaatttaaacataaatcacctcttgtaaaaataccctgtttgggtacacagggtatttatggtttaagaggttcgataattaataatcgtaaagatcaccgaagcattcttcaaattcacgtttacgttcaatttgctcgtttctacgctctttcatatcaggaggaagacggttttcattgacttcatcaatgtaagcctgtgcatcctcttttgttagaaagaatgcatggaaattgtatccgttgtacccgttcatactacgatcttcaagagagaattctgtgtgacagtcccagtctttgtacagggtaatacatttagcaaacagcccaataccgcgatgaatgtatgggaatccagtaacaatcatcttgctacccatttccgcattttctccgttcacacagaatacttcatacatgatcgcacctggtttaacatctttcttaacagcacgtttttcaaaagcacttttcataatatattcctctcaattggtgtaactacagactactagtttattttctgaatgtcaacaaggtttatcgttttttgacggaaaagttagagtgaacaaacgatcatgaaggttgtcgatccgttcacaagcctgtttcagtatggttttatcaccatcatttgttgtttcaatgcatccaagttcatcggcgtcaatgttcactacgtcgctcatcaatgaagcaaacacgttagcatcaggatgtaacagttcttcgatttcggccttcatgccgtcgtgttcagaaaggatatcaataatatcacgggttaaatctccctggtacgggaaccctgtttctaaatgattaatgatcctttgtgctttcgtaatcataattttacctacaaaaaagcccctttcggggctagttaattagagttcacagcaacggcacacaccgtattttgtaaatggagcatcaccgctaacgtaggcccagaaatcacatgcttcttcggcagtatcgaagattgcagcatcatagaacccgtgggcttcgttaccgttctcatcgatgaaaaccggagtccagatattaggattgaagcaatcgtcaacaacaacccaaccttctttagctttcattgcttctttgttggcttcgatgtgagctaagatttcgttcatgatgtccatttttctctcctaaagtgtgtttcgtttcgacagggctatagtctcataaccccgtatctacgtcaacacttatttgaagcgaattgtactatttttgaaaaataatccagagcacacagcaccttcaattttcacccctgtagggcttttagcaacgaaccctgttgcgtaggtgtctttctcatcacatgcgaaccaggcgcggcctgtgtacgtgatatcggtaaacccgttagcagtcagaatacgttctgcttctttctcatcggtgcatccagcttgtgctaaaacgacaataacgactaacaccaaagcaataatatatttcatgttaaactctttttaagttggttttactggcttcaatccagtaaacgggatcagaatagttaccgcacatacccagtaacacagttgtacatcctaaatgatcggaaggtctcaatccatcaggatgaaaaggcaattcgttaacaccgatactggtagcaaaaagagcacctccagtactgtaaaatgttttgatatgatcgtatgcatcatcaggccactgaaaacgataagttttattgtcaatggttactgtatacatatcatattccgtaaacaacggatcttttccttgtgttgccccatacagagcgccgcgccattcaaccagatttgcttcaatgtcgcttacacaaatttcgttacccatacgcaaatcatgaaggatcccttcaatggtacgaatagccccactaagttcattagttaacatagagtttcctttaaatcggtttaatggttttcaggtgtagtttagcataagaagaaccaaatgagttaccattatgatcaaacttatgttcttcactcttccagtatttccccgatttcatcaagggtatacgcttcttacctgctgttatcgtttcaaccattccggtatgagtgaatgtcatgatataccctcttctttcagcacttcccagatcaaacgatccaggtgcatcaggttccacataaccgagtcatacgaacccagcgagcgggagtaaatcactccccatgaacgataagccttttggaatgattcagcactgttttcatcgtgaggcatatcgtcacccgaagcgatcagcagtttcagaaccatcaggctattgagcgcctttggcgtgaattcctgttcgcttaacttcatcgcgtaccgttcgatgatcgcgattgacttcggatctttaatacgcccatctgtacgacgcgttttaaacgcgctcattaattcatcgactacggcggtacacttcatatgcttcatccttttcctgtgcagacatccgattatagcggatctcttcgcgctgttcaacttctctcacggcttcggctttcttttcagcggtcagtatgtgatgtactacagcgtttcggattccccagagatattcaatcatctgcatatcttcaacggtgtgataacctttcgtatcacattcaaatacaatttcatcgcgttctgccattgccacctgtgcggtagaaggacaaataaccattccagagtatttttcaatcaacgattccagtgtacgcggttttgttggaatgtcaatagataccggaaccattcgcatcgttgaatcattatgggattgataaatcatcagaatgtgatctccgcaaactgcattctacgctcaatcgcatggatagcgttatcacgctgttctttgttttcatatccagcccaggtaatcggggttgaacagatcaggtgaaaagtgattgctgggtgtctcttcccttcaacaacgattgttgcatcatcttcgatccaggttacgtgatccagattcaccggatagtttcttacggtaacagtttcaccaaccaaaggcgacacgtccagaatatcacgatcacgaacgtatgatttaatacgagatacgattaacattatttcaactccactgcatatacatcggtttcaggggctttgtgtacgcgcatatctttaccacataccgcataagccggacagttacggcaaccgttatgatccttgttgcccgtcagttctttacggaactgttttgttttcgggtgttcccagatatccttcacaaaatcttcggcttccagaacatccagaccttcttcccagccaccttcaacccaacgttcggtaaacgagcaagggaagaactgaccacgttcattgatgtaagagctaaacatcgtcgcttcacagtcttcggcgtattgcttgtactgttcgaagttcgggtgtccctccatcgcttcaacgaaagcgggggctgaacagctatcgaatccaaatcctacaccagaatcgaggcaatattcaacaagttttttatattgttcgcgggtaacggtgtcccagttcttaccgcgtcctttttgtttcagtcccaggaacacgatcgcgttgacttgtttcaggcgcggatcattcttcacggcatcaaccacgttaaacgcatcatcataggttttcgagctaaccatgaagtgaaggttgatttgctgttgtccggcttctgtcaggttcgctactgagtcgaaagcgacatcaaagccagcgtgtttataaaccgatacagcaacagccccagcaaccgccgctaaacgcgctgcaacgtcttttgatacgtcagcaatggtaaggttcggcacaatgcctttagaacgcgcatacgccatcatatcgaacatatcagggtttgtttgtccctgtgcatcagcaccgagggcgcattgagtaagccagggcattttatcgatgatttttttgaagttggcaagatccatgttgaacccgttcgggttattggacttgtagcagaacccgcagagtttacccgctggcccgttgcatttggtagtgatctcgatatcgagaatttcggggaatggtgcgtattctggatcgtgttcgaaggtatggccccaacgagcgaattcgccggattcaacgttgaaatcgtagttgtatcccttagagcgagcatgacgcattttgcctttctggaagatcaccaggctaggggctttggtaacgatgctcgaagagtcaaacagatgatcggcaatcttattcataatataattctcaaaatttaacatgggattggaagacggcgcgagcaaggctttcattgtcgaacggtatcgactggtgttgccctttgctgtcaatgttaacgcgccagaactcactcgaaccgtttttggtggagtaatgcatcagcgttaccgttttattcttttccaggaaggtgcgtttgtcaatctctgttttgagttcgtgttgcatcattttacactccgtttcagtttacgttcgtcagccagttcttttttgtacagtttaatgtacttcccgttaaggatgcgaagctgttggaaaactttgttgcacaaagcacgtttcgctttgtattccggtgtattgcggattgattcgatcgtcatccccatttcatttttagggtacgcgctcaactccctgccgatctctctgtgccagttgcttaactgatcacgctgtgctttgtactcttcaaaagttaacataacaatctccggtttcgtttctatgtgtgtaaggtatcattaccctacacacaacgcaagcgattttattttccgtaaagaacacaatattctttatatttttcacgggctttttcttcattactaaaggaaactcccgttccaaaatcagaaccttcgaacgtaacatcccacgattcatacccatcttccgaataataggaaagtgttattttacgatcttcaagaacaagttgttcaacaacaatatcaatttcagtagtcatagttcatttccataatcttttgctgcatcttcgggggttgcattcagtctgtaaagctcaacagctaacggactgggttttatttcgcggttcaggatctcactgataccgcgaaggaattctatataaggacggaatctcatttgatacgtaccgcgttaaaagcctggttgcgcagttcataagcctgttcaagctgttcagtagtgaacagaggactatcagtgttagtggtgaaactgcaaatggttttgttgtcggcgttgacttcttcgacaacgatttcataaccccagatcccgctatactcacatttcacgttccggtacttgatgtaaaccgcagcaacatcttcttttttgtagttccggcttttgtagataatttccatgatatcctccttcgtttcgatgtgtgtacaataacagattggggttatagagttttagcaattcgtgctaattataccattttcttagcgattttccaggaggctttgaacgccggaacgtcttcaatatcaatccagaaaccagatccgaaaccatcactatagcaagggcaaccgtcgcagtagttttcccaggtcatcacttcaccaccaacagaagcaccagtttccatagcacgtaatgcatcttcaactttttccagtttttcggcgttgtcgtcgtaaatgacaaagtaccatttaccgttgtattcgttacccagtttgattgcttcgcgaacaagtttcatgatgatttcctttttgtctgtttcgtttctatgtgtgtaatataacaaaacccctaaccataggcaaggggtttttgcaaaaattatcgtttgatcggggtattatctataacccgttgaatttccgaacgcatcgtagaatactggcacaattcggtaagcgcccgatccaggtgcatcatagcgtaagaaaactcttttccgcatttgtcgcatcgagcgtataaatgtaaatggatgcgcccgatcccatctacctgactatatttctggaatatgtaaggatctgcacctcgatagccagtagcctcgtgcttacactctcgtttgaaccatgacattaataatatccttgtacgttgaaccggtcacacaacaatttttttgtttggttggtatcgttttggatagaatgcaacatagcggtaatcatgtttaggttattttgcatcatttccgcgctcatgagaacttccatacgagcacgtaagcgtttattttcttcttccaactcaaccatacggtcatatgctttgatgcgctctaagggcatatcaggacgctctttgagtacgcgagcacgttcaacctcacaagcatgatttgctttccagtggttcgattccgcttcaaatttattaaggcggcggatctcttcaaccatctttttgatcatgtgtggatccatcatgtcgatgaatttcatcaggcaattggattttgttttgttgtcagcaccagaccaagacgaattatacgtaacggtaaacgtgcggcccatttcatcaacaaccccgatcttgttatcatcggtgattgtagccgcccatttatcccgcatggctgtacaggttccgctggcgacactatgcaacttgtttaatgttgcatcatcaaatacaatttcatcactcatatatgcctcacatagatttcaaaatacgcagaagtgcgttagtaaagatatcaggaacacaaccaccaaacaacttatgattcatcagcgctaatttcatgctgtgattttcagtatatcgcccgttatggatcccccaggcaacgacattaccaggttcatgaataactaagttagtgagagtaacggtcatgcgctctttatcattgatagagaatgaatagcagtaaccggatccgatgtcgccgtaaaggttaaggtctttcaatttcccttgctcatgcaagcgtttcatatgaactgcacatgcatgattaatagtcatttcgtcatccctagcccagtcatcaataccagaggtataacgaatattgaaatagttagtcagttcatttgatacgctcattagaaacctcacttttataaaattctttaccagacccattacagctactgcatttgggggaacggttgttatcataccgccctgatccattacatgcaacacatttccgtaatttccagccatacacgaaccgcatgtaataatcggttcgtgcggccttgcgttcgtggaaattcatactttgtaaacctgaaccaaccacatttcgatgttaggcgcgtaagtaacgtttaccttatgcatagtgcggtatttgtaagcggctttgtacgcatcgagttcagtcggaacacagaaagagaaaccgttatcatagcgttctgcgttagaaacttcacaaccaactacagcggcaatgtttttattcatgttcatgatattttcctttctctgtttcgtttcgatgtgtgtaatataacaaagcccctgcactaatgcaagggctttttgattattttggtaatttttcgattgttgctttcaactcattgattttattaaagagttcatcgctatatttcatcaactcactacggcgtttttcggcccacttgatcaggaattcaggagaatctacaccatacgtgtaaccttctgcactcagttgaatacgagcacgggaaccataatcaacagaactttgttcaatgagaaacttgaccgcatcaagcagggctaaatcttcatgacttaccatgattccttctgcctttggaagatccacaacttcatcctgaatgagttcacggcgggttgtttcttccagtgtttcatgattctggatcatcgtttcgaccggatcctttgccacggctggtttgttttcacctacttcttccaaaaacatcaacatccatccaggaattttagtccggaaagaactttgtacttcactggtgcatgaatttcccagaatgtggatcgcgttaccatgcatatcagctttattgatatagataacgttctgctgttcctgtcggttgctaccataagaaaggaagcggcgtaacgatgtgttatgaccatacttccctaaatcgatttcagccaggcaatcaatgatcccacggttagaaaccttgtaacgtttaccctgtttgaaaaataacgattcttccaggtgagtaggggtaaactcttcataaagaacatagaattctttaggaattttgcgctgaaccagactcagtttacaattattagaaggaacaataacagagtgaatgtttccttcggtatcacacatagcttgcattacttgcggatagtaaagatggtctttcttgcaagtatagctatggatacgactctgacgttttttgaagtaccatttaccagtttcaaaaggcgctgttgtaaaattcattttgcattctcatacatagttaaaattgcttgcatatgttccggtgattgtggaacccctgcaaagttcactttcaaaaagaaattcaaccgatcttttatgttgcactcatcgagtccaagcgctggcaatgaaatgttttcaaaagcacgttgttcatgtctttccatttcaccccaaaacaaacgggaaccgttaggcatcggtattccaatttcattgttccagaatttcatgatagttgtcaagcgttgttttccatcaatgacttctacccatcgagattcgttgaattcactatcaaccgcgatcgcaatgataccgcaaggaaacccagtaatcaaagtcttcatgaaagcatcttgctctttctgcttccacacgtagggccgctgataggacggattcagatccagatcgttgttcttgaaccaatgaatgtaactaccaaccatgatcgcatgatcgcgactttggaaagtttttaactcacgaatacggtttcttacaatttcatccgacattataaaatcaccatccagtatataatcgtaatcataaccgctacggtgaaacatattgcagcgtacacccgcgcattatgaacctgtgttttcaattccgcgatctcttgatccttttcgctttcaaactcttcgcgagtaccataatacccaggatcgttagcagttgccaatctaaccgcatctttttcaaccagcgttgcataaccgctttttatttgtgtcgccccgtaccatccaccccgatcgttgttaatgatcaggtgatcgcctttttcgttatgctttgattcgccaacgacaataaccctcttaccattcataatatgatcctcaaaggggccgaagcccctattttgcgttcttctgtagataatctaacagattcccgctttgatgtaaatccaaaactttagaaaacttctctgcgtttctttcgtttgtgaattcgtcgaaatgccatacaccatcatcagctattaacgcgccaggtgatgaacctgtttctacatcacgggaaagcgcaagccccagagggtgtaagatttcgcggttaatgcgccaaacaaggcccatttcagatagagtattaaaatcgacgtatttcatattatacctttggtttaacaccgtaggccaacataccgaaacggtgatcgttgtctgcatctttaaacagaacttcgttaccatcaatgcagagaacctttgcttccggatcgatgtatggaagcaaccataaagggatcaggcgtaggccgctatgttcatcccaacgactgaaattgagttcttccagttcatcaagggaaagctcattaggatcgatataacggaaccatttggtatttttgaggcggtcggggaagtttacaatttcttcatagccgaattcagcactccatgaagagtaaacagtgacttcggatgctttggttaaaacagcatcgcgaattgatttgcagatatcgattaaagtcagttgattttccatgatatatttctcatcttgctaaaattttaggcagtagttgccccatcgttttacgtgcatgtgacggaatctgtgagatcgggacatatttaaaatcatccatttcacgtatagtccgtccgttcttaacgaaagttgatgcacaatagcattcttccgctactgggtaatcttgccctacatagaggaataaagcaaggttttttgttttcgtgtaatcgagaacacccaggctaaccaattcctccgcgaacacttcaaatcctgtttcttcgaagcattcgcggatcgccgcgtcaatatgagtttcgcccttttcaacatgccccttcggaatatcccaatggggcgtttcggtggcatggcccatcaacacggcaccatctttaataaagataatacccgctgatagttccatttattcacctgcaaaagcgttatcaaatgctttaagtgcgttgttagcgcgagcactggcttttgtcacaccagcagaaaggttttcgaagaaagtatgtttccacacttcacgacgactggattcatgctccagactgtttttgtgatcaccacgaatctgttcttccatgtcgtaacggtacagatcgagttctgcgtttaatttctgttctaatgcctgtgcaaatacatgttcaatattcattttgtatagcctatttcagatttaaggttttcgagggtggagtgataaacaacattcccttcgtgtcgagtataccatacttttccgttctggttacactcattcattactttttcatctaaaccagggatcggcttcatgctgggagaaaacgcgatagacatcatttgttctgcactatcagcaaacccacaagggaaaacagatccagttggtttatcaagatacatcaactctactttagccatagatttcttcgaaatcctcacaatcaggcaaatacgtttcacagaaggtgcaaagcgtaaagaatgcaggttgacgaataccaggattatccggtagatacatccagaaggtgttagcaaacacgatgaatgttttcaggttttcggtggtaatttcgctaacaccatcatacccggattgattgatcgcgcgttgcagcggcacctcatactgttcgcaatagtcggcataatgatcgcttgttaccaggctattagccattttaatcaaatcaacgattttcatgattttacatattccactttaacaggttttgcaacaaatttatctttggtgcgcccatgaccattacacaggtcacattctttgttgaaatctttcatatcttcgacccatccagaatctggcaacccagacggatatgcgttataacgaatggtttcataaccttttccgttgcatttcgggcaaacatgaggacgttcctttttagcagactctgccagttcgcgaagggtagtagaactaccataagcccgacacatgttttcaaagtcttttaaagtcatgttataaacatcgatgacgttatattttttgccggatggtttagccataatatatttctcacttaaagatttttttgatgaaagagatagcaaggccgataccaaagaaaatcaagtaaccttttccgtcaccgtgcgccaaaacatagagtgagctgccgtatgcgatgagttctgcgatgttcattaagtttctcatgatatcctcctttttctatattaagtatcttaccataatataaaccaaagtcaacaacaaagttttatcaacccacttatcaccagtcattagtaatcccctacaggttgagacgccgcaacactcaggatcttgaaagtgcaattgttccattcacaataagtttttgcgcaatgaacacttcctttcataacaaacccgtttgagaaaattaaccagtaaagtttcatgatagcctcctttgtttcgacaaggccaatataacaaagcccctgcacgaatgcaagggcttttttcagtttttcaacatccaaagttgcggaggacaatctttagaagcgattagacgatccaggcgggacataacccgacgataaccgtcgtattcaaaattaatttttggtggaacgtagttgacctggattgtttttctgttagctaaagaaacatactcagggatcaccgttcgcaaccgtatagcgatcactggcttctcttcgccttcgttaaagaacatttgaacagttataggacaagcaaagattttaccatttacccgacgataaacaataacttcctgtgtcccttctgttttggccttcaccgcgtaggttagaacataacacgaataatgatttgctagactcatcatgatatcgcgataagtttcaatatcttttttaatcgatactgaacggtctttaaagcgatctgcaatgtggtcagcagtagccgctaccttgattgtataccagtcacctaacgcgctagtaaacgcctcgctaacttcttttcgtacactgttaacaagatacattaaacgtgttctgttcatataatcctcactgatttttgaagtattctatctgacgcaaacgcttttcagcggcgtctttcgaatcatattcaccaagttcttttgtgcgatcgtggttcattactacccacttgtcgccgcgctgttcaatgtgttctgtaatgtcttttaacgacttatccagatccagcgactcggcctcttcacggataatagtcaaatccacgggcaatgtcaacaaccttttcactccgctgatatcatccagcatagaatcatatgcaagggttatgtgcggcttgtaatccgggtaatcgtatgttgcgccagcatcaattgaatccttgaaacggctatgcaggtattcagactccaggatccctacgatagtgctaccgtattttgtgtcccacttttcaacatcaaccagtttagcaggttctataatgtcctgttgtgggaacaaatcaaccgttttccggctgtatacgatcgttgtatgcatcttctcggcggaaacagcattctttgtgatacctaatgtcttttgaacatttttcaaagcctcacatgaagcctgatcgaatttagcacacatgtagataccaggatctacaacaggttttgtgatttcaagaaatgatttcataaaacaccccaataaaaaaggggccgtagcccctttgtaataaatttgtttttacgcttcttcgccaaaggcggcttcatcttccgcgcctttttcgacttcaacggaagggatcagagcggataccgcgccaatcactgcttctggggttactggctggcttgcgtcaatacccagtaccgaacacaggtcggacagaagttgacgatgaacagagagttcactttctttttgcgcgattacttcgttcagatcgaatgcgcggcctttcagtaccagtacttcattttgcagtttttgaatatcagacattttattacccattgttaaaatttaaaagtatcgagcactttgctctttagttgtttcaaagtaccttcgttagtgatgatactatctcccggttgaggtgtcaaacctttttccgtggaatgttcatcaacaattccggtatcctttacaataaacacaaacttagcacccaagcgtttcaggtatttatattcgtgttcttgacgacagtcagtgaccagaagatggttgtattcgtcaccagtatatttattgacgaatctttccaacgtgtaacgaacccaaaccgtgttatcatacttgcatacgatatcagttccaaacacttgcatcaagcgtctgatactccagggagtatcgttactcataatcaggttatcaatatcatcaggactataaacaatattgtatccacgttctttgaggatttcaagcccgattttgaaaatatttagaacatcttcattagacatcacaagaggtttctctcgatcgcctttgtaaaaaatagcatccggatcagaatattgtccttcaatcatattgcgaatgtatggtttatcgtaaccatatcgctgcattgctattcttagcgttcttttgataccaaatgccagtgcttcacactgaacatcattgtacgcctcttgaataaatttagcaaccgtatctttaccagttcgcttttttccactaatcacataaatcattagctcattctcttttgagaagtgactacttttccgtcaatttcaacttccatatgaaggaagccaaaagttgccatacacgtaaccgcttcatcactatcgttagtataacccaattcaacctcacccaagtttgttgggaaggcaccataaaatctaaatgtggcgatcgttttcatctgggagttatccaggatatgcacagcgaatgattgcttatgatcatcccacgcaacagagttaaactcattgtaatcgtttgtgctcaacatccatatgtaaatcccaagatacgatctcatttcctcatcgactacaaagcggatcatcaaaggatcaaactcaaaagccgaaccaggtactttacctcgaaccatcatatttgcaggaatatcaactgctgggaggttcattgatggtagtgtaaccccttgaacttgtaaagtcaaacctttcatgtaactgttatcaggaatatcaacccgaaagtttgtaggtgagatttggtttaaaatcatttctgtagacataggatctcctttcctctatttagcggggaacgggatcaaagcggcctgacggggtaatataaaaaattgaagaaaatgcttgaccttttaaaatctttgatctataataattattaattaaaattttatcaaaaagatctaacaagatcaagtaaaatttaataaataatttatcaaaaatttttagatctgatcttgaattcacaaattttgtgatctataatatattaatattttattttatcataaatttttatgaagatcaatacctagatctaataaattttatgctttttctgaaaacttttcctttaccccgtcactaaatactggtactatgttcccatattggaaattaggaaaaacaaaatgactcatttgaaaaaattcaaagaatttctgaccgaaggtaaaaccctcgctcgtaccgtagcacgtggtcaacgcgctaaaacttccgataaacattcaatcggttttcttcacttcaaacatggttctgatttcgaagttttagcaccggattctcacgatctggcatacttcggtaaaaacattgtacgtttgaaaggtatgactactggtaaagttcaagcggcttatgtcgattgggctaaaggtactgtttctttctacagtggcaatccggatgatgatctggatttcgacaaaccagaaaaattcaaagctgctactctgtatgaagaggcggaagaaaatctggatctgtataaccagttagcagaagatttcgaaatcgagatccctatggatgaagctctggtgaaaggtaaagtttacaaactcccaagcaacgatatgcgtcttctgtacactgggcgttctaaaactaaagcaagcggtgaatatgcagtgtttaccgtagttgatgcttccggcaaacctcgcctagtatctggtaaaaaattcacccaggaatataaaggcgatatggtttctaaactggttctggctgaatccgaagatctgaatgaagcggctaaaggcattcgcgaaaaagttattgctgtgatggtgaaacgcgggtttaacgaaaaagatgcagaaaagatggttgacaaaaacctgaaagatgctatgaaagttagacctggtgcgacccctggcaaacttgcagaaatagttagcaccctgtaaaaataaagccccttcctttcggttggggctttttgattagtatttgctccagacttttttcgcgccgtaaggtttccctttggacataaattgctgagtcggtagccaaacagctttcgcccaatctttaggggcaatctctgctaatggtgatttgaggtgtgatggtagatatgctttgatcatttctgttgcgcctcgcatacctttcacgttaccccagttaattttgagtacagtcttgttagagaggcgtttagtggatccgtaccctcgcttcaataactcttctaaaaactcctgtcgtgctctgggtggagcatagtgcaagttcaaaccatagaacactaagttacccgctttcgatcttccggatcctaagaaaatgatcagtggaaatctatcccaatacggcagggtgtctttatattttgcatcatatgcaaacgtgtacaggcgacccgttgctggttttgccacacggtgtgttttgatactggttttgatgaaattaccaaaccattctgttgaatctttctgtcgctttgctgctgatacaccaacagtgatctttttcagactattacggaaatcgttgatgatctcgatcccgtgttttttacggtagtcattacgttttttacgggcttctgtctctgcggaacgtcgttcaatctcatcatcgatctgttttttgtaacgatgcattgactttgtgaacgttgcgtagtttaatccctcagaatcggcaaaacgtttagcagaaacacctttcgtttttgccttgcggaatttgatccccagttcaacccaatcactcaatttgcgtttgggtggtgcttttggtttatcctcttccgcgatgatctcaaactcaaaaataaaactcatgtttccctccagggattactgacctcgccacccaaaaacttttttgagtgattcttctgttacgattttgaactgccagcctttttgacggcatagctcatttgcggctttccacttatcaatattaactgtataggtgtaaagagcatcaataaatttctttttattgtgtacgttgttgtttactggcttcggtgggggcatggtttctttaaggggtttaacctcccaaagatatgtagtaccattttccatttccacatagaaatccatgtaatagcgtcttctcttaccgtctgcattgcagaaatacgggatcactatacattcagaattccaacgttttacgtgtgggtttttatccagccacttcataacgtagcgctcccacgatgacctatacgtaatctttcgcggatcgcctttatacttctgtatgttttcgggtacaaacgaccctttatacgtctgtcttccagccattgcgtaaatcctaaatagaataatataacgtttagataggggaacttatcgtgctattttcatacttcccgcctgttgattacaaaggcacccagacaactgatattttccgagactatcgattttattttaatcgtgtgattggaaaatataaaacccgtagttaccagataacaggcacactacgacctgaacaacttgcagaatcattatatggaaaccagcaatactactggatcctgttgatgcttaactctgtttatgaccctttctatggttggatctccgatcaggaagccgcgtatcagtgcgctatacagcgttattctgaggttggcggtgaacaggttctgtatcatgtagatgaaaacaacaacaagtattataaccttgtcgaagaccccaataaccctggtcattggtatgacaaaggtgacaaaccaatgctgtatttacagtatcaaggtgtattagctcctgtagatatttatgaagatgcagtgttgcaaaatgaagcaaaacgaacaataaaaatcattagtccgtctgacatccaggcgtttctgaatgattttattaaagaaatggaaaaggctaactcatgaaattaggcggaaatttacactcccctttctttgatggggtggttgaaaacgttgatgatccacgcgggttgggccgtgttcaagtccgtgtatttggacaacacccagcccaaaaacaaaaatccgatgcaatcggtgttcctgttgaagatttaccctggatgatgcctattcaggatattagaagcgctgcgatctctggtgtgggcttctctccaactggtatcactcgcggatcctttgttgttggttattggcgtgacaaatggcaccaagatggtatgataattggtactgtcgctggtgaatatgtcgaacaaccagacacacagaaaggtttttgcgatcctatgggtgaataccctcgctatgttggtaacgatgttaactcccttgctttaggtggtttgaaaggcaaaggatcatcaagtgtcatcattcgtgattcaaacacaagcatagcagtaaacccagacgatcgcccactggatgagataccagaagataaccgccctgatacgggtggatttacgatcgaaaagatgctcaagcaggatgaggggatccgtacacgctggtatacagacagtgaaggatatccgacaatcgggatcgggcatttgcttatccgcgaaaagactcgcgacactgcaaaaattaacgctgcgatcagtaaagcggtaggtcgagaagtaacaaacggaacaatcacggcagaagaggtatcaaccttatttgctcaagatttagccaaagtaagatctgatattcagagaaccgctaacgtccgtgaagtgtatgtgaacctcaaccgtcctcgtcaaatggcgatcgaaaacatgtcgtttcaaatgggcgtcggtggtgttgctaaattcaccaataccctgaaagcgatgaaaaatgaagattggcaagcggcttataatggtcttcgaaattcactgtgggctagtcaaactccaggccgttcttctcgcgtgtctaaaatagtcctcacgggcaaccttgaatcatatggggtacaagtaccagatccggaagggcgctctctgagtgctgcttacgctgcgtataacggtgctacattgctggcggctagtccggaagatccttttactcctggtgatacccgtgtgatgtttgaagaaccagcatcatcgtataatgctgaatatccgtacaatatggtttttgaatcgagatccggacacattcaggaattcgatgataccccaggatacgaacgatataaccgtgttcacccagcagggagttacgaagaaattcgcccggatggaacccgcgttgttaaaatcgtaggggatgattatcaaattgtgatgcagggccggaaactcaacgttaaaggcaacttgcaggtagttattgaaggcgacgcattcatttacaacatgggtaacgttcaacaaacggttgatggtaacgtaactgagtttgttcgtggcaacgttcaacaaacggttgaaggtgagtacgttggcctgattaaaggcaatgctgaactaactgtaaacaaagatgcaacagttaacgttgatcagaatcttaccgcaaatgtgaaacagaatgcaaccgtggctgtaacagaagacgcaacggtcactgcaaaaaatgcgaaaattgagattgaagaaacgatggatatcggtgctaaagatatcaatatcaaagcaacgaataacacgtttattgattctggcgcattaacaaaaatcactggcggcacagtacaggtaggctaacatgattatggattatgaatcaataattgatggaattatgcaaaattatcaacatccttgtgatgctgagatccccgctggctattatcggcgggttatctggcaagggcatacagaaaattatccggctgttggggttgagtgggataccgagataatcaaaatcggtactcatctttatactcaagaaccattcggacatagaagcacggatctacctgttgtcaattcaccgggaacagatccaaataccggacaaccaacagggatccttgttccaaagattggttattatttcaacactcaagcagaaattgatgcttacattacatctattggtgcaactaaaatcaatggtggtaatgattggtatggcgcggatctgtcaaaatcaaacctatacaaaaaccctggcgaactggctatgtataaggtcgaaaacagtggtgggtatctttccggaacaaaccctgtatgtgatgctcgcatacgtcagacgtataatcaggacactggcgcattcaccaatattgattattattggaatggtaatcgtatagcctatatgaagcatgatgaaacaggggcgcaccaatgcaaatatacgggtatgcaggttaacaccaacgcagatacaagcattcctcctgttcctcctgcaatgccttccacttatggggcattaccgagtgaattaagccgtgctgatatttcgtgcattccggcaactgttggtttcgcatatacaaatatcagtgatgctatgttacaggcatggaacgaaacccgtaatacgttcaagctacagtttaacatgttaacgggtgctgtacagaatggattcgggatcgcgacgatgtttgatggtttatccgtatcgatggaagaagtaatggcgggggcgctcgcattgtcacagcaagcatggcaaactgctatgaaagttttcagacaagtgattagcgctgcatttaacattatcggtggtgcatggggattgattaatcagttcttgcctcaagtaaccatcttaggtgttgcgatcaacatttacgatctggtgtttggtgataattctgttcagactttgaaagatgcgtttagtgcaatcatcaaatccggacaacaaacatatgaaaccgtcataaacgcaatatacggggccataggaagcgcatacaattactctgtggaatatgtcaaagctggcgctcgcgaccttgtggatgcgtgtagcgcgttatttgattggtgtttaacgatgttccaaaacggttgcgttgcattaatcgacttatacggtcggatcatgcaaacatgggctatccctccggaagtcccaaacccgttatggtctgcggtgctggctatccgtaacatcatgatgcaaatcaaaccacttgatataattctgggcggtaacttccctggattcactgcaatggatttgtatcaacaagcacaggaaaaagtcaaggcttttgttgatgagtcatacgaacagatccgagggctttatgaacaggggcaggaactttacaaaacgttaaaaaatcagattttcgaacgtgatgcaattcagagaaaattcaaccagtacttaaactggatgtggggcgctgtaacagacgaagcaacagcggcttatcaatctgcattggatgctgcaaacgctgctgtagctgcaacacaggccgcgtatgacgctatacaggaacagattggatctctacaagatgcaatgaaagatacatacagcatggcgatggaagaattaaagaaattgcctttgatgagtacaataaacgagtttttaggcttctgtggtgtcgcatttgacgatcttctcaagtcatatgaaaatgcgattactggtgctcagtctctgtacaaaaatttcattgatagttcgcgctcgtttaaagatcactgcaaagtaatctacaaccaaatttgtacgctggcgttgagtaaagtcacacaatatgtgaataaattgctgtctctcataggattagcaatcaactttggttcgattagtgtatgtgttccagtactgaaatactaaatagtcgaatgatcaagaggaatttataataatggctactgctaagactaagactgtcaaaaaacagattaaccaaatccccgatatttttatcgggggtactttcgaagaaattaaaacagatctgatcgattggctgggtggacaagaagagtttaaggattacgatttttccggctcacgaatgaacgtactgatcgaccttctgtcgtatgctactctttatattcagcagatgggtaacacggctctatttgaatcgtttattcgcacggctgcattgcgtagttctgttgtacagtctgctcaagaactggggtatatgccagattcgcgcacggctgcaagcacagcagtaatgattacggctgctaacccactgaccccaacatcgatccgtatcccgcgcggtacaaaattcatcggtactgtaaagaatacagacagttattcttttgttgtatcggatgacgttgttatcgttcgtgatagtaataacaactatacatcaatgctgaacctggtgcaaggccgtttagttcgtactgaactaatttatgacggttcaagtatcctgatccgagatccaaacattgaccgtagtcaggtacgtttaactgtaaacggcgcacaatgggaagactggacaaacgaaagcattgtaaacgcaacaggcgcaagcacgatttactacatgcgtgaaactgttgatggacataccgaagtttatttcggtgaaggtgaagcaagtcaacaagtggcgggtggtgcattaaccgctgaatatatcgggggcttgaaacctgctaatggatcgactatcgttattgaatacctgtcaaccgatggggaagcggctaacggtgcaaaagattttatctatgtcgatacattaaccaatattagcatcactaacatcgaagaaaacccgactaaatcccctgattatgtcggtgctgatggtggtggtgatccagaagatatcgagcgtattcgagaactggcccctgttatgcgtgaaacacaacgccgttgtgtaactgcatcggattatgaatctttcctgtctcacagatttggttctatcatccaggcggtacagtgctttactgataacgaaaaacctggttatgctttcatttctgttaaaccaaagtcaggtttgcgcctaacatcggtacagaaagaagatatgcaaacgtatctttcgaaatataacctcgcgacgatcaccccgtcgattatggatcctaactatctgtatattgtgcaatctgtcaaagtaacgtatgatatcagtaagttgacggaatcagaggaatggttacgcggtcaggttatttcgtcgatcgactcttactatactgacaacgttgaaattttcaacaaatctttcagtgtatctaagatgttgacttatgtcgatcagtctgatacttctattattggttcggaagcaaatattaaattgctccgtgaaattgacaactattacagcgcccctatgtctgggatccatttcttgaaccaggtggaatctaaatcaatcatttccagtacgttcaagttcaccaacgaagatgacgaaagttatgatgttcgttatgcttctacggcaatggatcaggatggtaacgcaaaaattgtaataggcccgttcaaggatggggatatttcgatcgctgcttatacaggcgatgactttgaaaaattaacagatgcaggaacccgtaataaatattacgaagttggatcggtttctcattacaccgatttcattagctttgacctgggcgttctgaacgtatccgccgatagtttcagcgctgcttatatcgagctaactgcaaaacctctcgaagaaaccatttttactcgcgatggttcgttgatcgtgtttgaaaatgacctgcgtcctcaatataccacattgactatgaatcctatcagtcaataatctttaacccctgtcttcggataggggtttttctttttataaatacgtgatatacataaccgcaaatttggagaaatataatgattaaagcgccttcgattacgagtttgcgcgttgataaactggctgctaacttcgtttaccttaaatgggatgatgttggcatggatttctattatgtggttgaattggcccgtagccgtgatatggacggaactattattccagacgaagagttaatctggacgcagttgggttatagctacgaaaacgaatggtttagcgatcaggttgccccaaatacacgttataaattccgtattcaaacaactcatgaagggtttgaaccttctgattgggtgatcagcgatgaattatggacgtttgatgagaacgcctacgcatatacaaccatgcgtgaattcacccctgctgattcgtttatcaatgaaaaattcgccaaaaacaatcgtgattacgtcgattttaacgatgatgttattatggcttctctgatggttgaggattttgtatactctcccctgtattctgatgtaagccagatcagcgataagatcctgaaacaagaaagctaccatgaaattcaagatcacatcgaacacgtttgtaatgatatagatcgcacgttcctggtatactcaaacggattgctttacctgtttgaacgttttcagaatatggctaaagtgtcaaatgacaaaggccaaacgtggtattactacaaagcattaaacgatcgtgtaggcaatccggtttcccgtaccgttgcttatcagagcgctaacactacgtatgtgttaggatacgatcgcatattttacgggcgcacgtcaacagatattcgttggtcttctgatgaagttcgtttttcttctgatgatgtaacttttgcgaagcttgggaaccagtcagggttagattttgatgttgactcatacaacacgtatgcgcgtctaccgggcggagtgtcgaagtatgccgaagctatggcttgttctagtgattggctctatgtggctgctaagaacgttatgcgccgtattgcgttacgtaacacaccaattgatactgatcctggttcgccgacctttggtgaacgtatttttgatgaagtttcatatactatcgtaccaggaaatgataaaattgttgttaaaaaaatggatgtgctgaatgatcgtctgtacgttctggtaactggtgaagttaaaacggcgatgatggatccaactgtcaaagctaacgtgatcccatcaaacgatgctggcgtttatctgtgggatgagaatgcaaagacgtttacccgtgtttatggtaaaaccgaagatgaacgtttttatatcactcatgaatatacaaatatgtcaaccaatggcgatgaagtttacatttctgttggtaactacaaatatccaggcactttgccagatccagatctggttgaaaagtatccggaagatgtgcattcagcggtgaaatacgatcttgttcctggttatactgcgagcatttcgattaactttgctacagttcgagcaaatcagaacgatcctactgtttggaactttgggccgcaagagtactacaatgaagcaaactttagctggcatttccgcgataaggttagcacatggatcaccaatgataaccgtcctctggtggtttatccggaaaccctgtatactctggttactgatagcgcgtctcctgcgtcaacgattcgtgtaaaccatgaagtttgggacaaaggaacagttactatctacttgaataatatcaaatttactggttttacgaagtacacaaacggtgttctgttgtatcgctcaggtggtaggataattggattctatgaactgtcataccgcgcaagggatgaacttactattttctggaaacctgataacactttaatggtggcaagtctggttaatcaggaacgtgaaaacccatacacgccggatattgaacctggactaatagatcctgatctgagtcacatgattactcgttttgctccgcaaagctatctggacaaccaacagttcgaaaaatttggtgaatactatctgcaatatatttcgttgggtagcaacagttactataacaaattgctgaacctcatccggaacaaatatccgagagagaaaaacaacgttgaatatttgtggtctgaaattaaccgccgtaacatttacctggataaaaccaaacgtgaggcagtggttagattttttgaatcacgtgcaagcgatttctattcaacaaaagggattgaggcaagttatacgttcctgtttaaattactgtataacgaagatgtttccgttgagatcgaaagctccaacagtctcgaatatgatattttggttagttcaacaaatatcagtcaggatatcgtaggccggacgatctatacaccaactggacgcgctaacgttacatacatcgaacgtgaatatgaaaatggtcaattgcgttggtcaatgactctgcataatgctcaaggtaactttatcgaagggcaggttgtcaagtcagaaaaaaccaatttcaccggaatggtaattcgtggtgttcgtggtaaacaaatggctaacaactcgatcgactatataaaccgtggacgctcttactacgtgatgaaaattcgttcaaatctaccgacttcccgttataaggatgacgtattgaggtttgttcatccggtaggattcggcttcatgggtattacgatgttaacagtattcatcaactctggtttgtcaatgactcataacgagacaatcattgatattctgagaaactaccgtttcgatagtggttatcctaagttctggcctgatcgcattgcgagcatggacggtaacggaaaccaacaattcgacctggttactggtgaacctctgtacaccgcacacccgcgagcgggggaaccttttgatgtacctccggaatatgacgttgaagaaaaaccgcttaacggtgttcttccttctgcgcgacggttcgatcaaagtccgttgttcgattgctcaggcgttaaatattcacagttccgtaatttggtggatagacgactgaaagatgatgcaggaaacccacgtgatccaaatcctccatcacagattaaggtaggaaattaaatggcacaacaaaacttgtatcggtcggtaattactgcaaaattccgaaccgaaaacttgatgaacttcaaagatatgatcggcgatgccgccgatctaaacacgatttatatgtctattgggcgaactgaatcatgggcggataacgaatccgaccctaactttgccccgccatatccaaatgatagcaccgatggtgttagtgatatgtggacgcatatgatcggggctactaaagttcctggtgatatgatagatgcaattttaccacgtaaagactggggtgatactcgctatccaaacccgaaaatcttttactttaacgatattgttgttgtaaacaccgcgccttataaccgtactgatccgggtaaaggttggatggtttatcgtgtagttgatgttcctgatatcggttcttgctccatttcgagcattaccggaaaacttgaatgtatcaggatcggcggtatctggagtccgtctcatgaatcgagtgaacctccacgcggagaagctaacgggatcgacatgggcgacggctataaatgggaatacctctacacaatcccgccagatgtcgtgatcaaccgctgtacgaacgaacatatcgtagttcctttccctggcgaactggaagaggatccggtacgttggggttatgataacgtgattcaatggtatccaggacaatacgatctagtgtatcggttaaaggtgaattcaatgcgttttcgtgcgtacatggattctcttttcttcccgcaatctacgctccctggtaacaaagggttccgtcagataagtattattgtaaacccgttgattaaaaaggcaagcccgaccgaacctgaaaagaaagcaactggtgattactataatgctaacgcgcttgaacctgattccggacgtatgatttacatggaaaacagacaacctattattcgctcccttgatcagactgaggaagtgagtattgtattcgaattctaaggaaaaacaatggcttaccaaacagcaaaaaaactaattgatgtcggtgaaatcggcaacccatcaacaggcgatccgctttatgatggtggtgttaaactgaacgaaatgatcaccaacgtttataatgcgtttggtgatgtgcgtatgctgtctgcaaacgaaggtgtcggtaacatggtgatccatgctaccggatactatcagaaattaccacgcacttactattcaagtacaccgatcgaactgggttccctgcatgacatggatacttcaacaggttcgattaccgttgttcttccttctggtaaggttggcgaaggttgctacttcataaatagtacgggtagtgtctctgttgatcgtcctatcgcgtttcgtcctcaagttggcgatacaatcgcgggggttgcagaccagttgtacatcacgtcaccttacacctttgtaaaaatctggtgtaccaaaaaagaaggtgcgatcacaacatgggattattctgtagaatctatgttcggttctaaaacgatgcctgttgacactacggcgcttgtactgaaagcaaacccgactgctattcctatgttcggatatagcgaatttagcggggctaaggtgctcgtatacgcagaaaacgtagctggtacagttaccaaaatggcggaagttttaatgaccgtggatcgtgtaaacaaaacgatttattcaacggaatatgctattttgaaaaacagtgaagatgaaatgtttacattaaactttactgtcggtgctggtgatgtcgtatacgctaacgtgcaagcgatcaaagaagatcgaattaaattcacgattaaagcaatcgatacgattaaatcagggatcgcgtcatgaaacaagaaattttaataggtcaggttgtagacgatggtacaggcgattacctgcgtcgaggtggtcaaaagactaacaacaactttacagaattgtataacatgctgggggatggtgagatcccccatccagcaggtgcctggaaaacctttgcgggtacgacgctatcaccaaaatttggtgaatcatgggcgttgaataccagtgcaaacaaaatcaccgtaaacctcccgaaaggtggcgtaggcgactataacaaagttattcgtctgcgtgatgtgtggtcgcgttgggctaccaacaacgttagactgatccccgcaactggtgatactatcaaaggttccccaactcctaaagatctgtttaaagattttatggatgtggaactggtgtattgttctccgggccgttgggaatacgtcgaaaacaaacagattgacaaaatcacaacttcggatctggcaacagtagcaaaagaaacgtatattgctactcagggacaaactgacttccctaacgtattcggtgttggtaatgaatacaacctgcaatcgttcgaagtttactatcgcggtaacttgcttttcatcgatgagaaagacggattcaatgctgataactcagactatggatcgattggttctgctcctggtgaactggttgcacttgatggtaattcagtacgtcttaaaaacccgtgtaacgctggtgacacgcttcaatttgttacctatctagatgggttagcaacatggcgttcgagctatgaagcgtatgtgatgcgcatgtatcagactggtgatacttctctggaaaccgttcctggtgaacagtgggtaggtgatctggcaaccaaaaaagagtttacacctgctgaatttggtgttaaccctcgcgtgttgattaaccctaactcgtttgaactgcttctcaacggtaaacaactggttaaaggcggtgacgctgactatccggcgttttcctgtgaaggtgcggaaggtgttgatgaaagtacgtgtgttggtaactctggtgtatgggttccgtcaggacaggattatagtttagtattcactgattctgtagtgacttcaatcaagtttgctcaggaactggaatccggcgacgttgtaacgatccgttggtttaacaatgatattggtactctgatggattgggaaggaactggcggtattaaagaaaaagctgataaggtttatctcaataacgaagaagaagttatattgacgaaccgtatcgaatataccgattataataacccttctcagaaaacaatgcgtaatacaggggaaacctatcagggacgtattctggatattcaggctatgtttgatattatccacccgatcggaaccatctatgaaaacgcacacaacccggcaaaccctgctgattatatgggatttggtggttggaaacgttacgcagaaggttatttcctggctggctggacatcaaatgcagcggatcctgatttcgcattaaacaataatgatttagatagtggtggtcaaccgagtcatacggcaggtggtacaggcggtgatcgtggtacagaaatcaaaatcatcaacgttcctgaacttgtatcaaaagataaagttctgattgctgatgaaaatggtgctgtgatcattggtggttgtcagttagatcctgatgcttctggccctggatacactaaataccgtgaggatacattgaaagtgaatcatggtaacacattacctgataaaatcaaaactattccaccgtatatgactgcacatcgctggataagggttgcataatggcttacaacaatatttcaaaaacaagggagggcgctcgcgtcctctctaaagaagcagattacttacagtatgatacttatggtaagttgcctctgatcggcggtaaacgttcgatcggcgaaccaaacattgaccaaacaaaacgcggtgttctgtatggaaacgtacaatccgcaattgatgacctgtatacgcttatcgagcaaatcccgattaacggcgttgttaccatgactgaggatgcacctccaatcgccgtacagcaggttgagagcgtttcttttgatggtattgtacagaacatcgattcagaccaagaacaggctgtagttcacgtatacggcttccctttcatctttgataatgggactaacgccgcaaccgtttgtgaaactgcatacaacaaatttactgaattcgttgcagcggaaaaatatttcgcagaagttaaccgcaaaggtgttgatggtacgatccttgaatgtcgatttattgatagtgttccgcacccggcaacaaatatctcagaaaacggtattcgtcaaatcggaactatcgacgtagccgcaaaaaatggctatggttcatgggttaagttgggttctggtttcttacctgatgttactccgcaagtaaccgtgtattacttcaaacgaattgcataaggataacacatgagtaacaatacaatcaaccacgtaagtgataaatccatttacgtgacatttgacccaacaggtactgattggcctgataccataaccaacgtacaagatgcgttggaaaaaataggtagttgggcgcgtactgatactgggcttcctatcgcaacaacttctgttcgtggtattgctcagatcgcaaccgaagctgatattaacgctggcacggataacactaagattgttactccgaaactgttagcataccgtatgcagaaccctaaagcatcacaaaccgtatggggttatacgaagtattcgactgatgcggaatctacaaccgtaactaacgatgcatcgtctattactccgcgatcactgaactatgtgttcaataaccgcaaaggtacagaatcggtttggggttcttctaaaatagctacaactgcacaggcggttgctggtacagataacactgtaactatgactccgcttaaagtcaagcaagcgatcgcgtctctggttccggttcagtcaagtgcgaccgaaagctcgcaaggtctggtacaactggcaacagttgcacaggttcaggctggtacgatccgtgaagggtatgcaatttcaccttatacgtttattcgtttaactgcaactgaaagcaacctgggcgttattcgcatcgcatcacaggcagaagcaaacgcaggtactgatgacaccaaagcgattactgcgaaaaaattaatcaatacccgtgcaactggatcccagttcggtgttgtcaaattagcaacaactgttggttatgtggcaaacactgcactttcttctaatgctaatgtattgcctagcgatcgtagtgcggtaattaatggttctctttatgagaatagcgcaatacataacaacaaatatcagacgtggacagatcttgattggcatttcccagtaggtgctattgtcatgactggtttccagactgaccacggtagtttgtatatttgtgatggacgttcactgaataaaaataattacccgttactgtttgagcgtataggttatacatttggtggtggcggtgattggtttaacattccagactgtcgaggcgttgcagtacgtggtcatgaccgtgggcgtggactaaaccctaatcgtgggtatggtacatatgaaggagatatgttgggatggcacgaacacccattacaacttatctaccagaacggcggtaacattccgaaatggcaagcagtttacgaactgaaaagcgccgagaagaatgaccaaagcgctcgcgtatttgatgcttctataactaaagctactggtgtgggcggtgaagaaacccgcatgaaaaacatcgcattaaactacgtaattcgcgtattataacagaggttattaaatgatcatcgacaaattaaacccgttgccgaagatcccgtttgttgatggcgtcccagatgacgccacgactcaaacgaagattatttggatcaaaaacggtgaaactctggacggttcgccagataaagtgtcaaacactggcagtcttaaccgaactggtgtaaacatccagcagaacgcggttcagttagaacaaaatactatcacccataatgataaaatcaacgaagtaatcgatcaggttaacttgattactgaaaacattgatgctattggtgatgaaagcgtaatcaaaaaagttaaccagttggatcaggatgttcaggcattaactttatcgaacacccaaacacagaacaaggtagcacagttaaccctttctgtaaatgctcagaacgatgaaattggtgaatacgatccagaaaaggatcctaaacaccgcacaattcgtaatgatatcatttacatcaagaaagaagttggttcatatcctggatttaacgttgatggtgatgttgacccctcttctactggtactggccttaaataccgcgtactgagtaaccaacgtgccatttctatgcaggaaacccgcataaccaaactggaagatgactgggcgctttccgaagtaggacaactgacagaagaggtaaaagaacttcgtgctgaaatgggtgattctggtcttgccacaacccgttcaatctatgcgcgaattaagatccttgaggatggttctgttgtaatgcaaaatgaacttgatgcgattaatagttatatcggtcgcacgtcaggttcaaccagttccattaacgatcgtgtgaacagtatggaaaactccgttagttctctggctacacaaatcaacgatccggtaactggtatcactgcacaaattacaaccatcaatggtcaaattggtacggtttctgttcagggtagtatccgttatgatattgcggaaaacaaacgcagattgatggatatggaaatgattctgggtgaatccggtgatgaaggattgcagggacaagttgcgatcttaactggcgacattggcgaagattcagatcctaccagtatcaaaggccgtttgagtgttgttgagggtgaattacgcaccaacactagcgcactatgggaactgcaaggcgttgtaggtaactcttctagtggcctcgttgcaactagccagcaggttaacaaagaaatatatggtgatggtgttagtgccgaccccgttactcgtgctggtttgaaaacgacaacccgcaacctgttcactcaggtaggagataactccgaaggtaacgaaacgggcatttatgcactaattgccgaccttaataaacgtgttgaggatttagaagcgttgaacattgcacaggcacttgcagatcgcgtaactatcgaagatctgaatgctaaactggctatgtatatcaaagaagctgacgccgatctccgttatgagagcaaaaacccgcctctgtcattcggtactaacctaactggtgatactgaatacactactggcgatccattgtctctaagcgtaactatgaatggtggtgtttctccgctgtcttaccagtggacgaaaaacggcgtaaacgttggtactgatgctaacacatttaccatcgattcgctacagccttctgattccggaacttacaaagtaacggtaactgatgcaagccataaagtcatcgtttctgatgaactggcgatcactgtcgcttaacgattaacaaggggctacggccccttttgaggatctttatgattacgaacaacccagcacaattaaaagatgaaattctgcgccgtttaggtgctccgatcgtcaaaatcgaagtgacaaccgaacaggtttatgactgcattcaacgagcattagacctatatgcagaatatcattacaatggatctaacaaagggtatatcattctcaccctggggccggacaacccgaaaaatattttcgatctgagtaaagaacacattttcgcaattactaaagtgttgcgtactaacatgggttcccttgtatcgatggatggtactgcggtttatccgtggtttactgatttcctgatgggccttactggtggttctctgggcggtggtggttgtgcatcacgtacctacggaatgaacgcatatggcgcggatatgggctattttacccaaatgatgagctatcagcggtcaatgcaagatctcctgtctccgcttccggattactggtataacgacgacacaggacagtttgcagtatacggaaccgttaaagatggtgatattgttgttatcgaagcaatgatcagatcctttgttgatgtacccagtatggtcggtaacgtctctggatacgctacagcgggttctgatggtgaagataagccaactatagcagatatatacaataacccctacaaagccgtctcaggcggtgtgaaggctggtcaaggtacaagcgttcagggttcatcctccgcgtataacaaccgttgggtgaaagattatgcaactgctcttgttaaagaggtaaatggtcaggttctggctaagtttcagggtatgcaattgcctggtggtgttgctccggatggaacccgactgatacaggaagctatgcaagaaaaagaaaacctccgtcaagaacttctgttactgtctgatgcacttccagtgttgatgatgtaaggaggaaaaatgcaaaattgggatgaaagtctgtttgcacagttagaagatggttccggcgtcgatcggaacctaagacaagaagtaacaaacccgtatgttaactggtacaagtataaccctactcaacagttgcatgattcactaacagccgaagcaattcaaatgaaatctccggatatgtattacgtccgtcgagaatttgttaatattgataaaattttgggcgaagaccgtgaatcgaagtttacaaaatcgtggaaaattgcagcatacatcgattcgtatgcaaactacgaaggacagagagacttttacagcaaatttggtatgatgtcaaacgatgaaatgacacttgtgatcaatcctcgtttatttgcacatcaaaccgatggcgggatccctgttctgggagatttgatttatttccctatggataacagcctgtttgaaattacatggattgagtttgacccgttcttccagttcggcgatcgtcctcaacgtaaaatcaacctcgttaaatttatctatactggtgaagaattggatcctaaactgcaacgaaatgaagggattaaccttgctcccgatgctgatctggatctcgaacctattcgaaatcttgatggattggctgataccaatattgaacaatacgaagaagatcaagcctttgaagatgaaggcgatgaattcattgaatcgtttgatgttgtcaacgggcgcggatcaccgttcgcacagttcccataaatataaccaggggaaaccctatacatgtaagggtataggagaaatcttatacccgctttaacccatacaggaaaaataaaatgtttggattttggtataatagttcgttgcgaaattatattgtcttgatgggttgtcttttcaatcacgtgcaagttaaacgcattcgcggcgaacaagaaaaatttatcaaggttccgattacctacgcatcaaaagaaaaattcctggcatccatgaacaagctgaactatgcatacagtcaggaaaatgttgctaaaacggaaacaattttaccacgtatgaatctatccctcgtcgatttgcagtataacgcaattcgtaaaactgggatcgcggtaaaccaaaaaatgacgcagttacgcgcacctggaaaaacagtaacgcagtttaaccctgctccgtatcgtctcatgttcgaactgggagtgtatacccgttatgaagatgatgtgtttcagatcatagaacagatactgccatacttccagccgcatttcaactgtcgtattacagaattacataaaaacgacattaaaatagaccgagatattaaaatatctctgcaatctgtttcccctgataccacgtttgaaggtgatacaacgacacggcgacacattgaatggtctttaatgtttgaattacagggctacctgtatccgcctgttaacgagattaaaggcgagatcagaacagtatacacggatttcttttccaatatgaacccgttggacaaagacaattttgaatccgttgatgctcaggtggatccggttgatatgcctatacaggattacacgggagaagaatacgttcaaacgtatgctaatgatatcccaattcctagcggtgatcaacctcctaaaccgaggggccaataatggaagaatttagcgtaaaacaactacttgatcttgaaaatctccctggtgctgaaactggggaagaaatggtcgtgtatgaaaaactcgaactcgttgatgtcgagtcacacccagcagatcgaaaacctgatttagaggaagactatgcacttgcgcgtaaaaccgcgcattacatgaatcagatgatcatggatatggcacaaattgccttgcataacgctaaaaactctgaatctccgagacacgttgaagtttttacaaccctgatgaatcagttaaacaattctaaccagggattgatgaaaattcataaagaaatgcgagaaattaccgaagaaacaacaaaaccaggatctgaaaaaggtaatggcggcggtaatgaaatgaacatagagaatgcaactgtatttgttggttcccctacggaattaatgcagaaatatggtagtgcatacgaacccaaagaaggcttcattaatggtgaagcggtagaggtaaaccctgatggaaatggaaccgacgatcgatccgagtaaggaatcagatcacccaatcggattaatgcatcccgattatctgaaaaagaaaattgatgaatttgggatggagtggacgcaaagcgaacatgataaaaaatggtatccgacaaagtttagcgattacctaaaaattaacggtatccataaagttgatattcaagcaaaagacagttcaaactttgcgacgtataaaaacaaaggaaacaagaaaactcgatataacggaaacccaaacctgaaacgcgcgtacatccaaacgaaatggacgcaacagatgttgatggagtgggttaaatgtcgtgatgatattgtttattttgctgaaacatattgcgcgatcacccacattgactatggtacaattaaggttcagttgcgtgactatcagcgcgaaatgctgatcgaaatgcataaaaaccgtatggttgcctgtaacctgtctcgccagttgggtaaaacaaccgttgttgctatcttccttgcacactttgtgtgtttcaacgaggataaatatgttggcgttttggctcataaagcctctatgtctgcggaagttctggatcgtacaaaacaggcgattgaacttctccccgatttcttgcaacctggtatcgttgaatggaacaaaggttctattgaacttgataacaaatgtaaaattggtgcgtttgcatcttctcccgatgcggtacgtggtaactccttcgcaatgatctacattgacgaatgtgcgtttattccaaactttattgatgcgtggttagcgattcagccagtaatttcttctggtcgtaaatcgaaaatccttatcacaacgacacctaacgggcttaaccacttctatgatatctggaacgctgctatagaaggaaaatccggcttcgtgccatacacggcgatctggacatcggttaaagagcgtttgtatacagacggtgatgatggcgtatttgatgacggctattcatggtcttcgaagatgatcgccagttcaagtaaagaagcatttttacaggaacactgtgctgaattcatgggaaccaacggaaccctgatcgctggctggaaattgtctaaactatcatgggttgatactgatgaaacagaaactaatttctatcagtataaagctccggtagagggacataaatatattgcggtactcgacccagccgaagggcgcggtcaagactatcacgcgatgcatattatagatattacatctatgccgtttgaacaggttgctgtataccattcaaacaaaacatcgcaccttattttgcctgatgtcctgttacgttatcttatgatgtacaacgaagcatgggtttatatcgagctaaatagcacaggtcactcagtggctaaatctttgttttctgagttggattacgataacgttatttgtgatagctatagcgatttggggatgaaacagagtaaacgatcgaaagcgattggctgctcaaccctaaaagacttgatagagaaagataaactcatcataaataacaaaaagacaatacttgaatttcgtactttctcagaaaaaggtgtttcgtgggctgcggaagaaggtttccatgacgatctcgttatggcgctggtttgctttgcatggctaacaacacaaatgaaattcgcagaattttgcgagaaagacgatttgcggttggcaaatgaggtattcgcacgtgagcgcgaactgctttatgaagatatgttatgtcctgttatcgtaacgagtggcgacgaaacaatatctgtcggccaacacggtatttcgtttatataaatttagaggaaacttaataatggctttaatctctccaggcattgaaactaaagaaacatcggtacaatctaccgttgttcgaaattcaactggtcgtgctgctattgttggtaaattttcatgggggccagcttaccagatccgtcagatttctaacgaagtcgaactggtaaattattttggctccccagacaatgacaccgctgattatttcatgaacgctgtaaactttttacagttcggtcaggatctgcgtgttgttcgtgtcgtcgataaagaagccgcaaaaaacgcaaccgcgatctataatcagatcaaaaccacgatcaccgctgctggttctaactatgcagtagacgatcaaatcaaagttaaacacaataacgttgttattgaagaagatggcgttgttaccagtgttgatgatcagggtaaaatcctgtctgtgttcattccgagcactaagatcatcgcacacgctaaacaggttggtgtatatccggatctgtctagtggctggactacagaaatcgtttccagttcttctggtgtttctgctacgattacaatcgacggcgtagaagttgatccgggtattactctgctcaaccttgacaccgcaaaagaaactattcaggcaactgctttccaagaactttgcaccaaataccagctaccgtctgttattgcaatttatcctggcgaaatgggtagcaccgtaacggttgaaattctgtctaaagctgcatacgattcttcggctgtcattaagtcttatccttctggtaagtctggtaaaaacagcggtcgcagttcgatgaactttggccctcagaatgataaccaatacgcgtttatcgttcgccgtggtggtattatccaagaaacgtttatcgtgtcaaccgctaaaggtgataaagatatctacggttcaacgatctacatggatgatttctttgcaaacggtggttctcagtatctgtatggtacgtccttaaactggcctgtcggattctccggcgttctggaactgggcggcggtacttctgcaaacgccactgtaggcgctgatgaactcatggctggttgggatatgttcgcagatcgtgaatctctgcatgttcctctgctgattgcgggtgcttgtgctggcgaaactgccgaaatttcgtctactgtacagaaacatgctgtgtctatcggtgaaacccgttcagattgcgtcgtattcgtttctccgccgcgttctgctctggttaatatcccactggctcaggccgttgataacctcgtagaatggcgtacaggctacaaaatcggtaatactaccccagttgataacaacatgaacgtaagttcaagttatgcgttcatcgacggtaactataagttccagtatgataaatacaacgatgttaaccgttggatcccgctcgcgggtgatatggctggcctctgtgtttataccgatcaggtatcgcaaccgtggatgtctccggctggctacaaccgtggtcaactgcgtaactgcatcaaactggctatcgaaccgactaacgcgcatcgcgattctatgtaccaggtacagattaacgcggttactggtttctctggtggtgctggatacattctgtacggtgataaaaccgcaacgactgttccaagcccgtttgaccgtatcaacgttcgtcgcttgttcaacatgatcaagaaagacatcggcgataacgcgaaatataaactgttcgagaataacgatgatttcactcgttcttccttccgtatggatgcaggacagtatatgtctaacgttcgcgctctgggcggtgtatacgattaccgtgtggtttgtgacactacgaacaacacgccggatgttattgatcgcaatgagtttattgcatcaatctacgttaaaccagcacgttctatcaactacatcacactgaacttcgtagcaacctcaactggtgcggatttcgatgagttgattggatcaacgtcagtataacatgtaaggggctgaaaagcccctataaatacacatagaggttagaaaatgcttactgatattgtacgcgcctttgaatccggtgatttcgcacgtccgaacctgttcgaagtagagatcccgtacctgggcaaaaactttaaattaaaatgtaaagccgctactatgccagcgtctaccgttgaaaaagttccggtaggttacatgaaccgcaaaattaacgttgctggtgaccgtacctatgatgactggacaatcacggtatataacgacgatgcacacacaacccgtgatgcaatcgtagcatggtcaaacatgctgcatggtatgggtgaagacattacaggggatatccctgcaaactacaaaaaaaccgctacggttaaacagaaaaaccgtaacgacgaagtaaccgccgaacataccatttatggcctgttcccgaccaacgttggtgaggttactttagactgggatagcaacaacgaagtgagcacttttgagtgtactttcgcgctagactggtgggtttaaacgctataaatacaggggtagcaataccccttatcattatttttcggagttgtaaatgaacttttttggattagacaatgtgttagggtttttcaaaaatttcgccaaacaggatgaaatggaatttgaagcccaattaaaagatgatacaggttcgattgcgcctccgaaaaataacgatggggcgcacgaaatcgaaacggacttatcaaaccagcgttattcttctgtgtttcaacagttctattccggacaggatccgcgaattcagaacaaaacacagctaataaatacataccgtggcatcatgacatatccggaagtggaaaacgctgtttctgaaatcattaacgaagcgattgttaatgaacaaggaaaagatattgttacgatggatcttactaaaacgaattttagtaaaaatatccaagataagatcatggaagaactcgataccgtaatgaatattcacgatttcgataaccgaggctctcgtttattccgtgattggtatgttgattcgcgtatctatttccataaaatcatgcacaaaaatgaagctgacggcatcaaagaattgcgccagttagatccccgttgcatggaactgatccgagaatcggttacagaaaccctacccggtggggttaaaattttccgtggctatcgtgaatacttcgtatacactgcaccgaaaaacggttatagctacaacggacagatttatagtcacaatgacaaggtaaaaattcctcgctctgcgattgtttacgctcatagcggccttgaagattgcgacaacaacattataggctacctgcaccgcgcggtcaagccagctaaccagttgcgtttgctggaagatgctatggtgatttaccgtattacccgtgcgcccgaacgtcgtgtgttctatatcgacgtaggtcagatgggtggccctaaagctacacagtacgtaaataacattgcacagggcttaaaaaaccgtgttgtatatgacgcgagcactggtaaagttaagaatcagcaaaataacctgtcaatgacagaggactattggctgatgcgtcgtgatggtaaagcagttaccgaagtttcaacgcttcctggtggcactgccttctctgatatcgacgatgttaagtggtttaaccgtaagctgtatgaagcgttacgtattccgttaagccgtatgcctcgcgatgatggcggtatccagttgggtaacgatggcggtattacccgcgacgaattgaactttagcaaatttattcgcgaattgcaaattcaattcaaccctgttcttgcggatccgttaaaaactaacttgatcgcgaagaaaatcattacagaagatgaatgggatgaaaacgtaagtaagattgcttttgtatatcagcaagattcttactattccgaaatcaaagatattgagattttggaacgccgtttaaacctgatgggccaacttgaaggggtggtcggcaaatatatctcccataaatacgtaatgaaagaagttctccggatgtctgatgaggaaattcaaagcgaagccaaacagatagaagaagaatcaaaagaagaacgttttaaaaatccagaagcggaagaggaaaacttttgatgaaagaatttatcgaagcaatcaaaagcggtaatctggtggaagctaaaaaaactttttactccatcatggaagaccgcacagaagcgcttcgtcacgaattgcgcgttgaacttgccgaagctgtacgcatcgaaggcgaagaagacaaagaaaaagacgacgaaggcgctgataaagatgacgaaaagggcgataaaaagccagccgaggatgataaatccgataaagatgatgagtgaggtgtgtaatgcaacttgacatcgaaatcaccgccgaagatctccatgaacatttagacgaagcgaaagctcgtgtagatattctgggtatcgatgaaggcacggttaaaatcatcgaaaatttggcggtcaccgaaccaaatttagcccttgctatgatggcggttgttgaaggtttaacacttgatgaggtaattgtcaagcatgttgattcccgtggcaacgtagaacgcctcaaagacaggaaaacccgtgagcgtaatgcgtatcagacgaccggattaactaaatcccaacgtcgccagatcgcgcgtcgtgctctcaaaacaaaacgtgctaacccgtcaattgctactcgcgcacaacgtaagcgcaagaaagcattgcgtaaacgtgctgcactggggctataaatatgaatgaatcccaaatcaacgaaaacggcgatatgcttttaatcgaagaatggggtttaccttgcggtgacgtttcagaatctattttagaatctgttggggaatcaaaagacggtaaattacggatcgaaggtattttccttcaagccgaaaaggttaaccgtaaccgtcgtttgtatcctaaaaacgtacttgaagaagcagttaacgattatattagaactcaagttaacacccgtcaagcattaggtgaaatgaatcaccctccgcgcccgaatgtggatccgcgaaatgcttgcatcctgattgaaaaattgtggtggaagggtaacgatgtttggggccgcgctgttgttgttgaaggcgacggtggtgatggtgacaaactggcggcgttgattcgtgctggttgggttcctggtgtttcttcccgtggattaggtaagctctccgattccggcaaaggctacggcgttgtacaaaagggctttaaattagctgtaggcgttgatgtcgtctgggggccaagcgcacctgatgcatatgttaagcctatagtggaaaatcagcaaagcaaaccgcttgttgagaataatagtgctgatgacgcttttcgggaattgtccgagcgtttgaaaggtctataaatacattaaacaaaacaacaggaaaatcaaaaatgcttaaagaacaactgctggcggaagcccagaacctggatactccggtcgagttagacagcattttcgaatcagttgaactttctgatgacgtgaaagcgacattcaccactgtattcgaacaagctgtaaaagctggcgctgcaaaactcgctgaatcccacattacccagatcgcggaacgttccgacgaactggtcgaagctcaggtaactgaacgtgccgctgaaatcgaaactaagctgtacgaagatgctgataaatattttgcgcacatttccgaagaatggctgaaagaaaacaaagaagccgtttcccgtgacatcaaagccgatctgtttgaatccctgatcatgggcctcaaagaagttctggttgaacataacgttgtcattccggaagaacaggttgatgtagtcgccgaactggaagacgaactgactgagaatcagcaggaagttaaaaccctgtttgaagcgaatcaggaactgaccaaagaaatttcagaaatgaaacgcaatgcagtagtttcagagaaaactaaaggtttgaccgaatctcaggtcgaaaaagtagaatctctgattgaagggctggaatattccgcaaccttcgaaaataaactcagcgcaattgttgaaatggtagcaaccaaagctgaaaaacccgttgacgagtctgtaaatactccgcaaacgaaagataactttgttccggtagttgaaagtgttccggcagagaaatccaagatcaataaatatgtacaagcggcaaaagccctttcttaatttcaaaaggtaagaaacaatgtctaagaaaaacgaattgatggaaaaatggaacgatcttctggagtctcaggaaggcttaccggatatcgctaccaaatccaaaaaacaactgattgctgccattatggaagcacaggaaaaagacgcagaagttgatccggtttaccgcgacgagaaaatcgttgaatccttcggtggtttcctggcggaagctgaaattgctggtgaccacggttacgacgcaaccaaaatcgcttctggtaactcaagcggtgctatcaccaacatcggccctgctgtaatcggtatggttcgccgtgcgattcctaacctgattgcgttcgatatctgcggtgttcagcctatgactggccctactggtcaggtgttcgctctccgcgcagtgtacggcaaagatccgctggcttccggtgctaaagaagcattccatccgatgttctccccggatagcatgtactccggtcagggcgcggctccgagcaacggctttaccgaactggcttccggtactgctatcgctgacggcgctatcgtgttccacgatttctctgaaactggtcgtgtgttcctccagaacgtttctggctctccggttactgtaactggttctacctccgatgctctggatgctgctgttatcgccgaacaggaaaaaggtactctggctgaaatttcttacggtatggctaccagtgtagcagaactgcaagaacagttcaacggttctactggcaacccgtggaacgaaatgggcttccgtatcgataagcaggttatcgaagcacgtagccgccaactgaaagcacagtactctgtagaactggctcaggatctccgcgctgttcacggtatggacgctgacgccgaactgtctgctattctggcaaccgaaatcatgctggaaatcaaccgcgaaatcgttgacatgatcaactataccgcacaggttggtaaaactggtttcactcagaccgttggctctaaagctggtgcgtttgacttccaggatccgattgatgttcgtggcgctcgttgggctggtgaaagctacaaagctctgctgattcagatcgacaaagaagcaaacgaaatcgcacgtcaaactggtcgtggtgctggtaacttcatcatcgcttcccgtaacgtggtttccgctctggctcgtatcgatagcggtatcactccggcaggtcaaggtctccagaagactctgaacgttgacaccactaaagcagtattcgctggtgttctgggtggcgtgtataaagtatacatcgaccagtatgcacgtggtgattacttcaccgtgggttacaaaggcgataacgaaatggatgctggtatctactacgctccgtatgttgcgctgaccccgctgcgtggttctgatccgaagaacttccagccagtaatgggcttcaaaactcgttacggtgtaggtatcaacccgtttgcgaactctcgctctcaggctccgtccgaccgtatcacttctggtatgattaccaaagaaatgttcggtaaaaacgcatacttccgcaaggtttatgtgaaaggcttataagttattgaaaaataacgatattaaagggaaccttcgggttccctttttcatttctataaatagtgaaaacaattgaggctatattatgaaacatattatctacaaaataacaaatttggttaataataaaatttatgttggtgctcattcaacagaagacatcaatgattcatacatgggttcaggggtggctataaaggcggctcagaggaagtatggtatcgataaatttataaaagaaatattacatattttcgatacccgtgaagaaatgtatgaaaaagaaagagagattgttaatctagaatttgttaataatccacatacatataatatgggtatcggtggtgatggtggccctatgttgggtatgtttcattcagaagagaagaaacaagaaatttccaagattactaaagagagaatgacagatgaagtaaaatctcgtctctctaaacttaaaaagggtaaaccacagtccgaagaatccaacaggaagcgctcagagacgttaaaagctaaatacgtgaacggacgtacagacagagagtataaacctctcacagaggcgcacaaggccaaattaggccgttctgtatcgatagatggagttgtatactcatccggatcggaggcggcaaaatcccttagtatgtcccactctggtttaaaatatcggattaatagcgacaaataccctacctggaaatttgttgcataaataccattatacactttacgcaggaacataaaatgagtgaaaaattttacacaattaacaagctggtgcgtcagtcacagctaccgcctggcctgtctaaaaaggttcttgatgaggcaaccggaacagaaacaattaacgtagctaatacccgtccggatctggtatctcttacccgtgcggtaaacaacctgatctacggtgaacttgtagcgattcaggaaactaatttgcctaccgcaaccctgtttggtgtgcgttatcgtaaccctaaaggcgatatgacgttttccagcgctgctacctattccggtaagtatgcaagccgtgataacattccagttggtgcggttggtactgcctataccaaaggccaagtttttaaacatccgacaagcgatgtcgtatacgaagcaactgatagcgtaactctcgcaggtgctgatattgatgaagcaattatggtcgcagtattcagcaataaattacgcctggcaagcgaagccgcgccaacaagtcagtatgaaaccagcgaagatattagcacaacttctttcgaaatggatcgttggaatatcaacgttcgttcccgtaaattcaaaactgaaatgaccgtggaacttatgcaggatctggaagcaaaccaattcaacgcagaaaatgtgattgaagatgttctgggtactgttgccagcgaagaagtaaacaaagatatcatccagactctgatcaacgtatcacatcgttacaacgttgatggtgtggtaacaaatggcattttcgatgctacaaccgcatacactgcaaaggatgctccggctttaggtcgtttcctgtatcaattagtgtgtgaaatggggcaggaaatgaatagaacgacttcatttgaagctacctatgtcctggcctcttctcgcgttgtaagcgttctgtctgcgtctggttggatgcatgaaactgatgaaacccacccgttagcaacaggtcggcttaaaaacggttactatgtctatactgacaccaatacaccgtttgattacctgctgactggttgcaagtacgatctgggtgaaatggatcatgttggctctctgttctatacgccatacacagaagctgatcaggcaggttcgatcaagatttctgttgatcctcaatccttacagcctaaagttgctattctgatgcgctacggtttatcggttaacccgtataccactgctgctaatgaaagacttgtgaaaggtgatgactgggtaaacctctcaggcaaatctaaaatgagtcagattgttggtatcaaacttcctaaactgggttgatagtataacccaacggggataatattcaataggtggagtagggaaacttactccatcttttaataattattataattaatattaaattagatcttgaatttataaatgatttatgataaaatttattaattataattattatagatcaaataatttttgaaatcaagtaaaaataaatttgattttataaattagatcatgtataattattcttttaataatatattatattagatcaatttaaatttgactactaattaatatagtatattatagatcaactgggtaaattggtgagtatgttatgagtttgaaattagaagatctgcaaaatgaacttgagaaggatatgctgatagatcccctcaagttgcaatcagaatcagcggatatcccgaagatttgggctaaatggcttcgataccattcaaacgctaagaaaaaattgatccaacttcatgctaaaaaagaagctgatgtgaaggatcgtatgttgtactacaccggaagacatgacaaagaaatgtgcgaagtggtgtatactgggactactgaaatcaaaatcgcgatcgctggggatccgaagattgtagaaaccaacaagctgatccagtattatgacatggtggtagatttcaccagcaaagcactggatatcgtcaaaaacaaaggatactctatcaaaaacatgttagagatccgtaaattagaaagtggtgcataatgtctactgaaaatgaaaaatgtgtagtgtgcaagtgtccggttccttctactggttttgtgactgaatccgggcgcgtgtgtagtaatatctgtgctgactacatcgcagaaaaaacaaaaaacggcgagatcaacgaatccgatgatctgaatgaagttcaaatgttgctgtaggagaatcttatgattggttacggtgaaggaattacagatcgtgatgaacgtccagatctcttagaatctgacgaacaccctgatttttagtgcataaatactagcgtacccgaaaggggcttgataaaagaatgctggatgataggcgtactcttttgcgccgtccgatggagtttaccttcggcggggtgattgataacataccttcgatcaagggcatgagtaaaaaaagccagaatagtacctcactggctataatcaaatgtacgtgttgggctgattgcgtcccaaaattaaaaagccccttcctttcggttggggcttcttttttagaacttttcttcttctccgctttctagttcggcctttaattcttcggctcgacctttcagcgcatcgcgcatagaaatatcgtctgacggcgcaacatcaacttcttttacacgatttttgtaatatttttcaagctctttaaggccgtccatagtacggcaagaggcgaccttgctcatgaaatcatcaatagccgcctcataaagtcgaaaatcgttgaaactcttcattttgacctctaaatttcgatttgtttgatcacgtagtcaaacttttcttcattgtaaatgcgtactcgttcgattgcgtgtttcataccatagtttttgtatgaatatttatttttagcatttttggactttgccagcgttgctaagttatcaaccaaatcccaaacagtagcaagagatttagaatcatgtttacgcagtacgcgcccaattgactgtttgactataacagcagatttgcacggatgcccgaagatgatgtgatgaaggttcttaacagaaatacctgtactcagtacgccaatagaaccgattacgatcagccccttcgttgactccgcgatccgtttcatttcgtttcgctcatcaatccccgtttccccagaaatgtatacaacgttgtcatatacctttttgagttgctcatacagccatttaccatgtttgatctgattgaacatcacaaacacgttttcatctttttcccttgccagtttcaacgccagcttacagatccatgcgttacgcctggtatgcgatgttatatacttgatttcgctttggtaatcggcccccttcattttcttaatctcatcctctttgtatctcatgaagatggtattaattcgaagattggtaacttgaccttcctgcatcaaccgatttgtatcaactggcttgaagatttgaccaaaagcgccaatgtattgcatcatgtttgctttgccttctttcagagaaccagaaaggccaaacttgaaaatacactgatccattgtgttgatgatcttctgtatgctttgtcctgttgatttgtggcattcatccaccatcaaacacatgaactgttgaaaccactcaggaggcattttaacagccgattgccacgtagacacgtagatcaatgcattactgtttttagcagttcctgaacgtattccaagcattgcctcgcgaggtaaaaggcgatagttgacaatatcaccgatcatctgatcaacaagggcggttgttgggacaatgattagtactttgcctgtgtaattttccagacaccaacgagatatcaacccctggataagagatttacccgctgacgttgggaggttaagcacagcacggcggtttttaatcgcatggaacaccgattgtttttgataccaatacggatcaatctgcttgtttccgtcgtatactgggtgttcttctaaccacttgtcaaaatctggctgggtaatttcttctgtttcgtggatcttaggatccatccagatagaatacccgcgagactccgcgaattttgttacaagataggctaaaccgtagggcagtttcccgttatagtccatcaagtatatgtagccgttccatccaccatatttgtattttgcctggtactgataacctggcggctggaagctgaaatagtcgcgcaattcatagactatgttagcctctgcctgaatctgcacatgactagtgttaaggaatttgacttcgatatccactatgtgtatcctatatacggtttatatgaatatttataggctaaataatgataaacattggagaactacaatgagtattgattacgaaaaggttgaaggtttcaaagccttagaacaaaaagaagccaaattacagcttgctacctacgcgcaagaaacgtttgatgtcaaactgaaccgtcagaagtcattcgaaaatatgcttgctgatctggaagctgccgtaccagcagaaaaaccagaactgttgatcgactcccctgatccggaaattgttacatacgaaggtgaaccatccgttcctgatgttgttattgatgtgactaacgatttcatggattacgttaaagaggttgctccggaaatcgcagaccagattgaaattgttcccgacgctctacaagctcctacaagcgattctgagacggtttctgatgaactggcatggatggaagggtttaccccgtctatcatcatgatgggccgctctgtttcgaatactggcttttatacgtgtccgtattggatctatgattggatgaaacaaaatccggattggtataagcaccctgatggttgtcctcattattcagcgcgtcaaaccctcaagtcactggcatggtacatgcaccgtgatgggatggttactgtacgcgaaaccagaaatagccagttcgacacgttcaaaaaataattttaaaaagtagttgaccttaccctgctgttcgagtatatttgtattcgaaggcgggggaatggctctcgcagtgaagaaggaaatacaaaatgaacatgatgaaaaatgcttactacccagttctgtttgtttgggctaatggtgaagttaagaaaatcgtcaattctaaagctccttattacactgtaggtgaagcacttcgccacgctgcggaagcaaattatcctgttcatgccgaaccaggttatgctcgttggaacggttctaaatgggttgctgatacctgggacaactacgaagaagaaagaatggagtgtgatcctgattacgtatctcgtcaaatggaagctcatatgattgcagatcgtagactggataatgaagctcgcggattttattgattaacaaggggctacggccccttttcttttaggtgaaatatgaacttaaatcacgaatgtttaaaagatttgagcgatggtaacgagattggtaacgttatttttcttgatatcgatggcgttctaaataatatgcggtgcatgaaatttggtgaacatatggacatcgaatgcgcacgacacttacgccggatagtgaatcacgctaattgtgatatcgtcatttcctctacgtggagaatcggcaacagtacccataatctacgtgaaatattttatccgtggggattgtatcggatcattggtaaaacttgcactaacttccctcatagcactggaatgcgtggtgatgaaatcaaggcatggatcgatactttcggatgtaaaaactatctcattcttgatgatgacaccgatatgctttcttcacaaaaagatcattttattaacactgatgggtttgttgggttgaccgaagaacaatccacttatgcgatccgtaacattttcggggttactactccgttttgtcctgaatgcaatgggtatggacgtgttaacggctacgacaaatgcggaacgtgtaacggtaaaatactccggctataaataccaataaacataagaggttaaatttatggcaattccttctgtaacaattagcgccaacaaaaacgaacttttgattggtgaaactttgaccttagaggttaaaaatactgaactagatccgggtgatgtgtttctggcctaccgttggcaaaaagatggtgtagatattccaggcgcaaccgccgatacttacacaactacggttgacggtacaactgctggcgattataccctgatcttaaaacacggtgctgatgaagaatcagcaacagaaaccacgtctgatacaatcaccgtgaccacttatccggtaattgcatttggtactgatttacctgcaacaaaatccgttgttactggtaaagaacttaccctgactgttgtagtaactggcggtaaatccccgtatacctacgtatggaaacgcggttctactgttgttagtggtgattctgcaaccttaacaattagcgcggctgcaagtggtgatgctggttcatatacggtagaagtgacggattcactgggtaacagaaaaacttctggtgcttgtgctgttagtgttacacctgctcttgcatttgataaaaatctaagcccgaccgcttccgtaacacaggattctgcattgatccttagtgtaactgtattgggtggtacttctccttattcttatgcatggactaaggatgattctccggttggagacgatgcggatactcttacagtggcaagtgcggctctggatgatgcaggttcgtataaagttgtagtcactgatgcgaattcagataccatcacatcaactgtatgtgtcgtaactgttaatcaaaattatgatgatctcgtttctaaatggacggttcacccgattccgtggcgtgataccagctttaccccgatcggttattgggtacttgatgaaattctgtatcaaaaagcacagggtaaagattggaaaactgattatgctgattacaagtatagtgaggaagtacaaacgatcctgaaagcgttcatggaaaacggtgaatgtgagatccaggattcacgaaacggctatattcataaaatgagtgaaatctaagaggctttaaatggcaactgaaaaatggactacggttcatcctattccgtggagaaataccagttttacatatcttccatactggctatacgatattatcgttgatgcttttgagaaaggcgacgactggcgcgattatgcggaagaaaaatataaattagagtttgatactctgaaagaggcgtttgaagattatggtgatattcatgtaatcgaatctcgtaatggtaaactggttagtctgttgtcattgactcctgctcctgaaccagttactgaccaataaaataaggcaaacaatgaatacacttctttttgatttcgacgacactttagcagaattttctcagactttttatgataagttcggtgtacgtccggaaggaacgccaaaagaacgatatgacgaaatggcggcttctttggtgcgtactgatttttataaaaaccttccccgtattcaggctgggattgacctccttcaatggagtttccaacgccgaatcggtgatcctgctactttgctgcttcgcgcggaagcggtcagccctctttgggttatgaaagaaaaactgaactatactgataagatttgcgctgaactggggatctctcgtctcgattttagtcgcattgactatccggaacagttcgcagaacatgcctatcgtggtgttctgatttcccgcaaccagaaacatcttgaaatctggaacaattctcatctagctaataaagttccaggtattttccttgcggaaaccctggaagaaaatattcagctagtcacggaagcgcttgcaaaggctaatcaataacaaaaaagggaacctcaatggttccctttttttacaatctttttaattcatcaagcgctgttttcttatcaccaacaaagaggattgctttacctcctgcttttctgaaaggcaacaccgcttttgcccgatcgtcaaacagaattcctttaccagcgaatgctgctttttcatggctacttttaacgtagtggaattctggaacgtaacccaatactttttgtaatgctttacgtttttgttcggcaacaccgtcagaattgaatttaccgacactggttagtattgctacatcgccaagtgttcttaaatgatggaataattcaaatccttctttgattggttccagattttcgtagaaatcagttttggcaatttttgctttgcactttttcaactcatcttctgtcatcatcgagggttcgccatacattggcacaaatgaaccttcccagtcgaacaatacaccatccatatcaaagaaaaacttattcatatcaattcctcagtttgtgtatgcatactataatgtttaatcattaatgtcaaccccaagtgtcagttttcggtgcgtatgctgcaactttagccacaatttccttatccagttcagctacagatttctgaggcttaccacgggctttaactttgatgtagtttgacttaacaacaaacatccctttgttacctgatttcttgatctcgctatcaacaccaactttgttaaagctgatccaaatgtcgccgtccatatactgtttaagagaatcacccatgttcaggatcttcgccatagtaagggccgcgccttcgtgggtatccatgagaatttctttaggaactacacgatcgcgtttctggttctgctgcatagcaatatgcacatcgttcataacccatacgatatgtacgttttcttttttgtatcccagcgtttcgacatcacgcgcgatgcttgctagcttgctcatgccttttaacgttacgtcaaagatgaggttaggtttacgatcttctggtgctgccataataccggaataaacacggttttggtttttgttggaaatgttgaaaacgtcggcgatcacatgatggagggtagatacgttttctgggtttttgaggttcattgttttgacatcatgacccgtttgtttcttgatctctgctgcgagtttatcgctacccattacaagttttttcagggcgtcaacgtccagtgtaataccttcgatgcctagcagtttttccagtgtgaatcctttaccggaaccagcaccgccagccagaataacaacctgaccaaacttaggataagcacggcccccgaaggtgatcagcgcttcggttaaggtgctttctgtgaattgtttaaatgacttcatgtaaaattctccagtttattttctattatttattgacatgctttctgacagtggtgtatggttatggtgttcgacggataggccggaagaactttaaaccataaggtatatgatatgaaaattgatttacatcgcttcattgcagaattttcccgcgaccgcgacatggactctttcaactactactcccgtgaaattgaagatcgttttgcggctcatgttgggttccgtcgccaccatactcctaaaatgcgccctgaccacgatccgaagtatagccctatcacatggcaagccccgatcaatggttacgttgaagggatccggatcatgacttttaacgcgatgtatggaaacgctttgatccatattgcacgtgagaaaaaggcagaattccctaacggctggcgtattgatgaagtgattcaaacccttatgcagttacgacgtgaatataaagctggtatgtgtctgcgtaatgaacagtatccgatgtataaaacgtatgcctatatctctaagcatctaattaattccatgttttacatcgttggtaatcatggttccgctatagatatcggttcttatgaaatcgtggcttatgctcgcgaacaaggaaaggccgctgcactgaaaatcattgaatctggtgctatcattcttaaccatcgcattgatactattgcttactatggcgatcaggttgaggttgaaggcgtacaccatgaacgattcaacaaagccgtatttgctaaaaatggttatgcttatggtaatgacattataacttctgctattcctttcgttcgtctaactgttgaaggatttggagaaaggttgccttataaactgtcagaagctcaaatgtgtgcggctgctgaaagaatcgccaaaaagcggaaaatgtataccgatgaatacctggcgtatgtcaacaagacaaaagaagatgtagatcgagaaatttcttgcatggatttgtgcctttgatataatgtaagcatcttttaaagggaggatgcatgaaaacgatacattgcagaaatgaaaacgttgtttactatcacggttcgtgtactgctgctggtattgaaagcatgttattgcctccctgtgattctgatactctgtctgaaaaaggcaggaagaaaaatttagaccgtgttttctttaccgctgatatcgggttagctcgtatatacgctggaagggccgcgcgttctataggtggggatcctgttctgtacagggttgtgtgtccggttgatgttgtatgcatgaacgaagacaaaggcgcgagcgtttaccatgcagcatgggcgttttgtgaggaattatgaatgataaagtgttggcgtatctcgttttcttgctgggatatcgcttagaagtgatgggcgcgtattcatcaatttatggtgatttaacggctatctggatggtcgggttaggggttgcttttacattcctttcctttgcaattgttaatgaatcggaaaaggatattgtatgaaactatatcatgtgatctactctggtgttttaggcattgacaaacaaatgttagttgatgtaatgtgtaaaaaactcgatgagcgaattggaacccgatacaaaaatcatgtatcggaaagtatcttcatcaacgttgaccatccaaatgacatggaagaaatggttaatactcttgatgatcagcagatcccgtttgttgacaatttcaacatgagcgctggagtgtatacggtagtaacttttgttctaaaaaatgttgacagccgaaacgatagcgtgttgaatgtagttgcaaaaatcgattctaccaaaggaaaataatatgaaaattgtacaccgtagcatttccgaactgtctcaagctgaaaaagtgcaaattcatttcaaattcaatgatttgcgtaaaggttatgccgaaattgcccgtgaacatgggttagataacggcgatatttaccaggtagtacaggaaattgaacgtatccgcgcgttccgttctgcaaatctccctgttaaaaatgcaatgcgccgcgaagcgatcgaaatccatcgtaagcgtgtgtacaatttagaacgtgctaaacgtccgatgaagaaagaaaagaaacctcgcccgtttaaacgcgaacatcttaacacctctatggcgctggcgtttcaagatgcggggattatctaatgcgtaaatctgcgatggatcgttgggctagtattgctacttcaaacgtaaaaccaaatcaagccgcacctgatgtagaagcggttcgtaaagcgaaagaacctgagatcgtggcccttagccctgaactcatcgagcatcgccgccgtgcgtctgctattgaactggatttgcgtattgcgcgttcatataatctcaagcatgaacacgccgcaaagaacaaccattcttttgaccttactctggaagattggaaagtgttgatgacaactgaacgttgtcagtattccggcaagatgtttagcaataaaccaggtagcccatatgcccgtacaatggaacgtattaatccacgtctgggatatacacaagaaaatacaatagcggttatcaacgccgctaatgccgaaaaatcacagcttgatgcattcgttaagggtgatgtcattctggatgaagtaaaagtgaagttgctgcgtaaagcactttatcaagtcgaaaaacgtgtgaaaatgaaaggttaaattatgtttaagaaatattcttctctgactaaccattatgaaggtaagttcatcaatggtgtaattatgaacgggcttactggcggtgtgtgggttgcacgtgaaaagatccacggtgctaactttagttttatcaccgatgacggtattaccgttacccccgcaaagcgtactgatgttgttaagccagccgaagattttatggctgttcagcagtagttgcaaagtattccccagggatccgtaagatgtgggaaaccctcaaaaagaccggaacttatgatgatttggttattcaagtctacggtgaatttgcggggcgcggtgtacagaaagatgttgattacggcgaaaaagatttctatgtattcgatatccgtgtaaatggtgaattccttccggataacctgtgctcgctgatctctcgatctcatggcctgaaaatggcccctctgttgggatatggtacttttgaagagatcaaagaactgccgatcacgtttgaatctgttgtgaataaagcaaatagcggcattggtagcgataatacagtatatggtgaattcgtatatcctatcatggacgttgaagagggcaacattgcagaaggctttgtaatgaaacctgtttcacctgcttttatgccaaacggtgaacgcgttgcaatcaaatgcaaaacaaccaaattcactgagaagaaagcgaagaaagcaacccgctttaatgctccggtttcactgtcagaaaaagacaaaaaccaactcgatgagtttgtttgttaccttacagagaaccgtgtgaaaaacgttctttcgaaactggatctggcttcgatcactgcgaaagatttcggtcgcattatgggcttaacggttcaggatgctatcgaagaaatcagccgtaatcatgggcctttcctcgaacagttcgaagacccagcaatggctaaaaagctgtttgtaaccgaagcccaaaacatgattcgccctgtatggggcaaaatcctgaaccatgaattttaaactatgaacagtcacggaaactatagaagtatttctgatgaaatagccgcaataagagaactccttcaatacgtttcagttgatattacttctggaaatatcgtatggtcttctccgcgtcaaggtaggagggttggtgattccgctggtactatgaaagatggatattgtgttataaagtttcaaaagaaacaatatcgcagacatcggatcatcttttatgttgctaatgggtatcttcccgctcttgttgaccataagaatggtgttgaatttggtgatggtatagataatttgcaagaggcaacgcaacaagagaacataagaaagcagataaagaaacgaagcaatgcttctggaaaaagaggggttatttttgataaaagaagaaataactatcaagcgcgaatagttgttgatggtaagcagatttttctaggttcatatgataaccctgaaaaggcttatgaagtttacaacgaaaaagcaaaagaattgttcggtaatttttatgtcgaatgattttagtacagtaattaaaactgccaagacagtaacattaattggcagtcgtaaacctcctgaacgtatcgcaaacattgctgttaaaatcggacgtgctttgaacgaacgcgggatcagggcttattctggcggcgctcctggtatggatagtcactttctgtttgactatagtccggataacagatgtataatccttcctgagaacgggtttaacggccttttctcaaacggaaaggatatcatcgactttcgagatttaaacacacagaaagccgctgacgaagccagaaaggtagcaggtaacttcgatacacagaatgaatacgttcaaagaaggtatgcgcgaaacacgattcaagttcttcgtgaaaatcttgacaatccaactgattttgttttattttgggcggaagaacgtgaaggatgtgttaaaggtggaaccgcgatcgctgtaagattggctaggttgtacaaggttccatgtttcaatctcttcaaagaaagtgtattgaacgatgtgtgtgatacgttagggatcaatatcaaacccccaacgttggattttttatggtaattgaacatgcgcccttacttcgtgaaacatacgaaagatgggctgttaataacgcaataggtgaaaatatgattcatgtacgtagtatcggtgctgacggcgaaactccggttccagtagaaggccgatcccccactctcgcagaacgagcaagagaaattatcaacgatcagaatgctaagatgatcgaacatgcgcgggttacaatcacaaaaggtgttctgaaacacgcgactcaacaaaaccttatctatgatatgaagcacgatatcggctcttgtctgggtattgaatgtactcgctatgcattccaacgcgtttctgaatggttggaagaagaagggctaaaattcgatacagaagaaaaacgcaacgccgctaagatcacaaattctctggctagtaagtacaatcaaacgtatcgaaaccaggaagaacgcgaagtgttcggtttcaaaattcctgaaaggaaaacagatcgccgtgtaagtgaattcactttttacattagttggtaaaaaggtgttgacgggggttggttatagtagtattctaactcccgtagacaagacactaactcagaaggataaacatcatggaaatcgtaatgaaagcaacttatgctggatattgcctggaagcaaaaggtgttgctaacaatggcaaaggcttacgggccaatgttgaagcaatgctggatgaattacatgcagtgtacgaatacgacaacgtagcgggtagcgttcttatccaggcgttggaagttgatggtgttgattgtgctggttggtgggatgcttacattgactacaacgataaccgggtttacctgttgagcaacaaagattatttctaaggaaccactatgagcgatgaagctgaggctttagaagattgggctgattttgatgacgaagaagacggtgaatatttctgcgttaatcgtggtgcttataaagaccgtttagaacttcgtaaacttttatcgggttcctctcaaatatcaggatccaaacgaaaaagtagtaaacaaaaagttcagtatagtgatggttctgtacgtgatgaaactgttgttgctgaattccgtggtcgggttatcacaaaagaaagacaaattgatgtaaagaacttgtatgaagtggctaaggctgctaaaataggttctgtgattgtttgccctgtgtgcaaagaaaaacacacaaagacaacgtatcacaaagttttctgttcgaatggcagaaaaaccagtaaggattgtaagtctaaatatcacaatacaatccatcccgaacgactggatcgggtattttaaaataaacctaaaacgtggagtacgtttatgaacaacaaaactttcgaagaactgaacagcatcatcacttccgtagattcctataaggtttctcactggtcgcaatatccaactggctccgaagaggcgctgttttatattgaatctcgtggtggtaaatttgatcaagtagttacggctggctgtaaccgccttgcgcaaatcctatcacgtccggtgactatggaaaacgtagattttgctaatcggttgtacaaaatgcactttgggcgcgaaatcttcaactacaaaggttggaaagaaattgcagaactgggttacatccctcttgaattcagagcgattccggaaggaaccccagtagcggttaaaaatccggttgcaactttccatgctgggaaaaatgcgctgtggttagcaggacacgtagaaaccctggcgatcaggggagtatggttcccttcaaccgtagcaactctatcccgcgaatgtaaaaaagtgttgaagaaatatctcaagaaaacctccgatctcgaaggtgaagcatttgatatggtattacgtacccgtttgcatgacttcggcgcacgtggaacctcttctgctgaatctgctggtattggtggcctcgcgcacctgtataacttcctcggtactgataccgtagaagcgctgattatggctatctctctgtttgaagattgtcagaaagcgtttgatgatggtgaaatggcggctggtatttcaattcctgctcgcgaacattccactaccgtttcttacggcaaagaaaacgaagaccttgcgtacaaaaacagtattgagatcttcggagaagggatgtatgcatgtgtgtatgattcctgggattttaaagcggcggttcgccgtatcgcagaatataaagattcgattctttctaagggcggtactctggtagttcgtccggattctggtgatatggtagacaatatcatgtacgctcttgaagaactgggccgtatctttggctatacagtgaactcaaaagggtataaagtactacatccagcagtaaggatcattcaaggtgatgaaattcatggccctgaaacaatcaatcgggtgttgaactggatggagtctaaccgttgggcgtctgaaaacatcgcgtttggtatgggcggcggattgcttcaagaagttacccgcgacactcaaaaatatgcgatgaaaatgtgcgcaatcaaaattaacggtgtgtggactggtgtgtataaatgtccaaaaggcgctgaatggaaaaagagtaaaaaagggttgttgatgactatcactgatggtgttaactttaaaaccattgatactctggaacagaaagtgccggaaggctggaaagatgctatgatcacatactatgtcaacggaaagattactgcccgtgacactttagaggaaattaggaaccgtgccgggatttagtatccgcaaaaacgacaaaggaaccgtgattttctatgacaacatgccccttgtagctcgcaaggggctttttgctaaaatcgctgggtattcctttaaactggaagaagtcaacgacgaaacactaaaagagatcgtaagaattgccttacagttaagaggtaagaaagacgaacaaagagctattgacatgatcaataaattgggcgaaactcaatgcttcatagtgaatcgtggttacaagtacgataccattgcaaaatttgaaaaagggctttgtgaattatgagttattatggtgtgatcccatacacaggaaacaagcaaaagctacttcctgaattgttcaaattatttccggacagaaacagctatatgcgattcattgactgtttttgtggtggtttgagtgtgtccctaaacgtccctaaacccgttctaagcaacgattacgatcggacgttgattgatatgtataagcgccttcaaatgcttcctgacctctctccggtgcgagaattgattaaacaacatgggctgggtaagaacgagaaagaagcgtatctcgcatttcgtgatgcatataataagaacaaggatccgctatggctctatgttctgatcctgcattcgtttagtaatgttaatcgaaccaacgataaaggcaattttaacgccaattttggttgtagaacgttgaatgattctaccgttaaacggtttgaacacttcaaaaacaatgttcggggaattgaattctctagcgcatcgtttaaggatcttgatatctgtttgaatgattttgtgtactgcgatccgccgtacctgatcactgatgcagtttataacaagttctggaacgaagaacgcgagcatgaattatatgattttctcgataatttaaactctgatggtatcaagtttggtttatcaaacgtgacacatcatgcaggaaagcaaaatgatatcctgatcgagtggatgcaaaaatataatgtgcataacctcgataaaaagtatctgttaggccagcatactgattcttacgaacaaaataaaacgcaagaagtctacgtgtgcaactaccagaaacgcgacgtaaatacataccctgaaacactggatgacttaatgtaaggtaacatatgtttaagatttttggttatatcccttctgtttacaattgcgctccatgcctgaattctaaacgtctcctggacgcaaaacgaaaagaatatgagtttgtttctgtagccgatgaaaaagacgcagacggcaaaccgatcctgaatgaaacggtcatttctgaactcgaaagcctgttaggtactcgtagactgaccatgcctcaaattttccacgatggtaagcacatcggcggctttgaccaactgcgtgagtacgttcgcacgttgggataaatattaacacctttatttgattggtgttattatgctcactaaacgtattactaagaaatattatccatccattaaacaagctctttttgaacagcaaaacggcttgtgcgcgttatgtggtcgccctttagagggtgaccttgaaaaacatcaccttgaccatgaccatgctctatctggctctaatgccggacgtgtgcgcggcctcctatgtaacctatgcaacggtacagaaggtattgtaaagcacaaatttaatcgttctggtctggtttcccgtgatgttgattacatcgaatggctagaaagcctggtagcatacctcaaacgcgactattcacaaaaccgtatgcacgacaaatttatacccgataaggttaaatggtttacacgcctgactaaatcggatatgatagccgaaatgatttctatgggctttgagtactcagaaactgaggatcgcaaggctttagcaaagagctatagaagacaattaatgaaggcaaccaaatgaaagtagaaaaacgcgacggaacaatcgtcgatttcgatcaagaaaaaattcgtaacgcagtttataaagctggcggtacaatgacggatgaagacagtgcgattatgcttgtgttgcgtagtcagatccgcgacggtaaagcaatgaagatttcgcaaattcaagaacttgttgaagaatctttgatgaagacaaatccgactgttgcccgtgcatatatcgaatatcgtcatgatcgtgatatcgcccgtgaacaaaacggaaaattattccgtgatatcaagggtttgatgactcttagtaacaaagaattaaccaacgaaaacgcaaacaaagattctcgcgtattcccgactaaacgcgatcttctggctggtatcgtttctaaacatatggcgcgtaaccatattctaccgaaacatattgttgcggcgcatgattccggtgatattcattatcacgatctggattacagccctttcaccccatacactaactgctgtcttgttgacctgaaaggcatgttagaaaacgggttccgtatgggtaacgctgatatcgaaccgcctaaatcaatcggtgttgctactgctcttatggctcagatcaccgcacagattgcttctcaccagtacggcgggacaacctttgcaaatgtcgatcaggtgctggccccttacgttgaaatgacgtacaacaaacactttaaagatgctgtttggtacggggttcctaaatcaaaacagtatgcgatggaaaaaacagaaaaggatgtattcgatgcgttccagtcatacgaatatgaagtaaacaccttacatactgcaaatggacagacgccttttgtcacgatcactttcggtatgggtactggttggcgcgaacgcatgatccagaaagcaattctgaaaaaccgtattcgtggactgggtaaaaaaggcattactcctgtattcccaaaactggttatgtttatggaaaaagggattaaccttaatccggaagacagaaactatgatattaagaaattggccctggaatgttcttcaaagcgtatgtatccggatattattagcgcggctaataaccgtcgtattactggctctagcattcctgtatctcctatgggttgtcgtagtttccttagcgtgtggaatgatgagcacggtaatgaaattcttgatggacgtaataacctgggcgttgtgacaatcaaccttcctcgtattgcgattgaagccgaagcacaggaagatgaagacgcgcatgatgcattttggcgtatccttgatgaacgtctggaactgtgctttgaagccctgatgactcgtatcgatagcctacgcggtgttaaagccagtgtagccccgatcctttatacagaaggtgcgtttggtgtaaggttgaaacccgatgatgaaattctggaactgttcaaaaatggacgcagttctatcagtctgggatacatcggattgcatgaaactctgatgcttttcggatctggacaacacccattcgaccggatcggttctcagaacatgggtagactgattctggaatatctacgcgctgcgaccgaagcatggaaaaagaaaaccggatttgggtttagtctgtactcaacccctgctgaatctctatgtcatcgtttctgcaaactggactatgagaaattcggaagtatcaaagggatcacagataaaggctggtacactaacagttttcatctggacgttgaccgcaaggtaacaccgttcgagaaaatcgactatgaagccgattatcattacattgcaactgctggacatatcagctatgtagaattccctgatatgaaaaacaacctggaagcccttgaaaaagtctgggattatgcaatggataaactggactacttcggaactaaccttccggtcgataaatgctttgaatgtggctctgatgatgaatttaagccaacagaagacgggtttcattgtacccattgtgggaaccatgatccggaaaaaatgagcgtcacgcgccgtacatgcggctatttgggtgctcccgctgtccgtgggttcaacgaaggtaagaacaaagaaatgatgcatcgcactaagcatcaaaattaatcaaaaagcccttgacttcggttgagggcttttgttatattgggcctatcgaaaaggagacatactatgaaactgactaagaaaatgaccgatgtagtggcatgtgcgtttgcattaggctacaaagttgaaaatcacccaactcgcgttgaagtcatcaaccctatcaagggccgtcctggtttggttctgtgtgaagacggtacagcatatcgtaatgatgtctctttagaactggcaactactatccgcaccgcaaaacaaatgaaagatgttctcattagcggcgcaaaatgaggaatttataatgtattggacaaaagataaatttgtttttcgtgatgaaacgtgctttgggactgcataccgaaacttagctattcgtggtggttcgttttcagctaatgatttgtctaaggtagtattccctattaaagttactgagtatgacgtattcggtgttaaagggtttactgattactttgatacaaagtttgaatcagaatcttacattttcactaatagcgatcgtgaattattcaaaaaacacgttgttgttaaagagaaaccgttattaccaaaagaagatgaagcaaaggaaatctatgatctcctgaacatgcttgataatctcggtacttgtcatctgttcggtaaacgcgcccgtaaagcgaaagatgttctcaatctgttacgctctcgccggaattacctgatccgggaagcagaacgtaatctgaaaaattcagaaaaacaggtcgatgttcataaatccactcttgcgaaattaaaggctttgtgatgtttccgttatacgctaaagtgcgtcgaaatgtcggtgattcgtatcaggaatggagtgaatggctacgcgaaacaaagtcattctacatttcaaaagcaactgatatgaaaggccgtaacattcgctatcgtaaacccagtggtaagagagtgaatgggatagattacattgttcttgattcgattcgggatgatatacgataatttaactttgaggcaatattatgattttcaacaaaacaaattcacgtaatttgaactatctacgctgtgaactggaagctaacgaaattgaactgtttttctgtggggctacagatccggaacataaattgcattgggtatcaggtgagattgtaagcctaaccgatcagattgtcgaagaggctacccgccgcaatgcaatcgttaaaattggtgctattgatgtgaactacgaaggtcatccttcatttttcattcaatattatccataaaagtattgacctgtatatctgaatgtagtaacatccttcttgtcaactaaggaggatgttatgaaaatcaaaaacactgctactgaaactctttgcaacgaaattgcagaaatgtactggagtaaaggtcacttagaggctatgaaagagtttcaaaagtggtgtgatacccaaaagttagctaaatgggaatacatcgttattgttgaacggatcaaagaactgatcctcgtgaagaaaggtaacatgaaatgattcaactgaaattagacacaaatgcggtgttaagcctgtttccggaaggttcaaccgctcgcgtagatctccaatctgctatcatcaaaaacgtggtgaatagcgtagttggtaagcgtgttagcgaagaaatcaacaaacggatccaggaacagttagctgttctaatgccgaactcatccgaaattacacagatcatcaaatctgaattctcggattacgtcgaaaaacgttatgggtattccaatgtttttgatgtcaactatggcaatgttcgcgaactgtctggtaaaatcaaagaatcggtaaaacagcaatgccaaaccattcttaaagatatcgagaaagaggcgattgctcatgcaacagaaaacattattgcagacgaagccgcgtttatcgctcgcgtctcgaataacctggaagttactgtacgcaaagcagtaatgcaacgggttaacactcagttcccagacattattgacgaagcgatcagagaacgtctgtttggtgaaaaagcatgaattacgaccgcatctataatatggatgtggtcaacggaaaagggatccgtgttgttttgtttgtgactggttgcaatcataaatgcgaaggttgctataacaaatcgacgtggaacccttgcaacggaacaccgtacacggaagagacagaaaatcatctgatttctctgttgagtaatccgcatgttgatggacttacattaactggcggcgatccgctttaccgtgacaactatcctactatcctaaaactgcttgagcgcgtttctaaggaacttccaaagaaaaacgtatggttatggacaggatataccctggaggctttacaggccgacccagaacgttctaagctacttccttacattgatgttctgattgatggtaagtatgaaaaagatttaccaactaaaaagccttttcgcggctcagataatcaacgtatgatcgaattcgctaaaaattcgatagaaattaaaaatattgcttgacctaatgtgtaactatggtaatcttaccacatcgtaaatgacgattaactttaattgagagataatatcatgatcctgaatttcaaaacccgtaaagaagcgcgtagctactgctggaagtggaacattcccctgaaaaccatccgtaatacagggcgcggttcttgcccgtggacagttcaagcaaacgaactgaaaacgttcgtggttggtaaaacttacaaactggttgaccgtgaagggtttactaccaattcacacggcggatctaacaccgcaaacactatccaggcgatgcagatcgaaaaattcctgaataacgaggtaaaaattatctcgaaaatcaattcagatactttcaaaattgagcatactccggaaatgacttttagctctctgcgttcgtgggaagctcgttattttgtcgaagttggcgctgctccggttaagaaaacgaaagctaaaccgaaaaaatccaacgttacggctccggtcgcacctgttgcgcctgtaaccgcagatcttgatcaaatgcttgacggtggttcggcgatgtcggttgaactggatccgactaaatttgttgaaggccgttcgtatgttctggtgaaaccgcagcaatttaaaaatcgttgtggtgctaaccacgggatcaaatcatataccgatgaacacagtaatggtgtatacaccgtttaccatacgacttcgctcggtcatcatcaattgagcaaaacggtagaaaccattgattcccagaccggaaaagttggttactatctgcttgattctgaacgttcgttcttccgtgaactggcgacaggaattgttgatgaacctgttagcgtttccggtaatagcgctatcgctatcaatgtagacgaagcggctaagaaagaagaaatcgcaaaagcaatgacacagcttgaagaagcggttaaggcccatgatgacgcgcttcaaaatctgcgtactgcttccgacctggttcgcaaagctgctcgaaaagtagcagaagtaagcaagtaaattaaactgggtgctccggcacccttttttatgaggtgacacatggaattattagaaggtaaatcttataccctgaacatcgacgctaaagaatttgcagaaaaaacctggcgaaatgctttagctgaattgatcaaaaacaacggctatatcacaatcgatcgtattgcgattggggatactgaggacattgcttatgttctgcaagatgatttcgaatacgagatccctagccatatctggaaatacttcaaaccatatgatttgccggaagaagaaccgaagattgctactaaagaagaaatcgccgcgcctgttttaaattttgtatcttctgatcctaaactgtggatgactgtaaaacctgttcaacaagatatcaatgatctgcgatttgattatccttttgtcaagcggatcacttcgatttctgtactaccagcgccgactgattcacaggcacttgaatttgcattacagcatgttttcggtgataataagctgtacgcgattgacaaggaagctgctattgatgaacagaaaaaggaaatcatcaaccttctttctctgcatcaacaacttgaagcggtggaattgattgagcgtatgctttctgatacaaagaaagatatcattagcaaaatcactccggcacgaaggaaagcaattgatgaaaatcgagatttacggtattcccgaatcgcttcataaatgttatggttgtattgaagctcggaaattacttgatgagcatggattagaatacgaattttattctgttctaaagccagcaaataacagtgtggggtttgattacgatcggccccgcattgaagagttagcgaaacgtgttcgtagtcgaagcatggcatttacttaccctcggatctttgtagatggtaattttattggtggttatatgcaattgaaagagtatttgggtgaagcatgaataaagaatacattcgcaaagtagcaaacgctattcacgcaacaacgattgattttctggaagggtttgatcacattatccaccctgaaacgctggatagttgggaagccaaactgtttaaaagtatcaatgaacagtttccggaaaaggttaagcgctggtttatcagacaggaaatcgtagcaacgatccttaatgaacgtggtgttgaggcgttcggtgtaacccctctatataaacgaaaccagattacagacgaaacaatcaagaaatataaaaagatggttcggaagtaataaataatcagttaaatggccttcgggccattttttgtatataaatattggtattgaatacaatataggaaaaaagataatggtagctaaatcattccgcgcacgaagtggccttgatgctgctggtgaaaaagttatcaacgttgggaaggctgatcgtaatacgctgagtgacggcgttaacgttgactttttcaatgaatttaacggaatccagcagtatgacccgacccgtggctattctcaagacatggcgatcatttatgcgcgtcgtatctggtacgcaaaacagaatattgcttcccctgctggggctttcgacgaatccaaatggatcgcaactcgtaatgacccgaaatgggtttatagtaacgtaaccactccagacggtagcattattgaatctggtagttacattatggctgatggacgctttactgaacttctgtacctgctgccggataacccgacagagggcgacgtaatcacgtttaaagattgcggtggtttagtaggtgtgaacagtatccttgttaagtctaacacccgtcagatccgtttacgtactgtacaatcagcacagtatagactgactcacccgtacatgatcgcaacgtttatctataacggtaacgtatggcgtgttgctgaaactctggataaccgcgattctgagatcgtgaacgcaaccggaacaggttcattccagttacaatctggtatgacagttttccgtaacagtgctacgggtaaaatcactctccagttgccgaaatatgcaaatgatggtgatgtgatcacaacctatgacgctgataaaatgaactctatcaacgtagccgttttgcagatttatccaggtagtggacacactatttctgacggtgcaattactggtgttacttcggtaactagccagaaatctggctttggtatgttcatctttgatgcacagaatagccaatggaaagtatatgatgctgataatcgtgttcgtctgcgtcgtatctatagtgatttaaacacagttcctaacgattacgtttttgttactgcaaacccttctgggactataccaaacgttacagttacccttccaactgatgttgctgatggtgatcgcgtttacgtatccctttatatgatgggtaaaaaccagaactgtacaatcaaagttaaagatggtacaacggacaagatccgcaccaacaaaaatatgatgcagttcccgcagcgcaaagactatccgcctgatgattggtttagtgtaacttcattagcatttaatgctgctagtgattacctcccgtatatcgagttttcttacatgaaagctacgaaagaatgggttgttgctaattatcgtccgatcgttgaacgtgttgacgcaactaacagatcgcgtactggtgttattgctctggctgcacaggcagaagtaaacaaaaacttggaagacaacccgaacgacgaaactgctattactccgatgacgttagcaaataaaactgctacagaaacccgtcgtggtattgcacggttagcaacaactgctgaggttaacaaactttcaaccgatacctatctggatgatgtgattgttacccctaagaagctgaacgaaagaacagcaactgaaacccgtcgtggactggcagaaatcgcaactcaggcagaaaccaacggaagcaccgatgatattactattgtaaccccgaaaaagttgcataaccgtattgcatcgccgaccttgactggtatccttgcccttgttgctactggtggtgctcctaacaccaacacggatcgttctcaggctggtactggggtttatgaccattcagattatcagaaagcggtaacgcctaaaactcttcgtgagtataaagcgactcagttacaatctggtgttgtatggctggcttctgaaaccgaagttattaacggtactgttgcaagttcaaacgttccgaccgttgttactccggaaatgctgcacaagaaaacctctactgatggtcgtattggtttgatcgagattgctacccagacagaaaccaacgcagggactgattacacgcgagcggtaacgcctaaaacgcttaacgatcgtgctgcaacggaaacgctgacaggtatcattgcaattgcaaccactgccgaagtatcagcaggtactgtaacgaataaagcgatcgtaccgtctaaactgaaaggttatctggacgatacaagccatattactgttgctactgctgacgggttaactcaatctgggactatctggactacggttaacatcggtattcaatcagcaactgaaactcaacgtggtactttacgcgtcgctacacagtctgagacgaacgcagggacattagatacagtatttgtcacccctaagaagttacacgctaagaaagcgactgagagcgcagaaggtatcattcaggtggctacggctgctgaaactaccgctggcaccgttgcaaacaaggctgtttctcctaagaacttgaaaaatacaattcaggttgatacttcatggcaagctaccgatctggtacgtggtactgtgaagctgtctaaggggcttggtacttggtcgggtaatgatgtggctggttctactcttccggatgatggttatgccgctgtaggtgttgctgtttctccgtatgaactgaacttaacactgaaacactatctgccgatcggggctaaagcggttgatgctgataagctggataacctggattcttcccagttcattcgtcgtgatgttaatcagacggttaacggggcattgactctaacgaaagcaaccactgtacaggctgacattaactcaacagccgacgcaagtttccgggtaatgaatgttagtggagatctgaacgttggtgatggttcatcgatgggtaaacttcgtttgaatggtggttcatctaacgactggtcaattcaagcaagttcagcctctgggcgtattgcaatgatctcaacgggtaacactggcacagttcatctttctgtgtataatgatactcgcggcgttgtagctaacgttaaattccaggctcctgaaattcaggcgattggcaaagttacgctgggtaatgatacagtgatcacggctgctggttctgttctctctatgggtactaaaaataagacaactaagatcctgacttctgatgctggcaacatagtagcggaagaatctgcgaactcttataaagtctttactgagaagaacgcgcaaaccttgctgaatcctacgtatgtacgtaaagcaggtgatacgatgtctggacggttgacggtaagcaacagttcaattatcatcgcaggtcaagcggcttggtcaacgctggatgcagtaacagaagcatctaggggtaactggacggcggagattaccgcatcggcacagtacaacttgcttcctggttatgcggttccggttcttgaaccagatccgattaatccagaaatcatgattgtgacccgttatacctatgttaaagcaccgggtactttaacgcagtttggtaacggaactgcattcacttatcagatttgggcacctcgtccgacctctggtactggtgttaatgcgctggcgcaatccttctggatccgtcaaatgaacccaattacgggtaaatttgatggttggggccgcatgtatactagcaacaacccgcctactgctggtgagattggtgcaacgtctgctgttggtactacggttaaaaacatgactgttaccgattggatcaaagttggtaatgttaagatttacccagatccagttactcagacagttaaatttgagtgggtggcataatgtcaaacttaatggcggggttcggccccgattttgtagaaacgcaaattctatcggaaacaaacagcgtaacttacagaataaccgcaaaggcaacacatcccaatgcggttcctaatcagtatgagtttacactaaatcaaaaggcggtagggacaccgcctagtgttgggatcaacgtatggagaattaacaatgctgtagttgatccaattaaaaccttcacattatcgaatgataattcagcaactgcaaacaaagcgtttgttgaatatatggatgctcaaccttctgggctgtatttgataatgactaacggtgaatacaaaacaagccaaatcgttgatgattggtttgctaaaaacagatccgttatgtggcaaggcgctgatttcgctcagagattcccaaattctgcatatgttgcattgtatggggcttcaaaatctcgtatactgattgaatcgttttacgcgaacgatggagttttaaaagaagattcacgcgcatcaatcgatcttgtctatgataacgttggtgatgttgggcgaactggtgtacctttccgatctgttgaagatacggaagaatacaattcaaccaatggatctgaatataaagtatatcctgttgcaaacccagtgatctctaaactggctgattatggtatggctcctggattagctatgatgattgctggtgatttttacgccagcaaagcattattggatgctggatcaacaacaagggttactgttcgatggtttacgggtactgctcaaacttcatcatcggtgattgaagttcctgcaaataaacctgatgagtggttacgatttgaacagttctatacgatccctagtggttgtgatggatttaacgttgctgtatctcgttatcctaaacccgctacggatagtttatctgcgatccgtaactttgtgatggttcaggtatctgctgccgaagctgatcaaaactttgctgcacagtttggggttaacggtatcagaatgaacaacatgatcgatggcggaacaccgtatatatttgaattgcctaatactaaggtttatcctggtggcgattattctgcttccgaattccgtgaagttgatgcataaacaaaggcccggatcattgggccttataaatatgtaaaaaggggttattatggcagatttaaaagctggttctacagtcgggggtttacctatttggcactccggcacatttccgctggttccggttggtaatactctaacctatcgcggatataaggtttatactgaaaacgataaaccgcaagcatcaaataacgacttcgtttctaaagcaagcggcggtcaatatttgggtgtagttgcctttaaacaggggctacaaattaacgctactttcacaggcggaagtgaccagaacggtttatattctggtgatggtgatggtgcgacattatcaaaagccaacatagatcttgtatcatggtatggtattggtattcgttcatcttccggtactaatggtcgcgtattagtcatcaacgctcgaaatggtgatttaaacactcagggtaatatcacggttgaaaaacaaatcagtattacaacctctaaccctactgacgcaagtcatgcaacacgaaaaagttatgttgatggtcagataaatactgtcacaacaaatgctaatagcagggtattacgcgctggcgatactatgacagggctattaactgccccgcaattcgcgagcacaggcgcggcttcccgtcccgaacacgtaccacggctcgaccaggtaattactaaagggactatcatagattttggatcttattaaggtgaaacatggctgatttagcaaaaattcaattcctacgtagcacagttgcggggaaaacacctactacaagtcagcttgcagatggtgaactggcgatcaacatggctgattatgccatttacacgaaaaatggttcttcgatcgttcagttagcgggtaaaggtatcccagaaacaaataccaaaaaattaacagtaaatgggcctagtgctcttaatgataccgttaccgtagcggaaggtaaaactattactttcaccaacgcggatttgagcgggggtatggttcgtcatatcactggtaaaaacgcgcttaatgatggttggtacatcggttctggtggtgagagcaataaaggctttttagaaatcggtacaattgatgacggtgatgaagagatccgtttcgtttcccgtggttctggtgatactgttcgccgtactctgaaacttattgattccggtggtaacactcgcgtaccaggtaacatctatattgatgaagctatgggcggtggtggttctgcttttatttcaaaaaacaaagcatatttcggtgctggcggtgctgatatctatatgcgtaacacggctggcggtgcgacaaatcagttaacgatcactgatggtggtgaattgctgtttcaagcaaaacctgtatactgggacggtcgtaaaccgactttaaccgaattggggatcggtcgggttgaaaacgcgcgtcaaatgcagcaagacaattggcctataactacaggtaatgaaacccgatgggttaaagttgctctgttaaaagatccgggttccggtcagagtcgcttgcaactgatggtgactaacggcggtaactatggttctacacgcggattgttcgattttatcgattgttctgctcgtagtatgccttcaacattaacggctgcaaatattcgttcttatctgcaaattcgtcgattgggcgatccggcaatggatgacactaaccagatgcgttatagtttggttcgcacatccgaaggtttggaattgtggtttactcaaagatcgttcatcggtagtacaaaaattgctctgttatctacggctggcgtgactgaatattatattcctagtggatatacatcacaaacaaccgctccggatggtttgatcgagagtaagcctattcgtatctatgacgaaatgaacaagcctaaccttgacgatggtactgatggtattctgtctgttgctaaaggtggtacaggcgcaagtacagcctctgctgctcgcacaaacttaggtttgggtacggctgcaacccgtgatgtcggtgaatccagcggaaacgtaatggaagttggtgcatttggtcttggtggtacggtaggcgctggaaatattgcaaagggatctttagcagagaccgttaagtatcttaatacatacggaacatgcttctttagggtagaagataacattgcagtactgccccagtattctcctagcatttatgttaaaaccggaagcaatcagttaattctttcagctaaccacagaaacggtgttattagtgtcgtcactacggataaagttgatggtactaatttaacggtatctgaagtatatactacgctgaataagccatcaccggctgatgttaatgctgttgctcgtactggtgatggtatgacaggtgatctgtctattaccaaagcgtctcccggattccatttgaatgctgagagcggaaactcagtaatttggtttaagtataaagggcttgaaactggtgctgtatgggcgttgcctaatactgcctcttctggtgaagttcgcattcgtgccagaacgtcgggtggaacgacaggtggagaattctcgtttaaatctgacggtacgtttacatcacctggtgatgtaaatatcactagcggcgctttcaacggtaaaagtgtcaatactcagtatgcgaactttaataacacaagttcaaccacaaccgaacaaaccgtttctattagtggttcacagcacactccgttgttactgaatagacagactaactcgaacttgtctatcgggtttaaactttccggaatgaacatgaaacgtttgggtattgatgtaaacggtgatattcgttacggtgaagcagaaaaccagacacaaaactcatggttgttgacttcggatacagttaacagatggactgttaacttcggtcgtgatattaacgttgctggtgtggttaattcaactggtgtgattaattcaactggtggatttactggccctgttactgcatatgatttgactggggtaactcaggatcttgatgctttaacattgaacaataccgaaccaggtcatattaaagtttatacgtgccgtagtatgggtggcggtgataacatcaccaacaaaccttctggcgtaggtggtaactttattgttatcgttgaatgtctccgtaaagtaagcgataccgattacactaaccgtcaagtattacgcgcgtcggacaataaacgcagttgggaacgttggttaactgttagcggtactgctaaaacctggtcaccgtggagaatgaacgttgttagcggaaacgatgatgatgtatcatttaaatctgttaccacaactacaggaaacctgaacagtggaaatgatctgattgttgctaacaacactcgcgtaggtggcaacttagggttaggtggtgcttcttccacgaaatacgctgataaaggtgttgtgatcggtagtggtagtgctctgttagaaagtactgatggtcgcgtgattattggtagttctggtggcggtcgtgctgttgaattacgtcctggtggcccaactcaaaccaacaacttgatcaaagtaactgctaccgctggaagtggtggtgatactgcgatcgagtatgcacaaggggtgaaaattcgttctaataacggcggggcgttgattatttctgctaaagcaggtcaatcaatctatctacgaccgcaaggtgatacatccagcacaaacgaaacccgtattgatgcaaacggtagtatcacgattaacggcaatattaacgccaacggtacattaacttgtactggtggtgctgttaacggcgacttgactgtatcaggaaacgtagatatcactggaactcgactcaaaacctggggacttgaggttgatggcggcggaactgtgctcggtggaactattgatgttgttggtaaagctaacttctctaatgagcttacagccaaaacttctattaatgtcatgaatgatggaaatagtcatctgttcttccgtaaagcagatggtacagaaaaaggtcttttatatgtagatgacccaggtaacgtgactattcgtgctaagggtggaagtggccctacttggaacttttgggaatcaggatcttgtcaattcccaggtgctattagtaactttaatggtgttaatagtactactaattatcctggcggtggcaacggctcgtttttaaacacggctggcttaacaagtagatttagtaatggtgcttacgtttcactttatttccaagaatatgttggaaattatcatcaagctattcttaatgttaacggctatgggcaagataacagcttttatttccgggctggtggtgatttcatatgtacccgtaatggttcattcgataacgtcgagattcgttctgaccgtagagccaaatcggatatcaaagttattgaaaatgctttggaaaaagtagaaaaactaaccggtaatacttatgagcttcacaacacatccggtggtactactcgttctgcgggtttaatcgcgcaggaagttcaagaagttcttccggaagcagttactcaggatattgaagcagacgggggtttattgcgtctgaattacaactcagtaattgcacttctcgttgaatctgttaaagagctttctgctgaggttaaagagcttaaatctcaactgaaataatgtaaggggcttcggccccttttaggagaaataactatggcagtaacagggccgtgggtcggaagttcggcaaaggctgaaactggcgaagcatggatggtgcaagctggggccaaattaagaatagggacaccgttttggatgtctaatatgattggacaaagcgtattccatttaattttcagaattaactatgcacaaggttcttctggcgatccatctagatatagaggattctttaaaagagggttatcagtaaatataggagactcagcaaaccagccaacattaaatgcatttcctggtggtgaagtagggtctttagtagccattacaaatattaaaggggatccttattgtttgtctattttaaatggggctgatcgacgagttaaagtgtctatatttaatgcatctggcggagaccagtatgatgtttatttcagtggaactactatgagtgacggttggagaagatatagatgcgaaaacgctggtggcctcaatgggtattttgaagctagaatggataatcagttcggtgctttattagaatacgtttgataaataaaccaacaaactcacattattaaatagattaaaaggctacctatatggtagcctttttgttgtatcctaaatatacctatagtaacctaagaagagtcttataaaatggctgagagaaatcccgtagataaactagccttatttgatcgggtaatatcgtttgtgatgggtgtgaaaacatggaaacaattgctgataaaaataattctaataatggttatgtttcttatggtagtaacttggtacaaatggactgatatattcccgatgataaaaggtgcccttgtagtcgatacaagggctatcgaaattgaaagaacagaaaagtttaatcaatccgcgttggaacagttgagcatagttcatcttacttccaacgcggatttttcggcggtactggcattcagaccaaagaacataaactattttgttgacattgtagaatatcagggaaaattaccatcccagatcgatcctaaaaacctcggcggttatccgatcgataaaacatccgaagaatacacgaatcatataaatggcttgtattattcatccactaaagcaagttcctacctaccgacacgtgattttgtgccagtagcttatacttttagttgcccttatttcaatcttgataactactattctggatcggttttgatggaatggtatgcaaagcggcctgatataccagatatgaagataaacatcatatgtggacaggccgcgcgcattttaggtcgagcgaggtgattaacgtaatgctggtgttaaattgtgtgatcttccaatagcccgtttgattgctttaaagaagttcatcaccgggctatttttctcgtaaatatcccaaactttcaatttgtcccacggatccggaacataatcttcattccttgccgaaacccccaacgtaacccgcctgtatccagcgctgtcgtgataatacacgaagaatggcctacctattggcgcaaccttacaacctctcttagcggctctcatagcctcatcgaacgtcatggattcccccaaaaatttctatgcatgaatggtcgaattccgatagtttcactcaaaatgaatatcggatgatctagctcatcgtggttttcttcgtcaatgacgatatcccaatcagtagccttttgttcttctaccgtggcaatgaatacctggtttacttcacacttgcggtgtgtacgtctgatgattgtatccccttcacgaaacacaatcatatcaggattggtagtacggtacgcggttttacccgcgcacacttcattaagcatatcttcgtatgtcattataaaacctttacacgttgaacgatggtttgtttaacgtctttgtattctccgtgctctttaacggttgctttgaacgtgatttcatcaccttcgtttgcaatgttattaccgaagtaaacaacaacattaccatcaacattaattttggtcatgaatctttctacagaagtgtagtaagaaacttgagtatatcccagtgaaatcactttctcaacggttccggtcatttccagacgttgtttgatttcaccgatgtggttagctttagaaatgcgttcctggcgctcttgttcccactgttcgcggatttcttcgcgtttggcgatataatccttctccagtgcaacacccatgcagtaagcgcacacggcgtcaaatacagggctgtttttgttgtcttctttagactggtcagcccaccaaagaacagtaaacattggcatttctgcaattacttctcctttacgcttgccaatcggcatgatccctttttccagcagttccagtttttcagtatcgaacactgacagtttaccgcgacgttcgaacagatcgaaatctgcaaagccctggaataccattttgaaagtatcagtttcagttaaacgggctgaaacacggtcgaaatactcacgcgctttcgcttccgctttctccggatcggtagataagttgcagatatagttatcagaagtataaccgccacctctacgctcaacacgcaaggtgtacattgcatttttacgaccagaagaaatgaagtaagtggtagtaactacggttgcgttagtcatggtatttctccttaaaaggtatctcgtttcgatatggctaatatagcaaaagcccccgaccgaagtcaagggctttttaatcattcattcgaatctttcattgctttatgaagatgaatatcaaaaattttccagtacgcctttccgcgaggataaatttttgctttgtcaatatcgttgttgcttccccatgtattgtttgggccacgacagcgattttttatataatccgtatgccagaataagcgttgaaccgatgattccgtacctaatggatcttctttactgaacagaatttgtgtactcataagaagaacccagtgcgaacaatcagatcgattttcttttctggttcaaacggcgatttgctatcgatgttacactgatagaacataccaacatacttttcaggaatgttggattcacgcgcccatttcaggttatcatcggtattcggccccagcatgaggttaacaacatcaacagcataatcctgttctttggtgttaccggaaccgtttacataatgcccgtgggcggttttgaggatctcaattacttcgctatcgtcggtttcgactttgtaaagcgttgtattttcaggaatttcttcaagaatgatcaaagcggttttcatcacacttacctttgtgtttctgtttacgttttgcttctttaaatgctcgcttgcgatcgcggtgagtagaagcgcggttaatccatgcatgtttcgctaccaaattattcatataagccccttaaagaaaaatatttaggggctttcgcccctgtatcaatccagcagtttgcggatcttgtctgcgatacgtccggcacgggttgcgcttgcagtatgatcgctttcttttgaagccagttccgccagcttacgctgatgttcttcttctgctgcttggcgatctgctgcaacctgtgcaacctgctcattatcgtgagcaatacgcgcttccagttcagacagagttttgtcgaaagttgctacgatttcatctacagaacgaattttattaaacagtttcataatttatctcaattggttagttttaatcagtatacatcaatatggttgaaattcaaaatcataaatgtcattcagtgcgcgattccactcggtgtagttttcaccagcaccataacgcatttgaatagcactttcgaacgatgatccgttgaggttcgggaaaccgaacaggtttttgattttgtcatgtgctacatagtacagagaagcactttccagcatcgcaaccatcgcagacggttcgtgttcgcggcgcttgatacgtaacagagtacgactagcgccagttttacggcgttgatttggtgctacgtagaaacggaatactacgcgccctgttttatcatcaactaccaggtaaaacccgttttctttcagatccacgccttcgaatttcttgaaggttccgcgtttcatgtcaccaattttaattgcatatttgtgaatgtcaagtcttgtcagaattcttttcatattttttagataccagtttgcctaattttgtaatttcgcctgtttttacgttaacaaacaaggcgatgctcagaaacgggatgctaataactacgctgatcaatgtaaacagaaaacgtatcacaaaaagaacagcacgttcaagatatcgttgcatccacgcgattcctaaacaagtataccccactataaaggtggttgcaacataaaatgcaccaaatcctttacgaaatacgtaaccttttccagattcgatctggtcatcggcccacatttcacgggcagttttcagaatagattcaccactcgcgcgggtttcgttagccgaaggcatgtttttaaatttcatgatagtctcctatgcgcccagaactctccaggcgcggttgtttagttagtaatggctaaaaccataggtaacatcaatcatgactttataacggcatacacgcatttttgcgttattgtaatccactgggatcgctactacgtcagcaggatccacctttacctgaatgactctaccaataccgcccccgtaatgtggaaggtatgatttagccgcaacgtgtaggccagtagaacaggtgcgcgttttatcttcgtctaccatgtttcgaggcatggatacagtcacaccaggactattatcaaatttgccagtcgcgagatctttatagttatcgcgtacacgtttccaggcaagaaaacaaccatcatcggtcagttcaatgtcattatgtacaaggaacccgtaaagctggtataccgcatcgcgtgaagggtttcgcatcaaccgttcaaagaagtttaccaggtgttcatacggacgatcgttatacatttcgcgaatgattcgttgagtgatatcagaatcaaacactacatctttatatagaagctgatgaccaatgattttaatgttgcctttgctataggttcggatcgcttcctgggtatccaaacaacgcaccgcgcctttaacatcaccagctttcagcatttcatgcgctttcttaaagttcggatgtgtttcacccgccatgaaaacgcgcccttcgtatacaaccgtaatgaacgattcagaaccgatcatacgcggtacagtgtctgatactttaggcttttgttttacgttccttttcttagggaactccgctaacttgcggttgataacgcgcccaatggttcgggcgcttacgttgaactgttgggccagtgctgttttacttgcccccgtcaaccatccattatagatagctttctgttgtacttcgtcaagaattttgaccattatttccaccgtattaatttcttaaactcactgagattcttttcgttgttgtaaatcggacgaattgaataagaatcactatgttcaacaagtgaagccagtaacgggtttagtgatttaaagatttcccatgcctgatcaacacgttttttcatattgctgcgtttaacacgcattgatgctatggattcacgcagaatcggacaacgcaccctggaaagatttttaccatctttctcatacccttccagacacgctatatgttcgagcgtatcaacaaccttatacagtttttcattgtatcggtttttcacaatccgatcaagagatacaccgaaacggctatgcaatgcgtctgtttctgttgagtgttccttaccaatccatccaggcaagcagttatctttcaacgccttttcggatttaacatactgcttgcacagcatatcatcaaagcataccagatttgaatccgggatccacttccagaggctgttacggatagcaaacacaacagggatcccagtatggcgcatgatacgcgataaagtagattctttcattgcggaatccatagacaaccgggaattttcaccatctaagcggctatattcatcaataccatacaaccgaacacctggggctttatccagtgataaaaactctgattttgtcataaacagagaagtttttgccagattgccgtcactatccaactcataacgatatacggtcggggtttttgggcgcggttctgaatttttcggtgcatatagcgcttttgatttttcgcgatctgcatcatagatctctttttcttttgtcatttcactggtacggagatacacaatttccgattcatcaaaatgaccttttcgaacgatatcattaacaatctcgcgctttgaatcactatcgtaatacgcaacaaagctaacacggcttaggttatgcattttagcatacccgacgatatacggtttaaccgtgttggtatccacttttaacagaataagtttcttctgtttccacggataataaatgcgcgtgatgtcctggcgtttggttgtttctggcttatacttgctccagcggcctccgctaccagttacctgataccatgcatctttaccatcgtattcgttcgcccaatacccagcaatataatcatcattatatttgtttggtttgactagctcgctatggatccaaccaatagaatcaccattgacgcgaaaattaacatctttaccaacaaagttttgtaccattgaaggcagtgaatggaaccacgtcagtttatcacgaacggtttgtaacttctcgaattctgatttaactcgattgaaatatacccggctgatttgtttcagacgttctttaacaatccctactgtcattttatccatactcaactcttcgcgagaaggcatgaaatcaagttcaccgatcgggaagtcaataatatacgtatactggctttctgtatagcaatagaacatcgaggtatcatacaaatctttatccagaggataaatgatgttacccatgcgagcatatacaccgctagtgtatgctgatttatgacggatcaccccgctatcgttggttgcttctttcggctgatagttgattttgagaatagaagcaccaacaaagttaggacgaatatcagtaaatgattcgtatacccttgctgcttcgttttcccattctttgatatcttcaaccttaaccggaacggtgatagtaaccccgttaggttcatcgctttcaatctcatacagaggatcgcagaacggttccccatcatccatatagattgtgtaaccgcatttgataccgtcttttacagattccaccgtgaaagcatcggaatagcaaagaggagatttgcaacccagacccatagaaccgatcaggtcgtttgaatcatttttagttgattcgaagtaaacggtaaacgcatcactaacgaaatcaggagacataccgatcccgtagtcacgaataacaaaacgaggatcaacagcagttggcaactggacatcaaacgggttctgatttcccgcttctttgtgtccatcaatcgcattacaagacagttcgcgaatgattgcgcggatcttgtatttgtatactgtcgaagaaaggatcttatacgctttcttgtttgcgcgtagagatagtttgtttcgtcccttgctggtatctgtaccaacacggtagatggtttgcggtgtatcttcgcgtaatttcattgtttatttctcacttaacattaaaaataacttggtcacaagagtacttcgttggctttttgttcagaccatattctactacttcacaataggtgtcaaggaattttaccaatttttcttcctcgacctgctgtttcttcatatcaaggataccccacacgatagccccgataatgacagaaaagaacgcacaaaatccgaatatggtcagatattttcccaacttaggcgcattataacgtgtcatacgttacccctctttgcgaatgtatgcaagttcttcatgggttactggacggatatacagacggccttttgtatatgccttgcgcccgctgatccaaatgtttttcatatccttaacaccgttcatcacatcgttgtaaaacttcttatcagctttagcctgatagacttcacggccttgataatctttcatgaacaaacaataaaggatctcgttcttatcaactagattagcatcctttgtagttgttttacttggtgaaggtttagcacccaggcgcaaggccatagcttgccacactttaccatgttcataaccgcgcccgacaagagcatgagcgatttcgtgtaaaagagtgtctaaaatatcctcgtagatatcttccgcaacatgacgaccagatagttcgatcagttttttggtataactgcaacggcccagagtttttgtaatacgtccattgatccggaatgtccaaccattactgatcaaaccgtgtttttccatcatggtacgcgcccagtgggttacttccattgcactacgagttttcaacattttagaatctcctttgcttggtacaaaaccaatatagcaaaaagccccctgcattgcaagaggctttgtaattatttcaacttcttagaaagttcttttaaatcattgagatactcaattttaggggttgtttcttcccagtatttcaattgtttgcgcaattcttcggcttcgtcttccagcttttttctttcgtccgtggttagatggtagatgttcatagccactaacatttcggcatgattctcgcaacctatccacgtagacacaaatttaaccgcttcgctgcgactaaggccacgcagagaatcaggagattctaccatttgagcaataaacgcaacctttgccagtgctttatctaacgcttccttagtttcctggatacgcttattgatacgctgttgatatacattcatacgaatatcaacgaaatcctttagaagcgtttcagggcgttcgtatgagtatagtttgccctcaaagataacgttaatgtttgggtttgagttttcaatcaagccgaaatctttcaggatcttttcacgggttagcccattagcatactctcgcttgagcgttacttcataccgaaaatcttctttcgatagatccttgtagctaacgataacgcctttttcttccagcttgtcaaggattgcaatgtatttcacacggtcatatttcactgggatctcagtgatcaccaatttggttttaccttgtagttcataggtgccgtaaatcgtaccgtctgtgatttcacctttaaagtaaggatatttcagatccagagtgaaatctttatcattcagatatgcaatgcacccgttaacaaccgatttaggatcatgaggcggaatgtttgttgcatatgcttttgcaatcccgctaaacccgttaaccagtaccatcggaatgatcgggagatagtacgctggcggtacatgttccggatcttcatgaactggcgttaaatcaccatccatataaattgctttgaatattggcgatagtttacacttgatgtaacgaggtgcgccaggtttcttaaccaaacgggaaccaaagaacccatcacggtcgaataacggaatgttattgcaccagtgcgccgccataagggataacgcttcttctacagaggtttccccgtggtgatatccatacatagcaacaccgccagcgatagaagctactttctgaaatcccgttccgccctgcatagcagagtgaataaagaaacggtgaacgggtttaaacccgtctaccaggtgcgggatcgcacgtgaataaatcgtataaagggcaaacgttagcccttccacctgtacaacatctttaatacttctttccattagtcaaccttagaaaatttgtgttttccattaacccaatctttacgcggatcagattcgtcgccgaagcatagttctaacacttctttgtattcgtcgtcaagtacaatgacatcatacttcaactgatcacccagaacacggtcgtaatcttctttgcgtaaagaacccagccccttgatatatcgtacatcttttgctttatcgcggaacggtgcaaactcatcaagagaatagaaccatttttcctcgcgcccaactttagcgataacgatcggggttcgaatatatcggatccgtttttctgcaaacagagaaggccaacggctaaagaatgcaagcaacagggttaaaatgtcaccaccgtcaacgtcagcatcgaccatgataccgatattatcataagtcattccggaagtatcaccaggatgaatattgaggatagccattagctcaaacagttctttgtttttgataatgtctgtaaaactcataccccatgtattcagaggcttaccacgtagcgggaaagcgccttgtgtttcttcgttacggcattcgatgaactgaccaacagcggaatcaccttctgtcagaaacaatgttgtttctatccctggagtatcgataccggaagccggaacgtgtttagcaatctttgcctttttcgctttctttttcgctttggtgattgcggcggcttctgctgcttgtttacgaatcagtgcggattcaatgatcggagtaatgatttctggggtatccataatcatttttgcgatctttttgtaattcaaattcgcatgattgttaaactcacctgctgtatttgccaatcgctcttttgtttggctatcgaatgcaggtgcattaaagttatgcaggaataccacaagagttaagcattcttttacacgtgctttcgggatctcgatactatgctttttcttgatcatcggttcaagttcagaatagataccatcgatcatacactcaacatgaacaccgccatttttcgtatccagaccgttaacaaaggatttctgtttaaacccgtcctcagtgctcgccagaatgaagctgaggcgattatttgtctggacaatggttttatccccatacatggaagcgtacagcgggaagcgattagagagcgtttctccgttatacgtgaatttcacagacgggaaggcaacggcaagggccattaagcgatccttaatcacttctttggtttcttcatcgataccagttacaccaaacatagagaagtctggagtaaacttaacagtagtaccctgttctttactggggctggttcggtaatcgatgttctgtgcgccgtcagtacagttaatggttactttgcgtttcccgtttgcagtctcaccaataaaaatcgagctataacagtttgtcaggaaagaaccaacaccattcatacccatcgttacgcggtttttatcatcgaagttagaacctgattttgccatagtccatgcagcaactggtttaggaactattttcccgtctggggtttttacatcatcctggggaataccgcgcccattatcagagattttaaccagattatgatcaatggttacatcaatcttattagcatgtttgaattcagttcggatcgcttcatcaatcgagttatcaaggatttcgttgatgattttaaccaacccttccacgtactcaaccttgcgatattggcccattatgaaacgttcatgcgcttctttgttaaccgatccgacgtacatatttggacgcaaccgaatatgatcgcgatcgctcatacaaaatgattcgtcaacctttgcgccttttttggctggttgtggtttctgttctggttcatcatctgccagaagaaaatctaaactcatattcacctctttgtttaatcactgacattatatagggttctatgaaaaagaaaacccctttcggggtttacttgttataagggaaaccatcacgaaccatttgaggtttatcaaccgttcgttttgcttcgcctccgcaatcacaatctttcggtgcatcacgggtagcaatgcttgccatttttggaaattctttattacacttggtgcatttataggtataggtaggcattaataaatctcttttaaacttaacatcttaactaaacgggctttgtctatgtcaaaaacacattgacgtgcgcccggatacaacttttcaacttcgtataccatgcagacgaaaccaacattgtgcatgtactcgcgttcatatgcattgaaccaacgagaaaggcgctgtattgactgaaaaccaaagtataacccagccgcttgaaagtctatgttatctttttcaaggttgcgcatcaatcgattatcgtcatccggcgctggatgtcggtgatcatccatatcaatatagatatcaggattcatacagaattgatcaagccattcagcggtatccatcgacaaataacgattgacatatgggccactttttgtttgccatttttctgtacaatcattccagaaagaacaagaaaattccacacgatatacgaacatgatataatcctcacaagtaaactcaaggtttacaagtacgataccacttatctaatttttctgcaagagtattgttgataatttttgcaatttcgtaccgtccgtgagtagtacccagttccaggtaaatcacatcaagtgcgcacacaatcgcatcaatactttcttcaacgatattaccgccgcgttgaggctgaatgagacattcgctgatctcgccaacttccgctgataggtgatgaaccacatcactcttcgtgcgtttcttcactttatgtgcaatttcgaaaaacttatcaagtacgatcgtcgtttcttctcgcgttgcggtattctcggatgttgaagccgtgtgttgaacaacatatttcgtaaaatagccttcaaacacgttgaaagggatcacatgaggaacaccattcaaaaacaccccttctttacaaacataatggatttggcgaggaatagacaaaccgccgctgcgttccaaatgccgtttaacgcttgctacaaaatcaaattctttcccgtatccatccaatctactgttataagtgagtagaccaaaagtaggaacatatagatcattttctttatacagattcatttacaatacctttatggtagccaaaaatataacaatcaatcgaaggacgttcaccagggaagtgaatgcattgcatgatgcgttcagccattagatcttctcccatgtataccgaagtagtttcttcgttgtaatgggtatcatacgacgttttaagcgtcatgcccggaagccctgcaatgtgcatgaatttagaattggtgcaaggttttcctacttcaccgttaaccatcaacactgcattagttttacgtgcttttctcatttgaatttcaccccgatttgagatacgttccattcttttacgtcatcaacaatatcataatggttgatgtatggtaaagcaatttttaaattactcgcgtcttgaatgttgcgtaagaaacgagtaggagaaagaagacacaacctctcggatccgttgtttcctttagcggcaaatgatagggtttctcccccgtcaattttcatatcaacagaaatcgttttgaattctggtgcgtatgacgtgattttgccgttgtctctcggtgtactatagaaacatacactttgtgggacattataacggtctgtttcaatgtacatgtaatcgccgtcagccattccccacacggtgtagagggatccggtatagtcaccaaaggaatttttaaaatcttccttcgtggtgtatcccagagagcgcaattgcataagctggttatgctgttcgattgcatcggctttttgttgttcctgtacttgcgcatcaatcgtttcttgccaggaattatacgcatagtaacccacaacagcgattacagccataacccctacagctttccagattttagagtcttcgtttttgttactcatgctatattccttttaagaaaaagggccgaagcccctttgttaacgaagataaaccacataaccgctttggtcaatcgcgcggtctgcgtcattgaagatattaccacgaatgccttttgctggtgctttccagcttgcaggtttcaggatattaccatcattatcgatgaaagcggcaacagaacgctgattgaacatttcaccagtttctttgttgcgagtatcctgaacaacgcgatgatatttgcggcctttctccagaaagaaaacagtttcgaaaggagaatcttggaaacgagcgttacgcgctttgtacattgcttccatgaaaggggctgctttttctgcgaggatttcgaaagtgttcatggtatatctcctaaagtgtgtttcgtttcgatgtaagtactatatcaaagatggttattctatgcaaggcttttttcgttatccatcaaatattttaagtgttcttttaatgcagggagttcgttcaaatggcgttgcttaactttctcgtactctttgcgttcccagttttcaagattgcttgccaacgcttcatcacaataagcgatcccgcgttctgcatcctgaactttctgtttccattgtgcaactgcttgttgataaagagaaccgttaaccatcataataatttcctcccttgtttcgatggggtaactataccaaagctaccccagaatgttttaacaaaaagtgctattagtaggtatccagtttatacattttgcaccagttcatgaattcttcgaaagtctgagtattaacacgtttttccttcttcactttcttagtgattacaggacggttagtaaaacgtttttgcattttcacagtgattgctactttatcgcccaggtcttcaaccttttcaaccagcgcccactgagaaccaatttcagcgccgaaagtcaaaccaacaatctcacctgctttaacgtgtgctgcatattttactttaaccattttcgtattcctttctctgtttcgtttcgatgaatacaagataccaaaaagcctcccgcaatgcaagaggcttctttaacaaaaaatgctattttatttctttgagtaatttacggatcccgccgccctgtgtcttatcaaagattttctttgcatcaataacagaagtgattatgtggtagttgttaccttttccgtcaaactcaaactcgaccttgtagtcactacgaaatttcacaaaaacaaattcacctgcaaagtgcttacggaactgcttttcgttaatgtccaaccattcctgtgtatcatctaactgatacatgcgacaaaacaggatcgaacccattacagcaatcacgacaaggatagctaacgcgaattctgacatcatttacccctgtttactgattgacggtgcaatgatttaggcacaaccggatttcggtatggtttgactttatggatcgtgggttcttcctcaaccaaattaggaaattggttgttccattccatcgaaaacggataaggttgtgacttgaactcttcgatcacacagtttactaaacgaccaccaattacacccaaagccgccccaataatcgctatacgcataaatcaccccttaattgtgtcaagtacagtaaaccagtcatgaagccatatcgttgttcttaccgcgatatacgttaacaaactaatcaatgataccgctccgcaaatagccagcgtaatcaacagccggatttcaaatttagtaaaattcatatcaatctcctttcttagaacccaatataacaaaagccctcaaccgaagtcaagggctttgttttaaatttttaccagttttggtaatcgaagaactataccaggatggatcagacgtgcatccggaatagcatcacggttgattttggcgatatcaggccaatgttcaccaacaccatacagtttctttgctatagaatacaggctatcacccggttgcacgacatagcgatccgattcaatcttaaccagatcctggttaatgatatcttcaaaggcttttgcttttgcttcgttaatcgtgttcccgtagtaatggcgatccataatagttaatgtgatcatcgtttctttcctatactgttttcgtctgtctcttctaaggatggaggttcttccagccccagggcataacgtttagcatagattagcatcaatgcatctttagcgcaatcatgaattgaatcatgctgaatgaatccatctaacatgcctttacgtagtggacacgtggtcacaccgcgagtcagtaaacggttttcaatagctgtacgcacatcacggctattccagaatacggtcggcatatcttcgaacgtgtcaagtttccctgtcatagttcgtacaacgtcggttagcatagaacgatcgaattcagggccgcgcgtataatcgtatgactgccaacgactcacaccgtcagccgctaaatcagcaaagaattgtcgatgaccttcgtacaaatccatgtcaatatcagaagggaacaaaaccctttgcgcttctttagattgctgtttccaccattcgatcgttttttcatctttgatgcgttctggttgtttccggatgtcgaatttatactttcttcctttagcaatcagttcctgaaaggtaggcggatcataaggatcatcaacaaacggaacatagctaagttcagctagttttccttttggaaacgggccaatactttcataatcaaatacgaaatctacgggtaaatgactcattcgcgaccccgcttatacgattccatgaaataggccaatgatagcgcgacttccggagtaacatcaacggattcgatcatgcctggagttactgccatcatcccgaactgacgaagcccacaacgagcaatcgatttttccagtcggatcatgttttctacagcctctgtaaaattgtccagatgttcccaatcgtggtaatcttccattgtagaacgatcacttttcaaaatcagatcggcaaccaattcagcataaaggcgcggaaggtgaatattcatttaaaacccctcaagcatgtttttgttttcacgaatgttacgacccattttcaaggtatcaatgatcactgcatactcttcaaaagtgaattcgatatcttgtgaaatgtttccccatgtgtaggtcggcccgttaggacagtataacccaacttctttgtttgcgttgacaacgcagcgcaattttgcaaacagcaaattgatgtcgatagaattaaacccttcgagataatcaagcccctctctaccaatacggtcaacttctcgcaaaatcttttctacatctttgactttaacaataattttcataagaacctcaaagggccgaagcccttagacataatcaacagtgaatcgtgcgcgggtagttcctacataaagcaactgcttacacaattcataatcggcgtatgcgtatgcatcgcgcgtatacatgtatgaatgatcatacgtgcttccctgacctttgtgatacgtacaaaccggaagcgccttaactgtctggaacttgtttttgatttgccagaacgaataccagggggctttgtatccagtttcctgtttcatcttcttatactgaaacgcgacgtagttcaaataatcgcctaaacgttcctgcataaccggatccgcgataacctgaatatccgctttcgtatcctcgaacatcgattctgttttcatcaagaaataatcgatttgtaccggatcgcatcggtcagctttgatagtatcagaacgcggtatgatttcaaggattttaatttgctcgttgttgttatagataacttcaacaaacgaaaccccattcacacggccttctgtcactaacggttcttgcatcacaaccacttcaccaacaatgaacggctgatcagttttgtacaagtgtttgcggatcactgcgtttaacttgtctacgtttgcgttagtgtaagcaaacatacggttattattcaggtcatccggagtcttaacacggctaaaataacgtctcaggaagtcactagcgttttcgtgcttcattacccctagttcaccattcatgaggggcattaacggcttaccgtcgcgtatagcgcgtgatacctggatgattgggtttccttctgcctgacgcataatcttatccatgcgaatgacatcaaaaatttcctcatcaaagaacggtgaaagctcggtgatcccttctgtattaaccggacggatctgatccttatcacccaatcccaggatcaccgcacaactcggaatagtacgcttgatgatacggaatagttctttgtcaaccatcgatacttcttcaaccacaaacacacgacattcagacagatcagcggcttttttgcctttttgctgttcaaatactcgtaactcttcgttggttacggggctgattttcagtgctgagtgaatggtcgttgcatccatacccaccgcctcagagagaacgtttttagcctggtgtgtcggcgctgtcaaccagatcccactaatacccagttttttcaatgtttcaaacacaaattttaccagagtagttttaccaacacccggcccacctgtgatagtagtatggattttgtttctgatatttttaatcactcgatcatgtgcatttttctggtcttcgctcagatcgtcaaaagttaattcgctcatactttaatcaataccccttgaatacttgcgtgttcaataaaccaacgcatatctttctttttcttttcggttacggtttcaacttcttcctttcgaaagaatcggcgaagaccactttgtttaactggattcatcttatcatgatattctttgataatcgaatttttatactcgttagcatcgtccggagatagaaacaacaaaggtgttaactctccttccttaatgaagggaattttaaacccgtctttatccttactaacgacgatataatattttgtaatcattctcgcccctcataacaaacgtagaatattccaacaaaccaaaacactgatagtataatcagtaaaagttttctttcaacgccatttacgtgaaacacacaccaaccgaaaagatatgtgatcatcgcgcaaacaccataagaaagaaccccaacagctactagcgcgatgatcggatccattagtagttgttagcccaacggcggaggttttcggcttgtttcagtgcatacagtttgtagatagtttccgcatccatacccagcgccaggaatttgcacataaagaaatgccattgatcgataagttcaaacataacttctaaacgatcctcttcactcagatccgcaaatttagtattgcgcaattcctggtgatttgctttccacggtttccaaacaccggacgcaggtttaacaccgcgagacattccacccagagcggtatacaattcgcgggtttcatcggcgatcgcgtcgtcttgcagtttcagccaatcaaggatttctccgcaagtttccagattatccggacgcggaacccaatgcagggtatcagacaggctttgttgtgcatggttttgtaaatccagcatggattgtaaaggatcgccattacgggccagaaccttttgatattcggaatctacaaattccagatcttccgggttaaccaggtgcgcacatgaattaaatacaggagttttatcagtagtcatatcaatctcattttttcggtgatttgtcccacgacttaaatcgaagttttgccgtgagtccagaaacagtattatctttcaaatactgcataatttcaagtttagttgcgccgtccgtttttatcatttcgttgatatctttggaaggccacgggcatttatcccacattacaaccttttctccagcctcaatcaatttaaagaggcggtgagtagtatccggatgacgtgcttcattgtcaagaacccagacacgcatatttttatacggaacctcagaaagtgcaagctgtccaccagtgatagcgccagcattatcaacaaacaggctatctaacggcccctcaagaagataaaccgtttttagcggatctatcgtatcctgtccgtaaatcttggttgattcctcacaggctttgattgtgatatatttcgactttgcaccgtcacgtaaagcacggccctggaaagattctattttacctttcttatcgaagatagggatcactaatctcggttctggttttgcgatcggataggtatccggattcaccgtattaaccagttgttgccattcgcgagtaaaccacaaccgttcccacttgtcacggggaatacaacgattctgcacatattttatgatcggatgttcatccggcaaggtatctaacctttcgcagaattgaagagtaggaataaatttcttctcttcctttggtggttctgtatgtgttggctttaacgaattgcgatccttaaacgattccatgagataatcacggtaatcgtctggataatattctttcaggaatacgctaaacggtacaccataaccacagttaaaacaaccacaattcatatgatcaccctttttagaagggtagatccaaaatcgttttttgtacttgtctttcattgagtcgccgcaaatagggcaacgcgcattgatgcttaatgcccccgatttacgaacgatttcgctttgaggcaatgatcccattattcgggttgcaaattctatatcaagatacatttcttacctcagttgactatctttagatcctcgtcgattataccccgcgctgatcatttcgtcatgttctttttggcattcaatacaataacggcaacccttcacgataaccctacgtttttcgggtatcggatccccacaatcaaaacaatgcgttaatgattctccgtttctgatttgagaacgtgcaaaatctatcgcattgtctattgttgcctgaatggtatcttgaacaccgtcagcagggccaaatccaaccgccattgtaaatcctcctaatcaaatgatttcaatatcatagactaagaggatttttctgtcaagaacttacttgcttttctgttccgtcaagcattaacttccaaccacgaaatgcttgtttaaacgaataatttattgcaatatcaattttatcagaaccttttcgacgattctgataaacggtcgcgttgtcactcatatacatgatacaaattggaaaccatgtataatcgttagcagtagcccagatagtgatattcagcggaggaattatcatttctttttccttttccctgcacgggtaacgcctaatactttcggcccgatgttggttactgctccagtagtcacaccagaagcaatcttttctgtatcgccgccagaatcacccgcgaccatatcctctaacatgcgccccttatcataatattctttgaggcgtggaacgttcaacatgatttcttcatgctcttgttctgtcagattgtagcgattgcgtagggtatcatatgaactggttaagttcataaacccactcatatacggaacagcattcattctacgcttgatatggcgtactgaacgatgaaaaggagaatacgcttctaactcttcttttgttttggggttgcgaattacttcgccttgtccatcaaggatccccagcttgtaagcagtccattcagtccagggctttttgagtagccggatcatccggacgctatatgttaaatccatatttttaactaattgatcactcatgattattactctattgtgaaagtgaataaatcagatttggtttcaggttcaaactccatacaaacaacctcgcatagtggtttaacccctttccaatcctccaggtaatacccagtatctataccgcatccaggattcataacgaggccagtttcatcaagaaactttttgcatttacttgatgtggtgctgtcatcttgtcggaaacagtgtgttttcgaataccggaaatttgcagacatttgagggattatgaaagttccctgacgcgcgatctgtgatgcacgttcgattactttatactcaaattccgcccctgtatacttacccttaaaatcagatgttttgattttaccaaaaggcggattactgatcgccatatcaaacacctgattaaattcagttgttaaggcgtctccatgcacccaggaggcttctggtacgatacgcttacctaactcatagtatgtgtgatttaactcaacacagacgatttcgcgcggcgtattgtacatcatgtaatgaaccatagcgaaagataacccaccgataccagcacacaggtcaataacacttccacctgtgcaagcatcgattgtgaaatcgcgagcaagtccaataggggtaaagaacgcccctaattcagaattgtttgtaaacgcgccttcatgaaagttttcaataatgaacaacttctcttcgtaagttagcgctttgtcagagtgaaccagatccattatctgattgtgtttcttggtttccgctttcgttaactttgccattgtcccagctatacaataatgttgatttatttggatagaattcccatccgtctacatatccggtttcccaatcagtagtttgttcaaaaccacagatccattcatatacacccggaggcatttcgacagaatcaggaagccctatatcttccgcactgcgtccacattcaaagaatgcatcatgaatgaatggtcgagataataccgtaacataaccttcatcgtcaacagctacgatccagcgcgaactatgaggactatcgaacttcggttcttcttcgtccatatccgcttttatttcagccttacaaaaatcaatattcatttcaaaccctctttaacaccctctttcatagctttccaggtagaacccgcttcaccattcagggcggcgaatacaaatagtaagatagcaaggacaagattcacgccagcaatcaccatgattttgctatacacgaaaatgtaaggcattgccaccacccaccaactaaaagaattaccagttacgatgttgagtgctgcaagtaagaaagtgataacgaatgcgattttcataatgtcctcctttgttatgattaaggtatcatcttttgcgaaagaatgcaatacctacagatacaaaaaagcccctttcggggcttaatttttatgcgttattgatgagataccgaagaacgttttttgcttgttcctcattacaaccaactttgaaaccaggttcgatagggaggaagttccagaggaaatcaacacttccttcaacgtcatctttgcctttttccagcatcgctaacagtaaacctttgtttttgatgctgtttacgattgcgtcaaaataaccatcgctgaaatcaacattcgggttcagcatttcgttgtaagggttgttgaatacgttcattttgaatctcctttgtttaactcagtatcttgtctacgtgagttatattaccacaatggagattcaggtcaatacctttttacgattttttgaaaagtttttcgtatttggcttttacccagcgatacatatcttcggccttgtcactggcaatcagtgagaacagcagatagatcgcaacacccaccaacacaacgcctactacaatgtagacgggtaatagaactgggaagagaacccagaaccatgacatatgcgagaagccaaatactttagccgctgcaaaaatcagtgtcagtccagtcagaagtttgatagccggaatcggaatcgttatagtcttagtcatttcattaccttacattctttatggggctattcgccccagtcaattaaaattgaatgtcagattttgcaatctgcgccattttatcacgtcgggtggattcagcctgtttaatcatcgggccttgtgtctgttctactgttttaggcatagtgttgccgtggtagtcagatttaaacccgtattcgctgttgtcggtatccatccagcgctgattacccttgcgaacttccaacttgaacttgttgaaagtgttcttatcgccataacgggatttgatttgcttgaacagttgcataccctgatcagctaactcttccgtctcaatcacagctaacataaaatcagccgtagcaggtaaaccagcggattccgcaacatcacccatactcacatccgaactatcccatgcagaacgcccaacctgtgcgcctgtccacattacggtattagtttcaacagcaaggccgcgtagttcttcggcaattgctttaaccagaatataggtattctcagcacctttaacacgggttgaagtacagatccccaggtaatcgacaatgatcacatccggaacaaactgtttcttcaatttaagctctttcacaagcgctctaaagtggtttgcacctgcacccgatgtagggtactgcttgaccaccaaacgcccaaccttacctgctttaaggcgctccattttgttcttatagtctgcgtatgtaatgttcccttcgtcgatgtcatccatagtcacatcaagaaggttagcatcgatacgcttagagcaaacatgctctgccatttccatagaaatgtaaagaacgtttttaccctgttgcagataatcagccgcaagagaacataagcccagtgatttaccaacgttaacaccagccatgatgatattcagtgtaccacgttccgcgccgcctttggtgattgcgttcaggatcgggataccaaacggaattttcatcgcttttgattggtaaagcatccaccgtttttcataatcttcgaaatagtcatgacctactgaactatcgaatgaaattgctaatgcttcctccatgatttcagggatagccccaacaccaggaagtttcttgttctgttctgccagtggtttttctgcgttcgcctggatttcgattgcacgagaaagagcacgatacattgctttatctttgcaatatgtttccgtttccttcattagccaatctaaatcttctggcgcatttttcagcgactgaatcgcctttttcgtgtcttcgtagactacatcacttagatttcgtttgtcaagcgcaacctctaaagcagtttttgacggaatgccgttgaattcctgtacatgtttatcaatgaggtcaaacaaaacttgcgcattgccttcgaaatattcctttttcagatgaggccatgcttggacaaaatatgtcccgttataaatcaggttagaaaatattgtatcaacgatcattgtattgccttataccaggttgctgaacatcatgaaaaagttgtaaaccttttgtttgaatacatcccataatgtcagtttaggctttgggacaactgaacccttttcaagctctttaatctgtgcataaattgcatcatgcaccagtgggatcaatgcttctttgtcttcgtctggggtactgaattctactttcagaccatgatcccaaaacaccttatgaatataaaccagatgcgcaacacctttttcatcgttaatcagaagttcctgaataacatctttcatcgcttcatcaatataattctttgctttgctctcgatatccatacattgcctcggttatggggccgaagccccatagtttttataaaatttcgttgtcttcttcgatatcatcaaatgattctgggatatcgtcatcatccagatcaggatctggaatgctatcagtgctgtataaatcttccagcgcggaaccatcactgatttcacgatcagggatcttatacttttcttcgatagctttcaagaatggttgatgagtaaacagaggacgccagaattcaacgctatttgtttctgactcacgccatttcttttcttcaacttcgagttcgccagtctcggtattcaggaaagcacggttgcgccagcctttggttacggtctgtacaaagttcatttccattgccagatccagaaggccagaatacatactaataccgccttcataggtaacatgcagcgggaattttgatttctctttcacgaatcgagatttttcgatgttcatgatgaaatcataacccactacctcagtaccttctttcacctgttgtttacccaggatgatcgcagtatcagcggaatacattaaaccagtaccaccagaaataactttcttgctgtacatttcttgtgtgtcgtaggtatgacagatacaaaccatcgggatatccagatcagccagataaggcgtaaccatacggaacataccttttaatgcttttgctcgcgtcatatcctgtttatcgttatcagaaagcgcgtcagcaagttcttttttacttgcagtgttgcctactgagtcaacgaatacaatcaccttatcaccgcgttcaagcgcgttaagctggcttacaacgtcattacgcaactgctcgaccgtcgtgatacgagtatacacaacacgatccggatcaacacccattgatttcagataggatttagtaacacctttttctgaatcgtagaacaggcacacagcatcttcatacgttttgagataagccgctacagtcagcaaacctaagttggatttgaagtgtttggacgggccagcgaaaagggtaagaccagaagttaggccaccgttaaacgcaccggacaacgccagattcagaatcggcacacgggttcgcgtgatggtaatattgttgaatacgtcgctttcagaaagtacagatgcagtttggctattcgagtttttgatcagtttttttagtagtgctttgtttgacatttaatttttccgatttattcattctcattctatatatctcactagttaatgaaaggggccgaagcccctagagtttaccagtcaccgaacagatcgtttaaactggcacgtttttcataatcaattttacatacttccgtgatattagtcaatggactaataacatgtttttcaaacatacccggataatctacccatgccagaatatcactttcgatctctgacggtagtttatttccggattgccacgcgatgcaatcggcttgccacgggtttttatcccttagtggtagaaccattaccttttcaccttccatgattggtgtaacaccatcaataccagcagtgaaacggttaaagaacagcacccctttaatatggtttggtgttcccttgattggatagccagccccatcacgatatttcgaaatgttgttagcagatgatacaccagcaatttccctgtagtcaagttccttatattcttcttcgaactttttataatgttcgtgtaaagataattcaccttcttgcaggatacggcggatcgcttctttcaggaatactttcacagaggtcggagtactcgatcgctgtgtttccatacccatgattttcagtttcggtttttcatagcgggttccttcggagtcccacacgttagccgcatatcgttttttagcagtccagaaacttcccaacccttcggaacccaacggaggcccagaaatgatttcacgatccataaacatcaggtgttccacgttgttcatgtattcgcaaagttcacgataccctttatcgatcatcggttccattctttctttagcaaagcgatccaggaagtcaacccaatggttattatccttaaatttagcctcaccaccaacttttgcaatcacgttatccatgcaaacataaatggagtcagtgtcacagtaccgaacatatgcatgatccgtagtaccgcacaggtcgttaaggtattcgtttaccttacgttcaatccactggatagccaactgcccgaacatggtgatcgcgctggcgtttcgtagatcgaagtatcggaagtgttcgttacccaacgcaccataaagggagttgatagaaatcttacggttaagctgtgctgtgttcgcttgtgcgatcttcttctcacacacgcgcttaactgctttaagcatttgttttgtaagagttttcagaactgctttcgattcatcactgaaatctgtatagaaatcaaagtcaggatcaaccatttggttatgtgcgtctgttaagtgttcgagttcgtgcttgatgagttcaagatttcgctcacccgccatcattcgttttttccacatcttacgctgatcaaatactttcttgatctctacggggatcacgcctttgatatcacggcggaacatccacccgttaggagaacagctaaattcatcgctag

SEQ ID NO: 15 - DNA, 168572 bp, Unknown
  bacteriophage strain capable of infecting bacteria of the genus Klebsiella
tttcattccttcgggttcagacaaaatgaaaatcgctgagcaacgaatttcagaagttgctgacgttattgctcaagctaaaaatcctgcatctatggaaacgatgcgtaaaatcgttgaagtagctactcgtggatttgatatgcctccagctgacgatttcggagctttacgtcaataccaaaatcttgtcaattatatgatatccgcttatgtgtcaatcgttggcgattctatatccaaagcaattgaatataaccgtgaaatgcattctcgtttaagcgaagaagaaagagatgcaatacatcattactgcggttctggctattcatttgttaataactatcttattggtatggaaagcttaggcgatccgattattgacaagaaaattcgtccgctcgattctgcctttgaaaaaggtttgcgtcttgaaccaggcactcttttgtatcgtggtcagcgaggaaaatatgaagactttaaagataacatcgagtctaaaatgttttatttccagaactatgtttctacttcgttaagtccaattatctttggcgcttattcaaatgctggtgattcattaatgccagacgcacctagttctgatttagaaaacaaagaaacaactatcgatgcagtatcttctgttattggaacagacaacttggaaagagttgatagaggcgaggaagttgcctatggtgatgagtttaagtttgggttcgttattcatggggctgataaagttaaggtagttatcccgggtgtcttatcaagttttagtgatgaggctgaagttattcttcctcgcgggttggcaatgaaagtcaacaaagtatggggaactccttttagaaatggagttggtgtagcgaataacaagacattcatggtagaaatgacggtagttccgccagagcaaatcgatgaatcggttcatctctatgatggtgacatcttgatggaacaaggcaaagtggaacctcttgaagaaagcaagttcaaaggctttttaaatgagatttacttttcgccagaccgttctacagataaggttagctacacacgtaccatggagctactggctggtgctatcaacctggatggtatcccagaaaaacttgcataaagttgtttacttatcacaaggacgtgatactatagacttacacaaaccaatgaggaaattgatatgaaacatgtattccgctttaatggtattgaatggtctgctgatgttaaagatgcagagaagtttaacgaagaagtgcttatcatgcttgaagggtttaacgaaggtactccaacagttcttatccaagatatcttccgtaagccaacagagccatcgtttgtagaagccgttcttaacggaaaagcagaaggtatcattcccgttaaagtagtttggactactaaagaaatgaaacttcttcgtactgagccagggtttattggctgcattgcataaaacaaaggggccttacggcccctaaattattctgcttgttgaagtagtgatattagaaattccaccacctgccccgcctaaacgagacaatcttgaagcagacgcactcaagccctgatttggattaatcgtctcaattttctgaatagttttatcttctaaccaatccattgcggcttgttttccaactgaacctgtttgcatgctacggtaagcaaacgtgacatcaaacacagctattgtgttttctccatcatatgtaaattcgggagctccacatgctacaggcatagcccccgagaacaagcatacagtatgtggtaatccatttctagcatgaaggttaacttggatatcacattctacgtcttgcggcaatcctcgcagaccagtcactgggtcttcaacagcatttacccaatcttgcattgcccggtagttgcttgcttctgggtccatcctaaatgaaagaaccagcggttccatatctcttccagtgatttttatgttaggagcgttatggaacttatccatttcatatgacagtctattctctggtattttagcagaatacaccatcaagcctgctgtcggaaatgccatgttaaagaaatcaagcagataagtacctactgtgaattcacctaacaacgactgtacaacacgctgtgtcattgcgccaatcataaatgtattcacacctgatttgcgaacaacctgtcgagttccttgcgtcactatagttgttataccctgattgaattcacctggggtcaatccaagccaatttccatctaaacccatattattatacagctctccaccaaagtcgtttagaagagcctgggttttactagagggtacagtagcgaatacaacagagaacatattagttctctggaaatcgatgtcagcagcttgactcttaaattcttcgagagtaaacattattcaatacctccgatataaacgttccctctattaagagtaagtatttcacgcatagtaatttcaagcgtaaatgtgcttggaaggttaggagcgattgctaacccgttaaaatgaccgttcggcgttttatcaaaacggatactctgaatttggcatggaccaaatatatcctctctaccatccattgatgtagaatatccaaaattacgaacagtccaaatcgttgggttagaaactacaataacattgcttaaaaacgatgttatttgctcaaacactgtgttttctactttagccccatctggagctgcggatttaagagttcctttataccattcatcaatagcagctttaacttcttttgcgtatgatgaatttccagtcacaccgtaagaatagtagttaaaaatttcatagatgcgaataatttgtatgaggtcatctgcagacctaggagttaaatcccaagtaaacactttcgttctattatcaggtccggcatacatactacgagcagtgttataaatttgttcaccattatcggccattaatccctgcgttaaagactctatcgacccaaacaccgcagtagaagccacgttgcttaatacaccagtagcagtaccgccgccgcgagtaacaagagaatcaccaacatcattaaatttatggctaactgaatcaacgtctgacttagaccgcggtaatagaatattagctactggtgcagtactagtggtagagcttgatgaattagccaatgctgacattggtgaatcgaatacagacgataacattacatctcgtctaaatgaacgcaaatcaggagtagttcttcctttaaaatcatatgctgtgaataataacccgttgcgatataagtcatgtactctcatatcttgggcggaatcattcccagctgaacgttcagctgggaactgcgccaccttagtggttggcgcattcgtcagtttagatttaccttgggaaattcgagttcctgattttttgatgttttcaaggccatcggccagttcttcaaaaatcattgtttttccttaagaggttttcatagcgccttgcattccaggagcagctgttgaagtctgtggaggcgttctataaacgtatgtgctattcttatttacagcagtattaacctggataggttgtgactgtgtattagattcacgtgtacgagcagcttcacgactatccgcggcggctttaatagaagcagactgtttaacctcaggttgttctgttgcaggtatagcttcggcagttggagcaggttctgatattttagaatcaagaagcttttgcaattggtctaattcaacctttaaatcttttgcaacttctggagataatttctccaattctttatatctggtggttgtgctttgtactgcatccttagcagagtctaatcgagtggaatcagatgcgtcagttttttcaacgtacgcttttgttcgcttgagttctgcttcagcattattacgagctgtgatgattttgaggcgttcgtcttctggcaagtctgcatacgctgactgctttttctctccgctcagcaatttattatattcatcgtcatcaatctgaccggtgaatttttggaacttagcagaaagctttcttttccattcaggtttttcatcgtactctctttcctgacggtcaacatattttgctctcattttagcatcttcttcatcgagttctgctccagtaacagtttgaaatctgtctaaagcagcaccttcaatgttatctgccgaatcgttaaatcctaatgcgcgcaacattccagcaagaagcttactcattccgagcataatagtttctccgagcttgtcaattacatcaaccaagccagaaccaatggctttagctaatccgccccaatcccctttgacgaatgattttactatttcattcgacatctcgcttattgctgttaatagcggaccccattctttggcttgcttgttaaattcaacaaagttcttttcgaacagtttagtccaataattaaaatgaactttaattaaatctataagcattatcacgcccaaaaccatcgcggcagttttcgccatttgggccaaagcgctaacagtatagctaaacaacatgctgctaattttatctgttaatgaaatagtttttccaaaaccagatttaacgcttttaattaattctccaaattttaggtcaagaaactttttattcttgtcctcggtttctttgctaggttcttttctttcctcttgctcttctgtgttaggaaagaaatccgcatcaggacgtctatcatcctgtggaggaataagcctttcgagtaattcctctaatggctgctgaacaggagcatccgggacttgttctgttattgtttctaacgatgttccagtaccagtcttttggacatcttgctgaacatcatgctttttagataacaagtcggcaagtttcgtgagcttatcattaattaacgatgcggtatcatttagtttcgagacagcatctgttgtgcgttctgaagcttcagcagttaattcaacaccagctgaaacatcttctactgatttgataatttcgtttgatttagtttctattacatccgaaatcaaatcagtagacgcttgttggtcgtctaagcgacgaccaatatcttctagcgtattaatctgagcatcagcttgagactcagcctttttctgtggagccgagtcagcaataactcttctacgcattgaattcatttctgatttcttagtcattcaaatatttccattacgttaagcatgcctttgattggtccttcaggtccatcaatggctatagtgtttactaagtcatcagcccactttgtcacaaaagctggaagcttcataaagtttatatccattggttttccatctactgattcaagaaattcgctcaaaattgaatctactgaacctagtttggaataacgaggaggagctctgaatttgaattctttaccatctaaccgttgagttaatcgctggcaaatgtaaactttattcaaatcgtaggtaaaatcatctttaacaaccgtttcttttattcggttgttaaatgctaataaatgcagtacaacgatatcggattcggctgctgttaatcctgggcaaattgaatctaaaagaagattcatgttttcatctggacccttaacatctttcatcagattatggtgctttaatccaagttttggaattgatatcgtcttttcgtttattactattttcttaataggaagaatcacgtttaagttcatttttcaccttaatcaaatccacaggttcaagggcagagccgtttgtgaacatatataagttagttatagatgtgttatttgatatttcatggataacttcatctatataaaagtcagttctgaactggtcctttaaatcaacaaaattgattttcattccaggagttagttcaaaattaccgtaacatttagtttgagcatacccgtcatattgagccatcgtagaaatgcgtagtgcttcttcatagccatttctaaaaatcatgtcagaatatccgcctgacctattaatgaatacgctgttttggccttctccattaataattcgggtaacatctttgtccacaaatgagtgtgcataaaatgttgcgtttttcatgggatttctattatatctatttgatttaacaagccattcaaaatcccatgccaatggatattttaatcctgctgcaaactgacctattgtttgaggagctccaaacatgaatacatttgggtcctgggatatcattgattcataatccatcatgttaatcccagtgatatcttcccacgcaaaaataaattgatcgttgtctgtggaaatgcctacgtttctaacgtatcgtaagtaatcttttagagtactagtccatggaactcgtgggacgtaggcgttgattccgttgataggaggagcaatcaatggttggtcaacatacatcgcgcctatcatttcctttatagtttcatacgcagaactaaaaaacgctctactgaacttgagattcattatgtcatgcagcgttccaagctgaagggtgataatgctatcgcctttatcatcaacaccgactgtaaagtgtttaattccgtaaattcgagtttgtgttcttgatgtgttactgtttgcaacagatatttgaactagttcatcaccgttcatacgcgtatgcatattttttgagtcataaaactgaagtaggccttcgttagtcccgcgtaatgaatctctcattgttaatgtaataaatgtagctgctaattcaacgaatctattagctagccacgcatcatatccagaatataattttatgcttatattaggatatcctaatctttgtgctgtcatgatttaaggtccttttcaataagcgataaggttatgccacgttcgataggcagcattttcattatagaattcaaatcgtatttaccctgagaaaccaatctatggttaatctgataaaatgtgaaaatctcgtcaggatgtagcaatagcttaaagatatcaacaatgttatcatattttaatactgtcgtggtatcacagcatgacgtctttagctcaaagttaaacggcttcatctgcgataaaatcttttccaaggtttcaacatctatagcatcgataactgtcaatttattactatcgcttaattcattccactggtattccccagatgaatccttcacagatataatgttgtctaaaatcattttacctgtatcgtcaattatttctatgggttttttgaaattgagcgttaatccagcaacctctacttttggatttaccaatggaggctgattaagattaaaaagatactgcttatattttccgcattttgggcacttcattctgactggtattttagttttaccaatacttgaaagaaataccttaagaaatatataaggacgatactcagcaggatggtcatgaaaataatcatccattaattctgctataagttgtttttgttcttcttcagacttggtgttcatgtcgtttctaaccaataaaaggtctctataatcttctactgtaaatggcttaaaacgttggacaccatctggtaattcgcatctaactatattggccataaggtaatcctctttatactatttataaatatttgaataagaggagtggatatgaacatcacatacaaatttgaaacaagaataaatggcaagaatatccagtgccgagcttttacactagaagaatacgctaatttaattgcagcgaagaaaaacggcacaatcgatgaatgcattaaatcattgctcagagaatgcactaatgccaccggattaaacaaacaggagtcggaattacttatagttatactctgggcccatagtattggcgaggttaatcacgaggtgacctggaattgcacctgcgggcgtaaaattcctgtgccattaaattatacacacgcgcaaatcgatcctccagaagacctctggtatgacttaaagggattcaagataaagttcaagtatcctaatctttttgacgattccgacattccaatgatgatatcaaaatgcatagattatatcgtagttggaaatgagcagatttactttaatgatttaaacgatgcagaaatcgatgatttatattctgctattacaaccgaagatgtagttaacatcaaaaatatgctattgaagccacaggttcaattagcagttcccattacttgtgaatgcggaatttctcacattcatgtaattaaggggcttaaagaattctttaagattatgtcatgagcaatattgataaactatattctgaccttgacccagaaatgcgacttgcttgggatagcgatgtgtcaaaaacagtaggagctcgatcggttaaaaatagccttcttggaataataaccaccagaaaggggtctcggccatttgacccagcgtttggttgtgatatcacaaacgaattatttgaaaacatgactccattaactggtgatacgataaagcgtaatatagtctctgctgtgcgtaattatgagcctaggattaatcgtctatcggttgatgtacttccgttatatgacgataatgctataattgtcactgtgcagttttctatagtagacgaccctgatacgctagagcgtatacgcatacagatgcgtagtaatgctaactctggcggcagagtataatgggactagtccttcccaagaaacagtagagtggagatagaatgagattagaagaattacaagatgaattagataatgatttgattatcgaccagaccaagttacagtatgaagcggctaataaccctgttctgtacgggaaatgggtgcgtaagcactcgacttgtcgaaaagaaatgctaagattagatgctcttaaaaagcaaaatcttaaagcacgattggattattacactggccgtggagaggttggtggcgaagtatgcatggatgtatatgaaaaatcagaaatgaaaactgttttaagcgctgataaagaaatcttgggtgtagatactaaattgcaatattggggaattcttttggagttctgtagcgatgcaatggatgctatcaagtcacgaggttttagcattaagcatattattgaccttcgtcagtttgaagctggcgcgtaataaataaacttgtaaactaaggagacaatcatgtcgaatacggtatgtgtcgtctgtaaaggaccaatcgatgaagcattggttgtccaaacagacaaaggcccggttcatcccggagcttgctataattatgcgattgaattgcctgtcactgaagacacagaagagcaattacaagaaacgcaacttttaatttagtctagtgttgatgtagccaattggctttgccccttcctttcggttggggcttttttatatcagaagtcttcgtcgtcttcatcatcagaatcagcttcaagagcttgtctacgccccgccaaagcatcacgcacaatgatatcatcagaatcagcaagagtagtttctttagagcgtttatcgtaatacttctcgagttcttccagaccatctaaggtctggcaagcattaattttactcatgaagttatcgatagtagcctcacgaattgtggcttcgtaaatatcttcaaatttaatcatagatttaccgttttcattacgtagttaaatttttcatcagcatatcgttgaatacgctctaatgcatgttttaagcaatagtttaaatgtgtgtatttctttttagcattggctgacttcggctttacacccaggtcatcaatgatatcccacactgtagccaaagatttatctttatgcttacgaagaacacgaccaatagtttggagcacgataatcttcgatttaactggatgggctaaaattacatgatgcaggtttttaacggaaatacctgtagaaaatacaccgtaacttgcgacgataataattccctttccgttttctgccatagcctttaaagcattacgtgtttcggtattaacttcacctgatacataatagacatgctcatgaccagcagctttaatcatctcgaatagctctttaccatgagctacatgtttaaacatcacaaaggcattttcgtcgcgcgctgcaagtttagtagcaagattagcaatccaacgatttcttttcttaacattggtgatgaatttaatttcttcttgatacgtttttccttttaaagcgtttgcagctgcatccgggtatcttaagaagattgtattaattttaagctcagttacttgtccgtcttccattaatttggaagttgatactggacggaagatttcaccaaacataccaacatattgcatgatattagctttgccatctttaagagaaccagacagtccgtacttaaacatgcaatttgtaagacctgcaatgattgttgaaattgactttcctgttgcaagatggcattcatcattcatcatcatgccgaattgagaaaaccattctttaggctgcttaacagcggtctgccatgtagatacataaactaatgcgttggaatcacgagcagtaccacctcgaatacccagcatagcactacgaggaaataaacgataatcacaaaaatcatcaatcatctgatcgactaatgcagttgtaggaacgatgataagaattttgccttcgtaattttctacataatatcgagcaagtaatgcctggataagagatttaccagcagacgttggaagattaagaattctacgtcgattaactagaccttcatatacagcatctttctgataccagtgtggctcaatcttagttaatcctgaataaatttctttcgtcgataaccaattgtcaaaatcctcccgtgaaagagtttcttgctcgaatatagctggatcgaaataaaccttatatccgaattggtcagcgaattttctaatttggccaacaagaccaaacggtaagagacgattataatctagcagacgaattcgtccatcccaatgtccatagcggtatttcgggttgaatctgtatccatcggcttcgaagctaaaatagtctctgagttcatagaaaatcgagtcatcacactcaatatgaacatgactaaaatctttaaatttgacttggatgtcgtgcactgtactatcctcagtttataaatacaatcatatttatacattacatgaggcacacccaatgctagataaagactatattaaagaaattcaggcactcgataaaaaagaagctaaagataagctcgacgagtatgcccaaactttcggtattaaactgaaaaagacccgttcatttgacaatatggttgctgacttagaaaaagaactggctaaattggccgatgagcctatgccagaagataacgatgggctgtcaattgctgatttaatccaagcagatgatgaaattgagggtaaagcagtatttaaaaatgaagcgtctgatgaggcaaaactgctgtttgacgctccggttaatgctggtattaaaattcacgatattgacccaggtttttataaagaaacccctaaggtaaatgacccggggtttgaagtaaaaacaccttctatcaatgataaaggattttatgctgaagctcctattggagacagcgttattcatatagatgatgaagggcaagttactaacattccagttagtatcacggaccctgaagaattctccaaagcaatggacaaagtagttaaaattattaaaaccgatgaaatcattgagcttcctgaaaactttagtccaaacatgcaattgctaggtaagaacccaggatatatcacccttccatggtggatttaccaatggattaaagataccccagattggaaatctcggccaacgtcgtttgaacacccatcagcacaccagacactgtttagtttaatttattacatcaaaagaaacgggtctgttatgattcgtgaaacacgtaattcttcatttgtaactttaaaataaggaacacctatggcttatagcgtatctattgctcctttggctgcttcggcagtcattggagcaacaaccaattttactgcaacaacttctggcgccgcagttgaaggcacagaaacgtttgtatggacagtaaatggcgtaaaacaatcttctgtcaccgcagctatgaattatgttgctgcaggtcctgcaggtagtaagactgttaaagtagttgctactgttactccagcagatggtgaggcagaaactgctgaggcagaaacaactctgactgttcagaacaaaactatgcctgcaattactttaactttgagcccgacttctgtttctaaagaaattggtcaatcccaagtagtcacagctgatgttactggcgcaccgtcaggagcaagcattgcttatgtttggaaacgtggctcttctgttatttccggtcaaaccggtaaaacaattaccttaactgaatcaacggaaaccagctacacactgaattgtgaagtgacggtttctgctccagactataataatggaactgcaactaaaggtattgctgttgcttttactaaaaagaccatgggagctgtttctgttactctgacgcctagttcaattaccgctgaaaaaggagcagaagcatcttttaaagccgatgttactggagcgccagcgggagcatctgtagcttactcatggaccaaagacggttctcctgtagaaggctcaacaagtacgctagaaattgatacatctactatcgggtcgcaggtaattgaggtttcggctgttgtttctgctccagattataaacctgtcacagttactaaaaccggtaatgtaacgattaccaaaaagaccatgagcggggtttcagttactttgactcctgagtctattacgaccgagcagggttctgaggcgtcttttaaagccaatgttatcggtgctcctgaaggtgcaactggggtttattcttggactaaagacggttctcctgttgaaggttctactagcactttagtgattgatacgtctgatatagggtcccaagtgattggtgtttctgttgaggtttcagcagatgattacaccccgatcacggtcactacaactggcgatgtaactattaccaaaagagtagcccctgagccagacggagaacttccatatattcatcctctaccgttccgtggaacagcctatatctggtgtggatggtgggtaatggatgaaatccagcgaatgactgttgagggcaaagattggaaactcgacgaccctgacagtgattattacctgcatcggtatactctggctaaaatgctagatgattatccagaagtcgatgtacaagaatctagaaatggatacattgttcatcgtactgcgctggaagcaggtattatctatccgtaatattcgggagccttcgggctccctttttgctattcacggattggtttattatgtcctcgtcacatagatgaggttattatgaaagcattacaagctcacttgatgcatgaaagcggaaaggattttcaagaaattgcaagggcgttagatatcactccagccgaagctgctaagctgtgggtctctgttgagaaagcacatgagcggtttaaacaaaaagagaaagttgtatatcgaaaacgcttaacaaacgttgatataaaatctcgtcataagaaacttgttaaacacatgaggactttataatgtctaaagtagataaaaaggtagaagagaaatttgagatgttcctagagcgcaagtttgctcctgcggcgagcaatattaattattggcgttctgcatcaagatttgttgataatatgatgactcgaatattcgataacacttattataaaaatggcgctcgcaaaatctcggatttgattaaagaacggtatggaaaaattgattggatgctaatggatgtaaacgttccattagtattagaagttggacctaaaaaccagtttgaaatcatgcgaaataaacatgacaaattaatgtatcgctttgttccaagcggatattaattgctttaaaaatcgatgtggtataatgggctcaggggaaatcctctgataccattacccttgtccaaaatagatggactcctggttttattttatttattgagagaaaaattatgaaccttgccgatagaatggctaatactgctattaacgtagccacagaagaattatcagcagcaaaagaagaagtattaactcagattgagaaaaccgctttagcgggtaagcgtgagctaattatgtatccgagtagtctagttaagaaacacattacaagtgttcttaattatttgcatgatgaaggatttgttacaaattataccagttcccagcgtaacggtgatactgactttatgaaaatcacattctaaggaaattataatgtttgcaaaatattctagtctcgagaatcattacaacggtaagttcatcgagaagattcgcggtgctggttttgatatgcatactgttgagtgggtggctcgtgagaagattcatggcactaacttcagtgtgattattactcctaccgaaatcgttccggctaagcgtactggacctattttagaaggtgaaagtttctttggtcatgagattatcatgaagaagtacaagaattctttcgctaaaatgcagaacatgctaaatgccatggatttagtatctgttcaaatctttggcgaatttgctggcggcggtattcagaaaggcgtagattatggtgagaaagatttctacgtgtttgatatcctgtcggactccggtaatgaaaaagtttattgggacgactacgtagtagaatcgtttgctactggtcttggtcttaaattagctccactgcttggtcgcgggtcttttgctgagctatctcagtatgtaaatgactttaaatctattgtcaattactataatgaacttgttaacacgactgaccttgaacatgcaaataaacacgtgttcggtccgcaggcttcttctgaaaccggcgtagctgaaggttatgttcttaaaccagttcatcctaaattcttcaataatggtacccgtgtagctattaagtgcaagaattctaagttcagcgagaaagctaaatctgataagcctattaaagctaaggttgaactcaccgagaatgataagcgtgttctggaaatcttttctgagtatgtaacctggaaccgtgtaagtaacgttctgtctcatattggtactgtaactgctaaagattttggtcgagtgatgggactgactatgaaagatatcattaacgaagcagcacgtgaaggtcatgacatgctattcgctgataatccttctgctgttaagaaagaaatcactactttaattcaaaacactattcgtagtaaatggcatgaggttttagaataatgagattggcgcttattggttcacgagaagcgccacgcagagttctgagtctaatgactacaataggtcaacgcctctcggaagaggggcatttttcatattcaggtggagctccgggttcagatgaagcgtggttggcgaaatacgataggtcaaattcttgtaggattattccttattctggcttttgtggccatgttcctggtacaggtgttgttgtatggtctgaattatcaaacgaagccaaaatcaaaagcatcattaaggcgagagaagttacgtcgtactgggatgaatgctcgaagatagtgcagactttattcgcacggaattctatgcaggtattgggcctagaatgcactgagcctgtagataaggtattatattgggcgcctgagaaaagatgcgggagtgtatctggagggacgagagtagctgttgatatagcccgcaggcatgggatagaatgcgttaatctatacgataagaaagtgtttaattccctcgaggaggaatactccccgaggtttgacatatttagcttttaggctggatagaatttaatccatttttctctatcatcatggatttcatatctagcatttggaaatccattttgtttaaggaaatctattacaatattagcagctttttctacaacttcatattctgaaattacaggagttatatcaaatttagctataacctcatcatatgatgtagcactttcagaggttaatatccaactatatactatttctttagctgatagtgcaaaccagctaatagcaagatatgacgccctgtattctaatgatttcacaggttcaaatttaagctcagaagaatttaattctacgttatttgaaatggtttcagatatgtcaaatagaggatctgaaacttctgataaattaattggatctggattgtttattcctgtgattaatagatagcctttatatttcatatctatatcaactgcggacgattttctataactagttacatctagccatcccgggttaaatcctgagtcttttaaccaaccaactatacatgaacctaagaattctgctggatttggataactatctactatatattcaaatttccactctgatgttccaatttcaaactttcctattgctgcaaattcaataaaatcaagaacagtttggtataatttagtatcatttgaatttggattatattttgaaccacctggtttatattcagcgaatacttcatttagcgtatctaattttgttacgccatgttgtttagaatacataacatcactgaataatctagtatcaggtttaacattaaaaattaaattatacatttattctccaattaaagaaaagggggagcccgaaggctcccataaattagtccgcaatcagcttaggtaacttaacaccgagcataacagacatctgacttcttcctgccatcttatccatatccgcagcattaatcacacgagcttcgtcctcgtccaatcctacagtatatgggttaaccgacagcgcgtaacgaaccagtaaagctacagaaggctgcaagctagctgggtcaacaataactttaaatgcaccaacatgctcagggtcgtctaaatcaagaccttcggtatacggcgcatagaataatgaacctacagtttccttcccaccaaattctgccttaacaccaacaataacgtaatcaatcggactgttagtatcacaatacagtggaaggccgttattcagaatgccatatgcgttttctggaatagtcccatcgttcttctgcattaaccaaccagaagctgccagtaccgctgcgcaacgagtagatgctactgcataggtaccagaataagaagtattacgttgaactgctgaattcatttcacaaatgaaacgatacagagtacgaccttgttccggggcagaatcctgcttagttaaatctaatacacctttatcggatacaccagttactttaaaccgagaagaaaccgtaatcaacgattgcaggatgtctttattaatgtcttctgccatttcagtagcaagtaaatcatcaataagctctggagcatcgaacccgttagcttctaagtcttgagctaattctacagttaaatccgttttaagcttacgcgatttaacagctgtttgccatttatcaattttaaaactggcttcggtgattgggtctgaatcaggtccttcgaatttttcagtgactgcagcatctgacatcatacgaatattattagctgctactgcttcagatacaattccaaattcgtcggtttctgctgtatcggtaaacggggcatctttaagtactttaaagaccacattctgatatttgaacatatcgtctttattgaatgagtctttattcgccatagtgagttcttcaattgactcacgttctgtggcgccgatttgacctgcataggttgcacctgttgcaaatgtcaaatcaccatttgggttaagatatttaatgccatataacgctgctacaggctgtttagtacgctgtgtagcaacgaggtcagtatagattaatttagtggttgcgcgcgttaatgcaacgagattagggcgaccaattaagttgctactcgttgtagttgactcgcgcagaagttcgttgattttagccattgcgctttcctctgtggatttataagtttatttatatccattaaaacaactaaagggagcccgaaggctcccttattggtattagatacctttaacccatacacgacggaagtaagcattcttaccaacagagttgacgatagaaggcataccagaggtaatacgacctttcggctgttgagcagcagaatcggcgaacgggttaataccgataccgtaacgggttttgaaccccatgaccggttggaagttcttcggatcggaaccacgcagcggggtcagtgcaacatacggagcatagtagataccagcatccatttcgttagcacctttataaccgatggtgaagtaatcctgacgagcatactggtcgatgtatacacggtagcgaccacccagaacaccagcaaatactgctttagtggtgtcggtgttataaccacgacccagaccctgagctgccggagatacgttggtatcaacagctgccagtacgttaactacgttacgggaagcgataatgaagttaccttcaccgcgaccggtctgacgagcgatttcagcggattctttgtcaatctggaacagcagagctttaaagctttcacctgcccaacgagcaccgcggatatcaatcgggtcttggaagtcgaatacaccggctttagaaccaacagtctgggtcataccagatttaccaacctgagcggagtagttaatccaatcaacaacttcacggttgatttccagcataatttcggtagccaggattgaactcagttcagcatcagcgtccataccgtgaacagcacggaggtcctgagccagctcgatggaatactgtgctttcagctgacgagatttcgcttcgatggtttgtttatcgatacggaagcccatttcattccacgggttatctttcgaaccgttaaaggcttcttgcagttcagcaacggaagtagccataccttcggcgatttctacaactttaccagcttccagagcggcagtaactgcagcgtccagtttagcagcatcggtagcaccagcgtctacagtgaaatcttcaacaacctgcagatgagcacgaccggtctgtgcgaaatcgtgaacaacgatatcaccaacagtcagagcatcaccagctttaactgcttcaaacttctcggttgcaccctgaccagagaacattgcatccggagcgtacatcggatggaaagcttctttagcaccagcagccagcgggtctttgccgtaaacagcgcggagcgcgaatacctgaccagttgggttggacatcggctgtacaccacagatatcgaaagcaatcaggttagggatagcacgacgaaccatacccataactgccgggccaatctgggttacagcaccagaggtctgaccagctgcgatgttctgtgcatcataaccgtggtcaccgccaatttctgcttcagacaggaaagaaccaaatgcttcagcgattttttcatcgcggtattccggagcctgattaatatcagcttcctggttttcaaaaatcttagcgatcagagcttttttgctagcgccaacaatttccggcagagcttcgttctcaagcagcggctgccatttttcgataagtttattctttttcatgtgttgtataaccttttaaattaagaaagacgagccgcttgggccacataagcatccataacggatggggttttagtcgcaggagtttcttcgactgcttcagttgtgaagtttaaaccgtctgcttctttgtcgatagtatttatatcggcagattccgttacagactgctctacagaaccctgcaccatttcaacaatagctttcagcttagttgaaaacgagtcagaataatccataccctctgtcagagaaactactttctctttttgagtatcagtcaattcacgggttgcttcttgaatagcatactcgcgttgggcgtaattgatataagcatcacgcttagaaacttcttcaaataaacgagcagtttcttctttttgctcagcaagttcttcttccatctcagctactacgtctactgattcttcaggaattacaacgttgtgctcaacaaacagctctttcataccgacaaacatggattcaaacaggtcagctttaataccgcggtcaaccgccagctggttttctgccatccattctgcagcgatatggtcaaagtatttagaagcagcttctttcagctcttcgcgagcttcttctttagctttttctttttcttcttctactttttcttctgctttctcagcaatcttttcaatgtgagattctgccagagctacggcgtgttttttgactgttgcttcgaatacagtgctgaagttagctttagcttccggagaaagctgaactgattcgaaaatactgtcaagagcgacggaagcatcgatagttttagcttcggtcattaaaagttctttaagcatttttgatgtcctgtgttaagttacataattatttataacgcttttaacttctctgcgagagccataaaagcatcatcagcactattggcaacttgtgccgaggtattttccgaaatttgtttcggttgtacccatgcatccggagcactaggaccccaaactgcgtctacaccaacagtcaggcgaaagccttcttgtacgatgttatatccttttcctgagtctttcaaagaaccaagtccacgacttgatacaccaggaatccaaccagcacgaatgttagcggctaatttatcacctggaccatggtctccttcgatgattcttgctcgcccataaacatcgttgcctttccaccacatatcttcaataatgattgcggcttgcatcgggtcaacatttgcacgaggtggatggtttaattctcctagagcctgacgagtagcaacctgttccttaatataacggcttaccgcagtctcaagaatgcgttttggataaagacgtttattacggtttactacttctgcctgcataaaaacaccttcgatatacagaccaggttttaagccagattcattttcgccttcaacgataatagattccagcatgggtttaccatcaattacatcgcccggttgaccccaatgctcaattaaaagttgttcattgaggttttccattaacttagccccagagcctgacggcgtttaagtgctttcttacgtttacgtaatccacgaatttgagccgatggattagcacgttttgattttactgctttacgcgcgatttggcggcgtttagctttagaaagtccggttgtttgaaacgcgttacgctcacgtgttttacgatctttggtacgggtaatagtacctttagaatcaacgtgcttaacgataaattcgtttaattgtagagattcgttaattgaacctaaagcaattgctaaatcaggctcagaagtaaccatgttctctacaattttatttatatcatctttagaaagcgctgcggacaacttatcaaaacgtgcctgtgcttcaggaagaaaagcttcgacagcgtcgataactaattcatgattttcaggcagtataagcattactcgtcctcttcgtcgtcttcgtctttatcagacttatcttcatcttcgtcgtcatcatcttcgtcctcatcgggctcttcaccctcaatcatgacagacgctgcgataaattttttgcgctcttcaattaaaccagatgtccgttcagccataattgcaccaaaagcttttttggctgctacgaggtctctggattcaattgcggaaatataattttccattagaaatcctcttcattttcttggtcttggaagcgagcctctttagactctaattcaatttgcttggcttcttgttcaatttcttcatctgacatctgaaggaaatctttcattgctgtcttatgagaaatatacttgccgataaacggttcagccattgtgagcatattgattctacgctccataacttcagcatctttcagctcggtgaaatatgaatctttatggaacacaatcttaatattatttatttcgtcttcccactcatctttagacaaaacctttttaagaattagattagtgcgaagtggatcaagcataatctcttcgaatttatgctgtaatctacgaataaatttagcaaaatcaagctcatcacgagtaattgttgtgccagcatcaaactgcacaccaccttgattatttgcatctggcatgcgcgaaagaggaactcgcaatgccatgtataacgctgttctaaagtaacggacgtcatccatatcactcataccggacataccaggaagagtatctacttcagtaactgctttaccatctctacgctgcaaccaatagtcttctgtcattgacatattatgctgttggtttttaatcttaccagttgacgcatcatatacaacacggtttttcatcgtgttcataatatgctgcatgtgtgctgccgctttacgagaaggcatattaccagtgtcaatgtaaaacacacgacggtcaggagcacgagtaatacgataaattaccaacgcatcttctaatagctttagctggttggcaggtttaacggctcggtgtaaataaccgatgatgttttgacctgaacaatcaactagtccagaatgtgcatatacgatagcatcgcgtggaattttaattttcgttccggctgaatataatctgccatctgcataataactttctttgccagtatcgtaaatgaaatactctttgtaccccttaacgattttagtgccagcgtcatctgcggtaacgatttcacggatgaattgtaagttgcgcgggtcaagacgtctcagttcctgaattccgtctttcattttcttggtgttgacgattttatggaagaatattcttgagtcaacataccaacggcggaaatggtcagcaccctttctctcgaaattaaggcatgttaaaactgtattaaattcttcaagaatgcggtctttaattgcttgactgaagtcagtagaatctaaatcaagagaaactactgggtgaccgtcttcgtacacaaccgcatcagaaactatttcttcaacagcattgtcaacctcatagttattcattaaactacgataagtgttgattaaatcagcggttgttttcattccaggttcattggaaccaaacatcatttggttgaatgaattatactggatttcgttttcgtttgattcaacttcacgagctccatcatcaaattttggagcagtgattgactctaggtcattgttgatttgttgcttatattcagcttcgtcgcgtttttcccacggagcgaataagtccaaaatatgaaaggccattggagtctccgaaattatctataagtatatttatatcgaagttttgtcagatatttaagcaaataactcacagaacttcgatacggggccgaagccccataacattattcccaccagtcaatagcaaaggtagtttcgaacgtttctacctcattgttactgtcccagtccatctgtacttcaccaacgttagttggccacagaccagtaatggtgtgttcatttgtgatagttttgccatcacgactaaactggcgtaccgtagcaacctttttgtaatcagctggagtcataccagagatatcattgccttgggcgtgggcctgagcctgccaagcaataattgccttacgtacttcatgtttatcatcgttatagatggtaacagtccagtcgtcataagtacggtcaccggcgacgttaatcttacggttcatgtacccaactggaactttttctacgatacctgccggcatcggtgctgctttacatttgaaactgaagttacgacccagataaggaatttctacctcaaacaggttaggacgtgcaaagtcaccagattcaaacgcacgagtgatgtctgttaattccatcgttgtttcctatagatatttatatagcctctcgattgactacatcatcatagaggctattaaagtgtgcggtaatataatttatcatctaaaggttagatgaccccagaatgtcctgggggttcatattactgtggtccgattaactcatcgaagtctgcaccagttgccgtagcaacgaagttcagagtgatgtagttaattgaacgcgccggcttgatgtagaagctcgctacaaactcgttgcggtcgataactgctggagtgttgttcgtggtatcacatacaactcggaagtcatatacaccacccagagctttaatacccgccaagtattggcttgtttccatacggaaagaagaacgggtaaagttatcgtttaactcgaacaactgccacttagaagaatcaccgatgttgttcttcagcatgttaaacagacgacgaacgttaattcggtcaaacggcgttggaacagtagttgcagtcttatcaccaaacagaatgaaaccatcaccggtaccttgacccgttaccgggttaatacctgcttgatacatacggtcacgatgtgcttgacgaggttcaatcgcaagtttaatgcagttcagaatctgaccacgacgataaccagccggtgacatccaaggttgagcaacatcatctgtacgagcacacaggcctgcaatatcagcagctaacggaacccaacggtttacgtcgttatatttatcatactgatatttatagttgccatcaattgctgcgtacgtagtattgatgttcatgtttgcagagtcgtagcttccttcaccttgacgccaatcaattaaattatcaacagcacgggtcagaggaatatttacaatcgttgaccttggtggtgaaatgagtgctaaacaatcttgacgctcatctgcaatagacgcaacgtgtttttgcactgtacttgcgatttcatctgtttcaccagcgcaagcaccagcaatcagaaggtttacccgcagtgcttcacggtcaccaaataaatcccagccttgaattaaatcgccagccgtaactgattcattagctgaaaccccaccacccagacgaataacgccagcaaagccttcaggccatccttgcgcagtggcaaatatatagcgtgaagaacccttggagaaataatcatccataaagatgttatttccgtagatatctttgtcttgacggcttgtcgataatactgcggattcgactaccgcgccatctctacgaacaatgatagcatattggctatcggtctgaggaccatatccaaatacagcttttgcggttgatgcacgctgtccaccactcggataaatcgtcagctgttcacctttatcaaatgcagcttttgatacgatttcaatttccagttggtttccgagctcgccaggatacgcagctacaattccaggcattttatattgcgcaagcgcagtctggaattcggtttttgtcatttcttcatgggcagtttcaggttcagttaacagaactgttgaatcagaaataattttacctaaagtaatgacagcggaaacaccagaactctgtgaagtaatggtagttgtccacgaagaccctaaatcaggatattgattaatgctttttgcatacgcaataatcttcgatgtcggaatgaacaccgacttaatttttccgtcactatctacttcagtaactgaaccagtgtcatctacggtttggtctgcatatttaaccgtaattttatcaccaacttcatagttactaccagcagttgtgatttcccattcaatattatcaaccagcggagatgcgtttttagcagcttcacggttaactacacggacggtgcgtagatcattaccatattgcagaaagttcattgctgacataaagtaatcagcagtttggttattaggaccaccaaacatatcaaccagttcaacttcgttagtgatttgggtaacttgatatgcaggaccccattggaacttcccgacaattgcggcacgacctgtagcgttaagtactaccgtgctctgtacgctcgtttctttgagctcaattccaggagagactaaaggcatgatatatcctcaatgttgtttgctttttattatttatacaaatgaaagaccatgttcttgaggcgcatattctgcgctattcacggcgtcaacgaacactacaggagcgtaatcgtcgttcatatcttctaattcgcgtttaaaaacttcagatgctaatcgcatttcatctttatccacgaaatcagcaaatttttgctgtgttgttaaccatgcgaaaattacgagtgacataattaaatcgtcatgatatccatcttctgctgcccaggatactcctttctcagagaaagtacgaaattcttgaacagtagcacgatgatgaataatgagtttatctttttcgataaggtcttttagtgcagaacatccaacggcctttgaccttttcgtctgtttcattcctaaatcaactattgaatcgcaaatgacattctcatattctaaatccatataaagactcttcgccacagaaacacctgtagagttaagttctatatagatcggagcttcgttgtactccattagatatttaataactatatctgggaggattaagtgagaaattgtattagaatgcaatactccaacctgttcccattcagatgtagttacgtcaataatatttagtgcatggtaatcctggccgcgcccttcagcagagtcaagagttgcaatatatttgtggtctgcttccgcttctttaaatttataaaacccatgcgagtcaggagtaacttcaatccaatccatattggcaagtttcataccggaaatgagagtaccggatgtgccatgaaattccgcacagtgctcttgtttaaactgttcaagagaagaagcactgatagtttgaagtgaccattgccacccatcatcaaacatatcttcgtcattatataggcgttcttttactgagttccaaattgcagtataaggagtaaagccggatttaccttcaactgcagcagtccaaatatcatagaagtggtttaatccacttggtgtagtcgtgataataattttagaacgacgacctgatgaaataacaggttggatagcaagccatgcatcgatgaagtttggaataaacgcacattcgtcaatgtaaatcattgcaaatgagttaccacgaacggcatcaggactcgaagcgtatgcaccaatagatgagccattatctaattcgattgagcctttgttccattcaacaataccaggctgaagaaagtcaggaagtaattcaattgcttgcttggtacggtctaatacttccgcagacattgagcctttatgtgcaagaatacctactgctttatccttattaaaacacacgaagtgcgcaaggaagattgctactacagtagttttaccaagctgacgactgaggttacaacaagtcatacgtttggctgccattatttccagcatgtccctctggtaatcacgaagctggactttaatggtaccatagtcaatgtgagtaattgcacagtaggtctctgcgaagtacacaatgtcgtctcggcatttcttccattctgcaactatttcacgtgtcaactgcattttaatatttgctcgtttaaggtttggcaatcccatatagcgggtgcgcttattgtttttgtccttaaacgtttggaaatgagctgggtcttcaccttgcaaacgaattttaactatcccatgcaacttaagatagtcttcaaatttctcaggataccatttatcatcccactgcgatttaaagaaacgaactccgttttcaattttcgtttccatttcagacgggtggcgaataaccacttgtttaccgtcatttaaaggatgtgcatcactcagaacgttaaacggttgagtctgttccatttactattttctctcgagcttcttgtgcttcataggcgtctccaaactcatccatcatatcggcagtagaacctacaaagactgttgcattttgaatattcattccttgctgaggattagctccctttccggtgccaacctgctcagaagtaatgtctttcatttctttatgaagcttaagaatttctttgttggttgtagtcatctgacccataagagttgcaaatacttccatatgtctaggagagtcagcattcttagcagtttccaaaaatattttagctgcgtccattaacatttgttgctgaaagtgcatgttcttgcgaacgaccgaatagtcatcttcgaggtcaggtttacggtcatttggattagatttaacttcaaccaattcaagtttttcataaactggaatttcttgtccttctattccaggaattccttcgatgtctaataatttagccatatctaattgtaattcactcatttttcacctctcggtccaggagcctccggatttaccggaataggaatatcgtgagaataagtttgtttactagaaccatcccaattttcgtgttgaacatctcgtggagtgacttcgctatctactgattcaaagtttccttctggggttaactctttgctgttagcgaagaaatctaaataaatggttctaatttcgccgtcaacttcggcaacaggaggatataaccatccattgacttcaaacatcagcgaccattctaatctacgacgagtgatattatctccatcaacagcttcatccggagaaaatgactgtaatacaattctaacatcacgattaaagcttgtgtctttgtcgtaaagctcagttatagtcgtattaaaatgcggctgaaaataaggaacgatttgctcgatgatttgatacatatcatcttggttgcgcgtataaattcccaattcaaaaatcatcttaatcggagtaggattatactgagatgtaatttttgaaggggttttatatgatttggttctgtttaattgtgatgttttatacatcgcattgtactgcatatcaaccaagtgtaaattcattcttggcaaaacagtttctatttttgctttattctcggtagactggatagcagtccattttccgagttgagaaaggaacttttcctttgaagcataagtgataggtactttaatatattttagtccagtgtcttcacgccaacgagcaatttgtacatgagaaaataaatctccaagcaatacaatgtatcggcgtaaggacgaattataccaatgtccaaacatgatttctcctaagggacccaaaggtcccatctttattttatttattcgaagaacccgtcatcaaacgaatctgctttaggaggggactcaagtcctcttccgttattaacataatacggatgaacatattcagcggcttctttattaattgcatcgctttctgcgtattgcacatcagaaatatcagcaagagaatcaatgtttttgattggttctaaatcaagttcagagaactcaggaatgataattccttcattgcgcttcaattctggttgaagctgctcaccggaataaatgtatttctgtgcagtaatcttacgttgaacattttgacctaactgataaaatggatcatatggttgaacccaattaatttcaaacagcgaattatccatcgggaaataaatcaggtcaccggcttttggttcagaattattagtttgatgcttgaataggttgggattaatagtcaaattgacttcatcattaaccatcataccaaacttactaaagaatgtattatcaccagaataaccgtcaaaagagtctaagtaagcagcaaatttccaagccttggtgaatttacttgatgggtcttctccgaaaagcaaatccggattgttatattcgcgaggaaggaaataaaactcaattcctctcatttgaatagcctcagctgataaaacatctgctaacgtttggctatttctgtgattataaaaattcacataaggattgagaatttctgtctcattagttttattgtatcctcggtaatcctcaaggcgagcgaataaactagaattaaatgtagtcatcttttaccccaacagaataggacaacccgggtcaagtaaatcaagttcctctcggagcctctcgatttcttcttgggcctctactttaagtgtttggccatcaactgtaacgccgccggccaattgtagcccttggtgtttaaacagaatttcaccccacaattttttagtcagtgctgtagcataatcttttacccaacgattattataagcaccttctctgtttgtgttaccttctccggcatattgaccattattacgaaggtcaggattctgatatctatctcctaatccccaatggtcagcagtttgcggcccagcaaatccgtatcctgctgtattgcctaccatcgcatctgtattcataaatgatttagtccagcattcacaaacaatgatgtctcccttcatgaagttgcccattactttaagcatttcattatcagagttataccaatagtctggaagtggggcaagcaaatcctgcatcattgaccaataagtcattaattgagtaaaatagcccaggtcagcaccgaaagcgtttggcccataactcttattacaacttgaccccattccaccattaattccggccattcccattaaaaagtcagtaaaccacggataggtagcattaccatccattgaagttaatgaacctacatttgttctaacgatttgagtgacagcaaatacattacgaccacgcaaatcaaacacgccatttaaaaatcttgcgttgtcagcttcatcttttccaatataaaaaacttgatagcctttattcaatccgttaaagtggtattcaccatacaactctaatgctcgttgaatacaatcataaatctggtcttcagttacttcgacattaattaccggcgctcctagacgtcgaagtatagcgtctttaagcgtttttgggttgtatgtgttgtatgacatataagctcctctttatattctatttatacgaaaaagggacccgaaggtccctttcattatactgctggatgaatagtaatatccaatgatttaatactaacaggaactttcgattcttctgaagcagctctatacacaattttgattgcatcgccagacgaaaactcaataagtttcttggttttcaacagttgctcgccggttactgctttaacacctaggctataagtaaacacctcaatgttattgacgagaataacaatttggacggctttatctgaatcagaagcttcgataactgtatcagtttctacacaaaatacgccatcgtcatcaacaataatatcatcaacaatacgaatgccagcattaaatgaagcagcgaccaatgagttaggatttaccaatgcatcagaacttaaatcaacagtgaaatcttctttactgaattcacctattgatgaaggcttcttaaaccattcgccccgtttacggaggtatgctccatcttgttctacgtcagtaactgcagtcacgaatttatcttgcaattctactacagtggcatacacaccatcccgctgaaccggattttctgacgaaaagtcaccattcatttgagtctgtaacgtaaatacagaaccctttaacccttcgctgttattgccaagttctacttgaatgtcctggatagcagactgctgagagttttgcatcccttcaacattggtcattctcgctaaaattgaccccggaggaatcggctgcccgccagtaacaataccgacctgttggtttatccatgctacttgaccctgaagtcctgatgaagtgtcctgacctacaacgtcagaaatgtatctttggccagttgaaagagaactaatttttccttcaatagtatcaggcttatcagaagaccccaaacgagcatcaatattattgacacgaggaactaacccggtttctgcagagttaagtgttgcgtcaactatacgataatcgttttccaatctagtagtgcgagctccaatttttactggattggtaaaatcgatggcctggttaatagcaaagatttcattattagctgcggaaatagcatcagcgttattcacgagccttgcataaattgaagctgaagtagctccagatttaggaccaacttctttacgcaggtcatttacttcaatagtcaaagaacctacgtctgaatcattgtatgcatcctctagcgcctgaatacgctcgtcatgttttactatagctgacgcattattgatgattcggtatttcataccagaacctggagcgtcttgcttaggctgtccgttaacatcttgcccaggatacgcaccaatttcacgtttaacccaaactatattatcacgaactgttctgtaatagtcatctttactagaatcataaacacctacatcctcttcgagaaaatcgaggtcagttcgaagtttttcggtgtcttcttctaatttaagaatttgtccatcatgcttttcaatattctttttattgatataaacctgctcaatagcgtcagaagaacctgtgatttctaatgactttttaatttggtctacatctacttgaatattttctacagcagttccaacgttgttcaaatcgttatgtacttgaaccacgtttttctgaatctgtacagaggctctattcagttctccatcatttccatagcgggttgaagccccattaagaggctctgtattttttatccaattaattctctgttgaaaatcatctggaattccgtctacgaacggaagcgaatctactagtttggtcatattattccttacggtctatttgtacagaatgtaagcatgcagtcataaaatataatacgactgtcttctgttggtcttatttgaacagtggcatttggaggaatgttattgaagaaaaagttgctagatgcgtaagcttcaaatctccatgaatgaccatttcgtccgcctttagtattttcgatgttaagagtaagttcaccgccccattgggaaccgttaactattacaacaaatctgaaaatacgattgtcatatccgtcgttgttacgctcaaattttacattaacatttagagctaatctactagaagcttcccatggtgcattacatgtaaacgttgcacctcgactaatccaagattgtccttcaacccaagtaacattacctactctggttccagctggcatgtaacgcccgtcggattcttgtcttgtataacaattaatatcattattagtaattgttatgtcattatcaagagtttttccgtttattctacgagttttaaaaacggcatctgttgcagccgctgccaatgaagcatcagtagttggagaacctgataatctggttaatccatatttatccttggtggattttagcgcttgaagactttttggagtaacagccaaattgttagaagtagctgaagccacatctgagtctttagcaaattttactataccaaatacactgtcagacgcttttgatgccatgaaggtttttggagttactgcgtatccatcgtgaacagcacctgctgctacctgggcttgggttgcgacacgaactaatcccaagttgctttctgttgcagaggtataactaggaggactgacgctgaactttccaatcatttctacaacacgcttaggagttactgcggtagtttcgtcagttcctgcttgtgcttgagccgcagtagttaacctaacagttccatctacgttttcttgtgctttcacagttttaaacacatgaccaagagccgccgcggtaatagttctatttcctgcggttaatgctgcggcttcagtattagtagcataccgtgttaagccaagaactgttgtagttgcttcaggccgagtaattgtggattttaatgtagcaggagttaccgcagcattacctacagttccagcttcaacttcagcctgtgttgctgtgcgaattatacctgctactgtaggagatgctacaggtaatccggtatcagttcttgcccagctgccaatcaacgctaacgctgattggacgtcttttgtagcaactggccattgcgtatttgctgggtcaaatatcgtatacttggccaaatcactgtagtgattatagttattctgggccattatcccatccttctaaaatagtggaatgtaaatgtgtttgcaccgaaggttttagtttcgttaccaatagcgtcccattgtccataacccgctttagcaggtgaagtaatagtaaattcaacagttaaaccatactttttatatgtttcaaaattatggttctgataatctaaatgaataatatcaacatactgaggagttgcaggtgattgagtaacttgttgaaccacttttccaactgcttctaattcttttaccttatcataccacctggtagctactgcagcaaagtcatcgccattcgcaattctaattggcaatccaagaatgtgaattattactgggtcaccgacagagccgtcttctttaggttctaatgaaaccacacctgaaaaagtagcgcgtgtaatttgctgtgctggttgtggagatattccggtgtcattacaaataatagttccaatttctgctgactgtaatgacattaaatcattaatagcagcttctgtgtttggataccaaacacctaaatccatttgttcaaaggttaggctccctataggagccttatttcccaccgcgatattctgcgggtctacacgatattctgaaaaagcagttaatcttgaattaactttagctccttcacgagttttagtttcaatagtcattttaacctaccctaatccaacgataaacggtgattgttggctgaattttagtgatgtcatttggaactacaccattgtttactgcaacagtgtcttcacggtatttagaatagcctggtccttgtgcgtctgggtctaattgacatccgccaataactacgctgccatgttcagggtctgaaattagaactttgtcccttgacattagctcaggaatgtgttcttttcctaatgtaaacgttaaatcaccaaccgttccacctgctgttaacgatggttgtccgttttcgtttaggttattattgttccgcgcaaaataaggatcagatgaatcattattccaacccgcagtaacacgaccctgagagtaaagcttccacacgccaaatcccatgtaatcggcagggtttgcatggttatgggcgttttcgtagatagtaccaatcggataaattacgtcaaagaatgctgcaatgttattgactttaatcataacatcatcagcgacaggacgcatatttttctgatttggttcatcatagttagtgtattcaatgcgattttttagagttaccaattgctcagcattcatatacacatgatcggtttctgccatgatatcatcgatgttcatagtagtaccgatgttgttgttgaaccaacgaacagtaagaaggtctttatcctcgaacgcttcgccaaaaataatagcttctacgttaataccagtcgagtcaaattccagtctgtaatcttggttagaatttacccattgaccaccgttgtttatacagtcttctgcatatccgccttccgcgccttcacaataaaataaaggaagacccgcagttccagcttcgagtaattcctttccgttcaatgaaatttcaagcgagttaggatttacccctacgcctggaagtacacccatgtcatccagagtgattctgcggagagtagcaaggttatctactatcattgacccaggaatcgtctgggatgcagtctgggctgaatctcgtatctggatagctaacttgttgtatgaagaacgatatacaccaattccgtctaagaaggtttcgaatgttattacttccccttcaacacacggaacttttaaacgaatgtctttgccgtttaattctactaattgaccttctactgctccaggagaaccgtagtcagcattagctttatccataacgctggtttcaccgtagtataaaatattaccacgacgatatacgttaagtgagtcttcgttataatctacgccatcaaaaatgttaagaaagtcagtctgtccggcagtagcaataattgattttttcgctacagtacttaagttgccattagttagcttgtctactgttttattttcaatgtattcccagcggccaggtgcgcaataaactaattccaaatcttggaagttagtgttgaaaattttgggagaagctgaaccttttaatgtatcaccttgagctggaataactgtgattgggcttaatcgccaggttgaccaaacatcacgaagtttaataactttattgtagtcattagctgttccctttggaagctgaacgttaactcttgctgcctgggtattaatagcaaaggcctgaccaaacttagcatttaaagtagttccagtagggctagctttaaaagttttccatgctcctgcagcaaatggaactgatccatcccctaactctgaatataaatcatcaaagttgttattaattttaagaccacctttacggaggtaatcaccagacccgtcatcgactgattggcctactatcaaattttgtttcattattgagatacccctacggtctgtgtagcaataactttaactgccaaacgtgcgtttccataagatgttgaagctgtgcatattaaatctttttgtgcattaatagagtatgaaatggaatacatcttttcattttcagatgattcaccacttcttaacactgcatattcagtatcaaatactcttccgtttggtgctgatgaagtaatagtcgggtcaatcataagcataacttcagatgattgccttttgatggtttgaccgcccggatttgcactgaagcttaataacaatttaacggtggagtaatcatcattatatccaatgcggatattaataggagaacttgttaaattatatgtagcttctaatggcgaatatgtgctgccaaacatacttgaaattgaataatcccaaacagcagcaccgttagcttttacctcaacacaccatagctcaattctgcatcttggggtattaataactaactctcgcgatccatctttaaatgcatcagctacgccttcaccgttggttgttatttttatgggtctagcttttgatgctgatccattactatttacaatgaatacagcttctcccgctttaccttttgaaagacgtatttgaactgcaccttctgaacaatctgcgtctaaacatgctcccattggaactgttcctgcagagttagcatcaccaaattttaccttttgataatagcttgttgcatgaattttttgacttccttctccagaccctgcagcaaataacctttggtccccaaatgcgttataaatggcgtcatagttttgatttattttgacgccgccagcatataaaatgtcgcccgtagaagcattacctacttcaccgacgtcaataacctttttaccttcatctacatacatagtagtaacctcttatcaaagtatagtcctatttatataaaaatggggagccgaaggctccccataattaaaactcgaaaattaagtttaattcttccgtttggtccattgaacgaataataggttgccgattttccatgtaaatcatttcacctgactgtctttcaagaccagaagcactataccaacctttttcagccttaacattaggtgaatttggcattggcttagcttcaagcggattagttataattgacaactgcctaaacccagtatttcctggaagactaaattctgggaaataaattgcgtcaagatatgctttaaatctaattgtattgcacttcatgcgataaattaaattaaagtcgttttgttgccatgttaagttgttttgaaatccccaacgagccggagattcttgaatctcttctggccaaggaactacaatatattcatttgtgcatctattgattgatacatcagctgggatttcatatagatattcccaaagatatccatcacctaaatcaaccttcccgttcgcgtcaccacgaccacgaggagctgaacctgaaatagctgatggtgtccatttacctccaagcttaatacattcatctttgcttgtaagatttccaattgaacacattccgtcttttggaacatcaatacatctgtataccatccatccaaatccagcgtcagttctgttatatggcgcagagttagcaacaacaatgtcgccaatcaaaaatgtacgcgggttaggatatctagtatcaccccagtctcttcttggaacaacgcaatcaagcatagatgattcaattttgaccgcgcccatcatatttgtccaaacatcaactaccccatctccattatcagcgggatatggaggtgcaaatccgggttcagattcgttatctgaccacggagtgcttttgccaaatgaaacatacagtgtgttttggtccgttcccggaccaatcgatttataaaatgtgtacatcttttcagttctaaacttagatgtaatgatagcacgataaatcgtgctacgcgttgaacttgctcttgttgaattactcatcaatttttacctgtgtcggattttcaggatcgcgaggattacctgcatcgtctttaagacgttggttaactaaatcacgataattggcaaacgttactgctgattggtcaaacgtagggctcagcggcttacgtcgttgtccagggttttgtccagcgataacactattgttattttcttgattatagttagcaggtaacgggaaaggttcaccagcttgagcacgtgaagaatacctaggctcattagttattgggtctctttctattgtatcatctgaagcgataatagcaactctatcaggataaactgatggcagtcctgcatcccatttatagttcttgagtttatttatgatagtctcaacatgcttcatgtttaaaccgctattgataaacattgtcaacagtgttataccaatgaaaccgaaacctaccggatgaacaaacctcagtacatcatcgcggaaccgagaagtaggaagttgagacttaattttcataacatagtaagaacggctgcggtttatatagtcaatgttattacttaacatatcctttccgcgaaccccttgaactataatgccttcaaagtcagtacgctctgatttaatttcctggccctcaatgaatcgtcctgataagttgtgaatagtaatacgccacaacagacgaccatcacggtattctcgttcaatatacgtcacattactgcgtccagaagcagtgtaaacagtacgaccaactaaatcatcagaaatatttgtactctctacaataatgtcatattctgtcgtattctttgactcgatgtcaatttcaacatcttcattataaagaagtttaaacaagaacttgtatgagtcttcaattcctttggtagcatagaaatcattcttgcgtgcttcaaagaaacggacgacagcgtcacgagcgtctttactcagataaatgttgcgtttataaacttcagaccacagatattcccatgcgttttcttcacgaggatatttgttcttaacaagattaacgagactgttgtaatgtgttccatttccatctgaaaggaattggagatagtacttacaaaagtgttcaaaattactatcttgtagcaagtaactatccggcatcattttagtaagatacgggcgtaaatccgggtcacgcaagcctggagtatgttcaggagtccagtcttcttcacgggtttggttctgcagaaacgccttaaacattacatcagtcggtttccagttaagcgttacctggtcacgaacacgataatcaaatgcataatagcctatcagctttccatctggctcgtgaaacatgataccagaagcatactgcaaaaatccgttaaatgaaaccggagggcaataaaacgttgcgtcacctttatcccacacttctgaaagaacacgctcggtagttccctgcgcagccatatctattcttttctgataaagaatatcattataaatgacaaccgcgtggtcagctgtacttatccagcatctgttgccttcacgagccatccagacaaaccaaggttcagcataaaacctcatcggtccaggaacaaatgtttcccatcttgaaaattcatccgctctgaaactcatcatgtgataatgcttatcagagtgatactgaattgggttaacatttttaactgcggtagaaattagttctggatatttcgtctcaagctcaatatcctgaacatactctgtcgtcttgaaattagctgatgaaaagaatatttcctttccgtcagttgacatagacgtccataaatgctctatacgacgtttttcttcatctgtattaccgaatacacgtttccatgtatttgtgtcttcttgataaacatagacgcctttagtagcagaatccacaacattccgcgggtctgttgggtctaatcctaaggttttaacttctccggtaataagagcaaagattttgcctccgacagaatccattttaaagcatacagatttaggattgcctgttatatgagatgcttctttttcgaacactttttcaccaaatgtagggcttaaagggtcagtgtctattggagcatcttttaatttaactctgcgtactgtatcctttgcaactacatataagtggtcatcattgcatgtaaacgcttcagcatatttggtaacgtcagctggcaatgatgcatacgttccgaataactctacttcaaagcccagttttaactgatctcccaatttagcgaacgtgacttcgttatcgctaaatttaacctcatttgatgaccagcgtacgtcagatgattttcttccgtaaaagattttatcatatcctaaaacgtacgatgtggtacttgattgataaatgactactcgtgaaacaggatttcctacacggtcattaaataactgaacatattgccaattctgtcctttatcatttgatactttaaccatatgttggaatctttcaaacagatacaaaattccgtctatttctcccagcatagttctatttttatcaacgcacactgcttcaataggtccctgaatttcatgatatccagattcacctacaacgaagttttcgatagctgataaatgagaatattcaggactaaactgaaaagactcagtcatcaaagacgccatcatggcagatgtgttgaagttaacatacgacatgttgtttaaagaaaacttctgcttaatgaattctttcactaaactgaattcttgcatatgctcaaacgtgtatgcgttttcttcgaaagtttggaactcttctgtttcaacccattcagacggctcaaaccctgctgacgtagtttgaacacgcattttataataagtaagcggttcaatacgattttgttcgaaccaatcattatccgcggtataacccagtgaagaccaactcaagttatcagcggggataacttcccccgctctgtttcgagtttcggccagttctacaaaatagtagaagtttgcaccaacgtcatcccaacgaatattgacctgattcgcagatagcttatgaattcgtaagctggtgacgaacggtgcaattgtcattgagtaataggctccaatttaatagttgtgtattgaggacgaaggtcattctcaaatacgataagtgttccatcgcgggcgaatacgatatcctgggtaggagtagaataaagctcaatactttggtcttcaaactgaagaggatcggctccaatagctccaaggctccagtaaatgttatcaccataataatctacttcaccgattttgtaccaacgagttctttctccattagtagttctatcaaaatcgttttcagtatatggctggatatgagtattctctttaatgtcacctggcttaaatggcccaataaccatatttcctttgccatttttatctgggtcagttccaacgatattaactgaatatggttcagcagttggggtaacagtaaagaccaaatcaccagaacgtaacgtccgcggagtaatagtattatagtatttaatacctgcgctaggaagagtgaaatagttgacaatttcacgaaccatctgaatatccacagaagaaccaatgattgaatggtcagtatcatcaatataggtcaataatttagatttactgaaatttttgttaaacatttcaacttcatcaacgtaatatctattaatcgagtctataatttttgactgtaaccactgctcagattcttgtaacttattcagcgcgtaagaggctttaatattgtgacggatgaacaagtagtctggactcattaccgaaggggtaatgggagcaagacagaatggacgaagataatcttggatgtcttctctttgaacagcggttaactgcagtccagattttggcttaattgcaataaacgcataccctggcttatcttggtcagtaaagcactgcactgcctgcacaatagaaccaaagcgtgaactaacgaatgattcatagtcagttttagacacgcaacgcatttgagattcgcgcttaatctgtgcgagctcacgaatacgctcgatgtcttcaggttccccaccaccatcagcgccaacataatcaggagaatctgaccagttttcaatgattctatttactacgatatattgcagagtatcagcataactaaattcagtcgcgccattagcagcttcaccgtcagtacgaatatattcaataacgacttgcgcgcccttagtaggcttcaatccgccgatgaagttgctttcaagaactcctcctgctacagaggcttctgccacgccttcaccaaagaagaattcggtatttccgtcaacagtttcacgcatataataaattgttgaaatggatgaagcatgaaccattgatcggtctgtccagttagtccattcagcaccatccacccacagtttaacctgcttgcggtcaattgattggtcgcgaataacaataggtttcttcgggtcatatgacaattgagtacgaataatacgtccttgtgccaaattaacaatgggccaatatttctggtcgttatcacgaatagccacaacgttttcagtaacaacgaagttatatgggttggctttatcggatttcgagtatgctaaaaatttagtccctcgcggaattacaactctcagtgtgctgcttgggttcatgtgagttacctcaagcataatagacgcagtggctgctgatttggaacttggcaaatacccgttttgctgagctgcttgaacaacagaacttctcaagttagctgttccaataaagctttcgtataaagcagtattactaaattgctgtatgtaaagcgtgttatatgctaataagtctaatagcacgtttaaacgcgaaccagcaaaatcaaagtcctgaaactctttttgcccgctaagccagttaataagctgatttttaatttcgtcgaatgttgctccagtaaatgcgtctgggatagcgtttgcagtacgcgttaactgataatttaaaggttctttaatagccattagtgtatgaatacctttgagcttgattgcgcgacagtgtcgccacaagaaattggatcggccatttgaacagcttttttgcctgttacaaataccttggatgtgcgaggttgaacaacccctccatgcgtatcatgagggtcaaccgtcttggtgtgcggtgtaattgagtcaccatcaactaataccgctattccaccagtgaatactttactttgtgtagcatttacttctgtcggaggatacgcactatgcccggcagttacgcatttatcatatgaaagaccagccatttaattccccgcatatacgtaagcacgaagttggtcgccccatctactccagttgcctttaacggtttgagagtaaatcttttgctttttatgttctgttatgattggagcgctagaacctccggatgaacctccagacgattcttctgtcactgtatatattatctcaactgtataggtaaatgtcttctctagtgttctgggggctttccacaaatataaatcagcagtttttggattaggtaaatcctcccacgctgaagcggacttcagctcatcgccttcacggtatttaagcacatcgtttccaaaagtaaaaactgagttataattacctttataataggtttcagacacagagatatcagatactggttgatagtcgataatatttattgattttaatgtttcgttggtagataattgagcagtaaagtactgctcaacgtattcaccttctattacttcgcgtaacgtggtattaataggaagtatatcagccatgattaacctacatcaattcgtgaaccatcaacagtgtattgaccttgggcgattgagctcatagaagccattgtctcagtccaagccccgccaacattccaattcacagtacctgctacctgccaagttaaattaccaccgacggtcacgtcgtggttgccatctactttagtagtggcatcaccgttgacttggatatcagcatttccttcaacgactatcttaatgttacccttgacaaaaatagtaccatcgccttcaatagttttggtttcatttccacgtacataaagcgtgttatcgccatcaatttgctgtcgacgattatacatgttataataggtctcgttccctccaacgttaaccttcttatccccagagattaaaatatttccatcgccctgagtcatgtcatataaatcggctacagtttttctggtacggcgtccatcaggagcaacttcttcgtatgaaccggttggatgaacaatacgatagcgttcatagccaggtgtatcatcaaattcttggatgtgacctgattctgtttccatcgtatgaacatacggatattgaccattatatgaagactcaggttctttgaaaagaattctcgaatcctctggggtccacgggtcttcaggattaccaccagactttggttctacgtaagcagcagacaggttttttccttctggctttggagcaggaactccatatgattccatattacccgttagaataatcatggaaacacgagaagcacgaccttttgtctgattaaaccaaacagagtttcttgcttcagtataggctgttttccaatcaccaatgagcatggcatcaagcattttaccaaattttgctaatccacctacgcccatttgaaagctcatattttctaaagccatttgccttgatttgttgactttagcgtataccggtcctacacgtgaattcgttttaatatcagaaagcattttatcacggtctttcttaaatagtgcaactgcttcgtccattgtaatgataccaggatttcctgtaacggtacgaccaacctgattggatagggttttattgatgacagacatatcacgtactttttgcgccatgataagatgcccaatacctatggtaggatatccttctgtgtcccagtagaccttcaatctaagaccttcatccctattaagcatatctgttattgtaattgcaggatttgggtcttcaggaatatcacttaagtcagcatcatcaggattaatgccaatatccaagtttctatcttggatgatatttggtacagcactatacccagtttcatcgccttgaactaacgggttagtatctgatcccacctgtctaggatattgacctgtaggatcagaaaagccttccgtgtagtttggctttgtttttctatgagcagaatatgttcctattactaatcctgctgttttgaattcatcaagccataacccaaacaccgatgttccttccaccattccggttatggatgagccaactccagaaattccggccgagttagtaggctgaatcactgacatccagggaaggtcttcagtaggaagacctgttatagctccttgcaccttttcaaatggatgaagcccataaacacgtactcgcactcttccttgctttaatgggtcttgtctgtcttcaacaacaccagtaaaccattttaatgaatcattcatttcaatcatacaacttctccaattgtggtctgggatttatatcgacctgattcgtattcactgtcaggtgctttttccatttctcgtataatatcagaaagaaatgcttcaatatcactaggattgataatgtttatttggcgcagtttttcattttctataatagagtcttcataaatgtcaacaccagctaaagccccagtatattgagggtactgatgattaaagtcccctttatcataccaaatgcctgaattttcaggatattgctcgaggttataataacgattgccgtttgcatccacgtgatagagtatttggtctccacctacatctgcatatttttgttgtgcaaattgatagcatgcatcctgggttttaatccaatctctaaacgggtcatatacgttattacacattaaaagaatccagtacagctgactatttccataaagaatatatgctaattcttctggtctaggagctccacttatgtaatatgtttgtaaaagatagttttctgctacagtgtcgaaatatttgcgataattacgaaatatgtcagcggttgggatagcttttgccttagcaccttttacggtctttgcagaataatctatcggactaaaaaatgagaagagcatagtttatcctcttataaatattaataacagtatttataaggaggccactatggcatattccggcaaattcatgccgcagaatctccacaaatataaaggcgactttagaaagattacttatcgttctacatgggaacagtacatgatgcgttggcttgacaatcatccagatgtagtccaatggaatagcgaagaagtagtcattccatactttagtaatgcagatggaaagaaacgccggtatttcatggacttctgggctaagttttctaatggtcaacagttcttttttgaagttaagccgaagaaagaaactagacctccggtcaaacccacaaagttgacgacatcagcgaagaaacggtacattgatgaaatttacacatggtctgtaaacgtggataagtggaaagcagctcaagctaccgccaacaaaatgggtatagaatttaggttaattactgaagattcacttaaaaaattaggatggaaaggctgatggctatatttgaatttatcactgaagccgcagaatcacctaaagctaaatcccgtagtgaaaatcaatgggtagcattaggagttgaatactctgctgctcgtaaaaaaggcatgacgtcaaaatcatttgctgaaagcaaaggaataaatcctgctacgttcagtaaagctatggctcgtcatgcgtcaagaattaaaacggcaattaaagtagcagaaattgagaaaaaacctgctaataaaatgaccaagcaagagcgcgctcttgtgatggtaaattcatttcgtagttctatcaaagataaaattcgtaatgaaggtgcagcagtaaacaacaaatctgctaaatggtttgcagaaaccatgaagaaaaacatcagaggtcattctgtaaccaagcctcaacctggaaagctatatgcttacatgtatgatgctaaacacaaagacactcttccattctgggataaatttcctttgatagtttatcttggtctaggaaagcaaggtacaaccacactgatgtatgggttaaaccttcactacattccgccaaaggctcgtcagcagtttttagaagaacttctgaaacagtatgctaatactccagtgatatctaataagaccaggttaaagataaactggagccaagttaaaggattcgctggtgctgataaaatgattaaagcatatattcctggtaatataaagggtgctttaatcgagataaaaccagctgattgggcaaatgtagtcatgctaccaactcagcagtttatgtcgaaaggcaaacgttattctgctacttctgtatggaaatcataatgtctactggcttgtttaatcaaactaacacaactaactttatactagaggtccccgatgggggcctcactcaggcctttaaggctaatcttcaaacggcggtagttcccggaattcatattcctgctactgatactgtgggttctccacaaggcatgcatcgtgctaaattgcctgggtctacctttgagtttgacgctgttcctgttagatttttagtagatgaaaatcttgattcatgggtacaaatgtacaaatggatgttaagctgtcaaaactacattgaccgagacaagtctggatggaataacggcggtgaaggatttcctggagcagttttaatgcatgttcttgataacgataaacatgatatagtattaactgtccgctacatcggtgggtgggtaagtgatttgtcagaaattgagtattctttaactgaagaatctgaccctgccatggtatgtgtagcaactttgcagtacaaatacattgaagttgaaaaagatggtataataattactggtagaccttctgtcaatgatactcgtgaatctcagtatcagcaaaaggttatgggaatgcatccttctatgaggtaataatttgaagcttttatttttgattggtaaaaaacgcagtggtaaagacactactgctgattacattatggataactacaatgcaacaaagcatcagttagcgggtccaattaaagatgcactagctgatgctatgcttattgagtggtatcgtgatacgtctcgtgagtttcctcgcatcactcggtctatgattgagggtattgattacgatcgtgaacaagatttaaatctgtctactaaagacgtgattcgtatcatggcgaacgcgattgaatatgttcatcatgatttgcctttacctggtgtggtttatgataacaaacgtaaaatacttgacggtgacacgatggaagtcatccgtaaagttgtaataaataaacctgttgagccatggtcaattcgtcgtctcatgcagacccttgggactgacattgtctgtgataagctcgatcgcatgtattgggtaaaacgattcactttggttatggctgatacttttggtgattatgattatttcattgtcccagatactcgtcaagaccatgaacttgatgtagccagggcgatgggtgctacagttattcatgtagttcgtcctgagcaagaaggttctaaaaaagatactcacgtcacagagcgtggacttccgattcgcgaaggcgatatcgtaataactaacgacggttctctagaagaactttattcaaaaatcaacactatattaggaattcaaaaatgactactgaacaactgcaagcccaagtcgatactctgaaagttcgtgtatttgacctgtctgaaactatccaaggtctgtccgctctgcgtgcacagtatgaagaagtactgcagaaactgattgctgtgtccggcgttgaaatcagcgaagacggtcaggttaaacttgatgacctcgttgcaaaaatcgaagcacagttcgcagaagaaactactgaagaagctgatgcctaatgaacttcagtgattttagcactggtctatatgtagctgctaaattctctgagaaaactcttgatgctattgaggaccttcagcgtgagttgaaggtccctaatcctgtacctcgtcataagattcatacgacgatatgctattcaagagttcatgttccatacgtttgtgcttcaggaagttttgaagttgctacatcaggtaaacttgaagtatgggacacacaagacggacgtacgctagttcttaagctagattcagaatacttaaaattccgtcaccaatatgcaagagctttgggagcaactcatgatttcccagattactcaccgcacattactctcagctacaatgtaggtccagctcacttcgagggtgaagttcaagtgcctgtagtgcttgacagagagtaccaagagccactaaaactggactggtcagaagatttgaaataggaatttatttcacaaagttgtttacaacgggttgtagtagtgatactataaccctatcaacttgaggagaataaaatgaaacgttgtgaattaattagaaatgttgcatcaactatctgcatgggagcgttaggttttggcattataggtgcagcctttatgtctcttcctgaaacagtatcagtgttaagtgttgcatttctaatgggtatcatttctttcataatggataaaatagcgcatgaaaaagattaagcagtggttcatcaaaaactatgatttacaccgtgaagaagtaactaagtatgattatgttactttgggtgtaggactaggtgcactactggcagcattgcattcatcactacttgctattgcagtgcttcttattttggctcactacagctggaaacgtaagtaatgtatgcacttttaacttggtctaattattatcctgctcctggctctgaccaaatcagaggtgtctactctacggtagaagaatgctatgaagccctccagggaacgtatcaggactattttgagatactgaattcccgatttgaaaccgttgctaaaggttcaactgaagcatacaaagattaattgtgaggaaattgtgatgaatatcagagctgcatttaatactttctatcaagagaattataagcttcttgcacatgaatatcatgatgcacaaggcgttccaattcctaatgatttagttacgcctaagcatgtcaaaactgattctcttgacaatgaaatccagcctggtgatttagtatcatactattgcggcgggtcactttctgcagcaagcgttggtattttgctaggatttacacctaaaggttatcgtgtggttccgttccatacaagtccaattcctgagcaccgggtattgctctctcatatggattcaccacatagggtattcctggttaaatcaaagagctcaccgattgtgtaatatgctttaggttttctttgttattattaatctatcaactgctctgattaatttcagggcagtataaataaaattaccaaatggggagttagaccgtaggggtagcgggacagactgtaaatctgttgctcaaaaggctcgagtggttcgactccattactccccaccaaatttagggatactagctcagttggttagagcaccggacttttaatccgggtgtccgaagttcgagtcttcggtgtcccaccaaattcgggtcgttggctgagagggtaagcgacggactgttaatccgtgtcagaaatgactaggcaggttcgatacctgcacggcccgccaaatgaagaagtcagaagacgttctgataaatcgtcggcatagaattccctggcatggcgtttgtattaaggagtatgatttcatcctgcttaatgcttgttcatgttataatttcttacggcgttgaaagttcgctttcagggatacatcttagaacagagtgctaaacaagattcatctggtaccaaggtgatgagagtcctgttcccctttgcttcggcatcgtgccagagtatctctgaaagcgaattatggacctatagtttcagcggttaaaatactcgcctgtcacgcgagagtcacggattcgaattccgttaggtccgccaaataagaacgtggcagttcttgaagatgagtttgagtcctgtaagataatgccgaggacgaagctgtttgttcccacggaataagctctatattcgtaagattatatctttagcgtgttctacatcaagctacttgttagtacttcaagaacccggataaatgcgggttaacttcagttggtagaatgacgggttcatatcccgttacgcgtcggttcaaatccggcacccgcctccaacaattggactatagacaagcggttaagtcaccggcctttgactccggtatctctggttcgaatccagatagtccagccaaattaatattcattcaacgcgtctacaggggttgaactgatcattcttctcttaatttcgtatgaagtcctcatgatggatggagtgaatattgatgtggccgtagttcagttggtagaactcgagattgtgattctcgtagtcatgggttcaactcccatcggtcaccccaacaatgaaggaatggtggaaaaatacacggcccgcaaaacgctgtggctgtcgctaagcgaattgtgtctatatggcacttccttcaccaaatattggagagtagcgctagtggtagcaaaccggacttgaaatccgggccatcggaaacggtgagggttcaactcctttactctccgccaaatttatgaaagttaaacgctgcccatagcagtggtacatcaacaattagatgattagctttccatgggagtatagctcatttggtagagctctcgaccgataatcgagcggtgactggttcgagtccagttactcccaccaaataacaggttcttagtataacggctattatgctgggctccaaacccagtgatgagggttcgattccttcagggcctgccaaatttgcatccatcgtataacggctattataggtggcttccacccacttgataagggttcgattccctttggatgctccaaattactccgtatagctcagtctggtagagcgttccatttgggatggaaaggtcgaatgttcgagtcattctatggagaccaaattatcggtatgacacaatacaagatggcgtaagctgagtagcgggattgcagtctcgttcagatatgctatcgagtatgggtgatatattaaacacatggattctgcaaagtcaatgtgactcggttcgaggccgggcataccgtccaatcacttgccattgagaattatattatgaaatattacggcttcaaaacatcccatttcgggaaagcatatcgtacagaaaacattgatagacgtcgagcatattacgaatcactgcataaagcaggacgttctcgtgcacgacaagaaggccaaaaacaagcgaaggaaatagaatgaatatttttattggtgtatcaaatgacgtaaatgctattacggtgaagctgtctttggatggaccggttaatttagcattagggctttcatcttgtgctaaacgggatttaatgattaacgctgactttgcatatgcatttgatgaacgcaaaggtatgtgggtttggattaaatatcgatacgacacattactcaaatatgagtactttagtgaacgtgatattcaagaaattattgcttatcactctgggtgtaaaattaataaactgcggcaagttactccgttaaccgctgatactaatgtagagcaacttgtattagattttaaacaaatttgccaggcgaaatatgatgaaagattctaaaggtcgagaagtacaagttggtgatatcgttttctacggagaacgcacatacaataaaggtggtcgcggttctatgaagtgtggccgtattactgatattgcttcaggattggctaaagtagataacgactacgttgcaatgcgaagcaaatcattcgttaaggtttctcctatgttcgcaacaatgtgggaaaacggaacgattttcgagatttaatgctacaagaataacctgttattattactacatcaaaacaaacaaggaaaaagaatgaaacgtatcgcactgattgttgaccaagaagctatgttcgctgctaccggtaaatttcatccggtgagtaaatttgttgctcgcagcgagaaaatcgttggtctggtagaaactgtcgcaggtgatgtaattgtttctattaaaacatctgaaatttcgccggtggttaaagtagcagttgaaaatgacttctgggaagtagctgattttatgtgtgagtaattctgcctagcaggtggataagcccgacaaggcgccctcttcggagggcttttataaaagtcgtaagatttctataaaggccctgtagctcaattggtagagcgttcccctcataagggattggttgcatgttcgagtctttgccagggtcaccaaattcgtgtgaggagttatgaaaaccattctcgttagaattgacatgtatttcaattattgcgacagaaatttaactgaccatgatttagaacacgggtttggattaaatcctattcaattattcttgttgaaaagtggtcaacagattgttcttaaagaatataccttagaacgaatagatatgaggaatgtataatgaaagttaaatttggacaagttattcctaaaggcttagcaatggcaattaccacttgggaaaacgatgctgatcggtattctacccaaatggtttatggcttagaaaaagaagagattaatcaagtaattcatgttcttgaatggttctcttctaatggccgccgtggtgtgtatatgggaaatgctgattataatcatgaagcagttcttgaaagacttcacactgaacagaagtatgtaactcctgaattttccaagaaattctttggcgttgatgttcctgcatatgattgcacagatgaagagtttgatgcttatttagataaccactattcttgttcaaatgaagttatgtatgctattcaggcttggttgggtaatccaattgaatatgactatgatttcatgcgagtatttgagaaagtagaaatcttcaacattgaagaagaaattcgtattcctgatgctccagttgcattccatgttggaattacgtataagcagaaagaaagcccattaaaagttgattggttgaaatacgtgaaggaaaagtaatggatattggttcaggtagttcatatccatcatgtgctttgagtaatttcgctcctcataaatttatctatgatggtgtagaatgtgcatcaatggagggattcttgcaatccctcaaattttcttcgcctgaaatgcaagcacatgtatgtacactagtcggaaagtccgctaagttcaaaggtaaaaagaaacggtggtggccaactcaaacgctttattggaaaggcgtgccaatccatcgtgcttcagaagcgtatcagaatttactgacaggagcatacgatgcacttagtaaaaatgaaggattcagaaaagccttggctgctacccggaatgctacgctcactcacagtatgggtaaaaataaaatttctgaaacgattttgactgaacgcgaattctgtaatcaactttatcgtttaagaaatgctataaataatcagtaatataattatcttgttcagtgttgaaatcggtagacatggtgacggacaccttttgagctcgcatattgcatcatatgctggcgacggtggtaaatcgctgacggaatcagtcgtgcaggttcaagtcctgcctgaacaatctcggggcatagctcagttggatagagcagcggacttctaatccgcaggtcgaaggttcgaatccttctgcctcgaccatttcgcatcgatggtggaactggtatacacaggagacttaaaatctcccgccgcaaggattgagggttcgaatccctctcggtgcaccaaattaagacccagggaatagttgcttaaacttagtgaggaattcaacggcagatacgtctgtgcaactacataaggttcgaatccttatttccgtcttaagccgatttagctcagctggtagagcgcttcacttgtaatgaagatgtcgcgggttcgactcctgcaatcggcaccaaattcgaagggaaacttgcgtatgccctcgttgagtcgtcagatagaagagaatggttcgtccattgccgctagtcggttgttccctgtcgcaagcataacctcctgacgctatactcctttggatgagactgatgcctccgagttcaaaggaatgaatttagcaggtcatctgccagtaggtgatgctgtcgattctcagagccctgtcttcggacggggctttttagtatacaataatatcaaaactacagcccagataccttctagaggtcgtctgggcatttctatatccccagctgtataaatccattctaccctccagaaagtccttccagattccctaaaattatttgaaaatttgtgcacaaagttgtttacaacgccagtcaactcggttactatagctacatcgaaacaaaacagagtaacggagaataaaatgtctaaattcaactttatccaaattgaacgtggttataatcaatacggtactcctgaccgctatcgtgcggtttggattaaaggtgaacatgagaatgcagtgttcaacgtagcagaaacccgtgaactgaaagatttgattaaacacgttcgcaaagattggcctgctgttgaagagtactacgttcgagtttaccatgaagaagcttctacggttcaaatggctatcaagtttgctaaaactgttcctgctttggttaaacgaattgaagcggtaattaactgctaataattttggggagttataatgaactccccacctactgaggaaattaatatgtatcaggataagttgagattagtagcgcaaacttattttaaatcttttgccaggctgtttggtgaaactccaaattttccatccggtgaagaacggatggctgctctgaaaactatagagaacctggtgatttcaacttacaatgagtttgccgatgacccggcggttaatcgtcttgttgatatcgcagttttggacaaaatggaggaactcattaatgcatacaaatgaagttccaaaaactcttgctgatattcgtcttgaagctaaaatagctatcgagcgcctaattaaggcaacagtagaagaaggcaaagaaactgttcttattctcgggttagagtcatacgttactgattacatcgagatatttgagcgcaataaaaacgaacaaggtctaatcattaaaccatatgtttatgattggattaatccgtacgaataaaaacaccactactattgaaaggaaataaaatgtctattctgaaaaaacttgttgaattcatccgttctaaattcggtacctttgttgcacagaacacttctgttgaagaccagtacaccactgcagcaaatcgtattattgatgaaatcactaaactgcgtaccacgcatgttaaatcagtaaatgaagaaaagcgtctgctgaaacttgctgacgaaaaagaccaggcaggtgcttccaaagagcgtgaaattcgtcgcttgatggcagaaggtatgaatgtagaaacccatgctaaacttggtcttctgtatcgtcgtactgctaaggctttacgtgataaagctgccgaatataaagaaatgcgggcccaaattgaagaaactgtagttaagcttgatgaccaacgtcttgatttggcagtgaaactcgaatacatccgtgagacccgtaatgcttctgctctgggtattacctctgctgatgacgtgattgaaatcgcggaactcgctaaagtagatgtacaagacatcatgatgaaagttgaaaccttcagcggtactcagcctggtattgaaaccaccactgctgatgtccaggaatatctggaaagtctgaagtaattttaccggggccttcgggcccctaacttggataataaaatgttatatgaatgcgctggagatattccaatggcaacacctcaaattaaagaattaattgcagcaggattcccaacagaaatcactgatgttctcgaaaaatttgcttatcctgatactcggcctgaaaattggaaaactcgctataacgggtataacaccacagttttgccgcgggctatcgttcttaaagactattacaagctgaaaaacttaatttccagtatttcgtctatttccgatggagttaagcttgtagatatctttgcacttcggtacggaatttattctttcaacgattctccgtcaaatctaacatcagctcgtgctaatgccgatggatattttacctctagctccacaacgtatacagtagttatcgagattatctataataaaactagttatcgtctcggtattaacatggttaaatacgtgacatctcaggatgattatatcaattatttgaattactgcgtcaatgaattgccccaaaaagtcatgggtatgtttgactctaacaacatggtaggcaaacaattaatcattgatgaatttatcaaatattgccgtaagagggtgcagaaatgagtaatttatatctgccaagtgaacctcccgtttataattatgtctataaatttgaccaaactgattatgttctaattccggggatggtctgtgctgctggaactatgataactcttatcataattgacgtaatgaatttggctgaaattagcagtacatcattagtgaatgtaatattacttacatggggattaataggtttacttggtctaggattaattgagctatttcgttgggtaaagtatgttaagcataactgtgaacgaaaggccgaatggaaagaacagtgcaagaatttaactcttgaatggaatcgcaaaaagtcgtttgagtttattaaagaggtgagaagaaaatgaatgaatgtaaacctgacgggttttggaaccaagatgggctggcgccagcttttggaatcgtgacatggattttatattgtgcttttgtaattgttggagggacattctttggattgaacgtctcagagtttatgattatgcttttatttttaggtgttttcgcattcagcctcatgtggatgctaattatcgcgttgattaattgctgcacatttttagcttaccgtatgaaatacaagaagtggaaagaaaaagaagatttcaacacctggattaggagctgcagaaaatgattaagacttgttaccgtggaatgattaaagataatgatttcttgtattttttcctatttctgcttatttggttttcattctcgacttttgttggtgttggagtattttggggattttacttgttctctccagtatttggaaatgcgctgtattatttaggttggatgtcaggcgttggaacttggtttgcaatgcttgctcggtggttgcaattcgtttcccaacgacagcggggtgtatttgataagcccaaagtaaagaaagaaaaatctaaagatgattctcgtaatgaaactttatcctggattaaggagatgaaataatggctgttgcagtacatgtaaaatttgaaaatggtgatactcgccttctgtgttacagcgataatgaatcactgagcggtatcgagatttcacttaaagaagaactgcttggtattaatggacctatctgtgatttctcagtagagggttcatataattgtgatggtgtactagagtctatggtctatactgccatggaagatattctcgaagaaagttggaatgaatgtcaatgaaagagctaagtgcaggaatcttattctttaccgatgacaaacggcttttcatgggtcgtatgacaaatacatatatccagggcagaggctctagatgggatattccaaaaggacatgttgagcctggtgaaacaccaaaagaggcggctattcgcgaatgcaaggaagaaacagggtttactgagtttgaccaggacctcttatatgaccttggacgacatgattatgccagcaataaggatatccatctgtttggatatatgctccctgtgagcccagaaatgttcagaaattgccgttgcacagcttaccataaagatgaaaatggaatttctttcccggaaatcgacgcatttgctttaattaaaccttctcaatggaaatatgtgatgggaccaagtttgtataaaatcatgacacaaatgtatagcacagctcagtgaggttattatggaagaagccgttgaattaggcattccacacatttataagcatgagctacgatttattcacgatggaaaatggattagcatatttcatcctagagataaaatgtcgcgtatactattgaaatcacgatatgtcttcggtgacggcgagtatacaaaatcagcatattatatagcagaacagctatatccgggatttagtgaattgcccgaggacgatagaagagattatgtgtggtggaaagataaatggacgccgtatgaaaattgcagcattgacatgtttatagccaagtgtagggccaaataaatactcctataatttaataggaggtccttatggatatttttggcatgttgcgtatcgatgaaggatatgacagcaaaatttataaagataccgaagggtattggactattggtattggccacttactgactaaagacccgtcaaaatctttagctatttctaacctggacaagctagtaggtcgttctaccggtggccaaattactcaggctgaggcagaagtaatttttgccaaagatgttgagaaggcaattaaaggtattgttgctaatgctacattaaacccggtatataatgtattagatgatgttcgtagagctgctctgattaacatggtattccaaatgggtgtgtctggtgtagccgggttcccagcttcaatgaagttattactcgctaaaaagtgggaagctgctgccaaggaacttgcaaattcacgttggtatcgtcagacaccaaatcgtgctcgtcgtgtaattgaaacaatgcggaccggaacttggtctgcttatcaaggaaaataaatgaaaacttatcaagaatttttaaatgaatcccgtttagcaacagttggcgtaatgactgaatctgttggaagtaatcttctgaaatttaaaaaaggtcagaagatgaccgccacattagaagatggcacagaaattgaaatggatgttgttggatataactacgtagtagacggcaagttatacaataagagccatgccaagtttgattcattcgatgatttcacctcttctattgaagatgagtcttctcgcaaagcagtagcatctggcgatgcacgctctttaatggcacttggtcatgagcgtattaagtctaagcagaacaaacctggtgaagataactttgcattggtaggttatcaatctggtaaaacttctaacggttaccagcgtactgttaccatgtacatgcgtaatggtaaaattgcgttcgtaaacgatcgtggcgctattcgttacgctaaatcaattaagtagtttacattgagacggtaatgtggtatagtagccttattaaatgaaggctactatgacacgcattagcttaaaggatataaaatgaaaacctataaagaatttatcaccgaagcttctgtaggaaaggtccaaggcattaataaagatgagtggacctaccgaggaaacggctttgaccctaaaacggctcctattgagcggtatttagctacaaaggcttctgactttaaaagcttcgcctgggaaggacttcgctggcgtaacgatctaaatattgaagccgatgggcttaaatttggtcatattcaagatgttgttgctagtaacttagacgcagcttttgttaaagccgatgcagaccttcgccgttggaatttaaaattgttctccaaacagaaaggcccggtatttgtacctaaagcaggtaaatgggttattgataataaattggctaaggctgtcaacttcgctggtcttgaattcgccaagcacaaatcagcatggaaaggtcttgatgcaatggctttccgtaaagaattcgccgaggttatggctaaaggcggatttaaggcagatttagataccactaaaggtacgtttaaagacgctaatgttcagtacgcttacgccgttgctaatgcagcccgtaattaaaactaattcctaataaagctaaacacgacctctcctcatgaacgtcgagtcctctgagtgaagtagctttccctacctgtaataaggtcgagcgcaagtgcggtaaggggtttacatagtgtgtcgatggattaaacatgtgccaaggaatggccccatttaaatttaaaactttaccattctaggatataaaatgaaaacttataaagaatttatcactgaagcaaaagcaccaaaagtattccagatctgtacccaaggaaatttggataaagaattcgtcgatgctattgtgtcaaatcttcgtaaggaaggtgtgcaagtagattcagttgaatggaccaaaggcagtgataattttattattactgtatctaaaggttctttggctaaaattaaaaagtcttggggtgtaatgcgtgcttatgatttaagccatgacggccctcaagccaaagtacgaatgaatacccttaagggaggccgtgaatacgtttagaccttattgtctatacctattaagaatattactaggactaagcacgcgccaaggaatggcccctttaactggaatctaaaatgaaacacttaactcccatttatttgaccctgatgcatgcttttagagacgctgcagacagacgattgaataatcccaactacagtttttatgaaccgtcttgccttatgcgagagtacggtacccttcgtctagacggtggaagacaaaccggaaagaccacagccttatgccaattcgctaccgattggttgcttgaagatggttcggttataatcttatctactcgatacacgcaatcatctgaactgatggaaggtattctacgagaatataattcatcgcatttaattaataaattaccggctaacgagatagctaaatcaattgttccgatgacaatcagggaatttctatccaatgattcctcttacaagtttaggggaagaaagtttggaagagcattaattatcattgaagaaccaatgaaagttcccgatatgatgaagttctatgatatgtaccaggaagctatcagatggtctatgcctaatgataccttacctttatttttcgtgataggaatgcaatgatgacacagacagaaattgttgatatgattacagtaatggaaaatacaggattttccgatatgaagcaattaataacaatggttacggctggaaacctgcttgagtacaagcgctacaagtttctgtctggtccgtttaaaggtgcagaattcatttctaacgctcctaacacgaagtggatgaatcgctatcctaattttagaattgagtttatatctggcaagctcaaaggagtgattagttcaagcttaatcacatatgaccaacgcattcaagagaaaacaatgcaatggctgaaattgttataaagtgtcctccacatttagttgaaagcttctgcgattggttcagtaattctggcgagcaagatttctatgaagcccatcagaatggaacttggaatgaaaccacaaaacagtgggaagaagctacaacgtatataggcactcgcggatatggagttgacgagcctattgaaattgtagagtacgataaagaaactgacgaagaagttacttatcatgaagataaaataacttatctagaagcagctgcgaagtttcattcagacgaatggaataaaatgagtgtagttactgcatatatgcatggttggaataaagaatctaattaagaggaaatatgaaagcatatcaaattcttgaaggtgaacttaaaggcaccatttacatcgaagatggtgatgacgcacgagtaatcgtttcaaaagttcttaaagaagatactattacggatgctgaaactttttatggctacaaggcgcgtgaagtagaaattgaataccagccagcggtaaaaattgaaggcggtcagcacctgaacgttaacgtgctgcgtcgcgaaaccctgctggacgcggttgagcatccggaaaaatatccgcagctgaccattcgtgtttctggctacgcggtgcgcttcaactccctgacgccggaacagcagcgcgacgttatcgctcgtactttcacagaggcactataatgtcaatcgaagatattaaaggatacaagccacataccaatgaaaaaattggtaaagtgaatgctatcaaagacgctgagactcgtcttggtcttatctttactgctcttgaagaagaggcattaatcaactaccaagagtcagccaatgaacccaagcaggtactcgatgaagcatacgaacgtattgcccagattcgtacagcaaaacagaaactgaaggaagcttctatgtgggcttgccgtgcagtgttctgtccagaagaaaaatattaaaaagtagtttactttccttacgggccatgatactatggccctacaaataaaggagaatgaactatgtcaactaacccagaagtattcattcgcagaactaaactgcgtcgtaagtttgaggaagcttttcgctctttgaatttatcagttcgtgcccgagctaaggctgagggcaaagagcctttcttcactaagtactctgatcatttgttggaccgtgctatccaacgtgaaattgatgaagagtatgtattctctgttctttccaaaattcctaatcatcttaaagaaattaatgaattcttagcaatgccttggcttccaattgacccaaaagacattgatgaaaatatcgagtataagccaatgcggttagaaattacggatggaaatctgtggctaggatttactatggatattccaagaccgggaaaaggacctagtataaagtgtcgtatggcattcgttaatgataaacgtttgaaaggtaaaatcagcacaaaagttatacacattaattgaggtaaacatgaaaaaagcgcttatcggtctaatggccttatgttcaacggcctttgggtctgagccaactttcagtaatgttcaacttgacaacttgcattacgcatataattttggtgaacaatatcaaaaatccggaaaggaaaaatctccgcataaccgatatgataataacggcttaggatatataatggctgctatatcatggaaagaatcttcggcaggagccaatttaaaagcaggaaaggggcatcattcttatggggtatttcaaaattacttgcctacggttaaagccagagctaaattagagggcaaaaaccttagtgattctgaaataagaaaaatgcttaaatctagacagaattccgcggaatgggcatatattgagctttcatattggttaaatatacataacggcaatatgcgaaaagctcttgctagttataatgcaggatggaatgtcaaaaggggaaactcttatgcgtcagatgtcctagagaaagctaatttcttaaagaaacataaaatgctacatacaaaggtggaataatggtaaagtacgccgcgcttcttggattgatattggcattctctgctaatgctgaaaattcaatgacagattcacttcgtatcgctaaaacattttgcaatacgaactctgaatgtgttgatatattagcgcttgaattagattcagcattcagcgatggagtaaaagattcacgtagcccggcccagtggacaacactaataaatcgtaaggctaagagcatgaaagatttatgtgtcaatgctcctaacgaaaatatatgtttaatgtatcgtgaccaattaatggctcgttatatgtcaggactatcgtcaaaatgaaaaaagcagctattttattatgctgcgcattttcagttaatgcctgggaaaaactcccaggctatcctgaaactgtacttgcagcacagggtactaaaatagaaagcaatggcccattcaagaacaacattgaaatagcatttgttcctagcagtagaaaattgctaatgtcattttataattatcaagataaagatgaccaggtgatagttccacatgttgagtataatgctcgcggatgtggaatgcagagtgatggcgtttctattgacggagtaatgcaccctaaagaacaaggcgtgttaaaccctatccttaactgtaacaatgctatatttttaagagtatacaataatcttaatgaatatgcaacttataaaattccgtaggtgaataaatgattactggatatatcaagggtaatattgtagagttattcatgaagcatgaatgcgatattgctcatggatgtaattgctttactacaatgggtgccggtgtagcagggcagcttgctaaagcatatccgccgattttagatattgacattgatgaagaccgttattatgacaacaatttagctaagcttggaactcatacacgagctacccacaagaatggcactgcgtattgctataatctatacactcagtatgcgccaggtccaaatgttgattatggtgcaatttttaatgcattccatgaactaaattctggtcgtgttgtttataatcgtcctctatacattccaaaaattggagctggtattgctggcggtgattgggaactaattgagaaattaatcaatttagcaactcctgatattgacattatggtggtagaatatgaagaagctaaaagctaaatccgtcttgttagaggtaaatagatgattactgaagagcaaaaagctaaactgtggcagttgattgacgattatgcaggtgctgagcaagtagtagctattagtgccatttacggaaatggcctacccgaagaatacgatgaactcattcgctctaagaaagctatttctgattttatggagaccctttaatggctcagctttatttcaattacgcgagtatgaacgcaggcaaatcagctaaccttcttacagcagcccataactataaagaacgcggcatgggaactctcattctgaaacctgctattgatactcgggattcggcaacggaagttacttctcgtattggtctacgtcatgaagctaatacagtagacgaatctattgacatacttgaatttttcaagtgggcacaaacacaacgtgatattcattgtgtatttgtagatgaagcacaattcttgactgctgaacatgttcttcagctatgtaaaatcgttgacttgtatgatgttccagtaatggcatatgggcttcgcactgattttcgcggcgagttattcgaaggttctaaagctcttctttctgtagccgataaacttgttgagctcaagggcgtttgccactgtggacgtaaggctacaatggtagctcgtattgacgaaaacggaaatgctattaccgatggtgaagtagtagaacttggtggtgaagacaaatacgtttctctttgtcgtaaacactggtgcgaactggtaggtgtttataatgaagccaagaacgtataacactatcctgatgctaattatgggtatgctattcatttggattggtgtagcagcatctatacaaagtgatagacgagaagaaatgcaaaatcgtcttaattccgaatgtaaagtattggcacagggtaaagactttattgctaatacgaatgggtgttatattaaacatgagtagcttatttgctatagcgggtggtatagtattagtacttgtgattgggttcttactatacgtaatattgctttcgttattggtttaatatgaaaaaatatgtgatgtgctatcgttgtcttcatgtatatgattacaacactgctccaaagacggctaccaagcgtcttaaaaccaaagaacctgaatgtccaaaatgtaaatgtaaggtcatctattcatgaatattaaatttttcaaatcaggattttactatcgttgaggtaatttaacttaacgaggtaataatgtctagaacaattcgccgtaaaggctggcatgtagtaaaatcttccaaatggaacgatcagaataataacgtttattttggaattcattatcttcctgagccatacaaaagtatgaagaatgctcaagaatattatgataataaaatggaacaaaacaaggaaagaccgttagaggccaagaaactgatcgctaaatcaaagcgtgatggattctggaaaactctgcgctggacgcgctatgcaatgccggttccgcgtttatttcataaagccgaaattaaacgtgcattgaagtatgatgaagaatataactgggacgaagcaggtgctagaactattgagcaaggaatctgcgaatggctttgggattaagtaacacatacttatataaatactattactaactgatgaggtgtatatgaagcatttgtcacataagcaactccgtaatttgaccatttctcaattagacgaaattcgacttgaggttgggcatattatttcagcacttcgtatttcttataaagaaactgattctgaagcggactataagcgtatgcgttctcacgaaagatacctcgatgcagttaaggctgtacttcagcacaaacgtaatactggacaaaaataataggaggccgtatggcctttaatcacatttgcttagccctggtgttgggctgcgggatttcattcccagctgcatcacacgacgacatttcagattataattcgtatgttgagggagctctacaagtttatgctaaatttaaagagcctagtaagcaagagtctgaacagttctattcttttatacaaagtaaatggaatagtgagtcttgttctaaagattgcgattctttaggacgttcagcaggtgaagaatatgctaaccgcatgaggatacaactcgataatgaagttcaatgattttgtaaaggacggtaaacttactccgcaagatgaattcatcggtttacttatggtgtctcaagcgtattttcattcagcgcattttgataccaaatcgtatgccagacataaagcgtatgaagttttctttaacgagattccagatttgatagatgcttttggtgagcagtggttaggattctcaggtaagagttatacaccggctttaccatcgcagaaagagctgccaaaggacaccattgaaatgctagacctcattctggctaaggccgatggtatctacaagtcagttcctgccgccctccaaagtgttctggatgacattacaggtctatgctacaagactaagtatttgttatcattgcagtaataccctccgcctccttagggaggcattttcttttcaaaaagttgtttacttcccttcattacatgatactatagacatatcaacaaccaaacgagaaaaacattatgattaagttaaccactgagcttcaacctggaaaaatcttttatcacgtgtgtggtgttaatcgcacagaaactaaaagcggcgaaataacgcgttacattgttgcatcaggcacgtatgatgtagaacttggtcttcgtggtgtgtattcgcgaaaatcacctttcttcaaggtgatttgtgaatatgaaaactatgctggccaaactgaaagctattcaactgagcgttctgcacatgatatgggcgtattcaagccaggtgaaaaacgttcggttcataatcttaatcgtgggttttggacgcgtgaagaagctgaacagttcattaaagaacttcaggaagacaagttcagtgacccagatgaccaagcgtatgcagacagactgactcctattgaggattttcgtcgacagaaagaatttgcggattcttatcttgattcctgtgattacgactactacgactttgatgatggcgaagaatgagaaacgttttacttatcatctacattgtggtacaataccagcatccgatgtttacatataatttggtgcaaatgattctggagagtttgaaatgaatggatggggtccatcagatgacggatttgcaactcgtgaagctacaatagctgacgggattgaatgggcccgtcttcagaaacaactccaagaacagcgggaatccgaagagttctgtgttgattgtgatgaggaaatcccagtagctcgtcgtctgttggttaaaggctgtcaacggtgtgtagaatgtcaaggaaagtgggatacagtaatgacttctgcatataatcgccgtggttcaaaagattcacaattgaggtaattatggaaagtattcttgatagtaccaatttagataatccgtacagcgatgtgcatgtaaaggttatcaactcttattttactaaaaagttgagtcgtatcgtgctaaaacagggcaatgatataattcatcttgatactaaacaaattgattcattaattcaattcttgatagaggcaaaagatggcgagtaaattagtatgggacggaaaatcccgtaaaggcgatgcagtaattgaggacgaaagtccatacattaatgatttgcatcttaccccgatagagttatacggttctacactcattgaaattgagcgtaatagcactattttaatgattgataaatccgatgcagaacagcttgtaaaatatctcgtaaccatgattccaactatgaaggactgataatgaacatcaataaaaactcttggcatttcaaaatgaacctgtggtttaaatctgacaacatgtggaaaatgccaaaaactctatgtggatacttttggacaacagttcttcatgttgtgttttcttcggcgattattacattcatcggttctgttgcatggatgttcggttggccgattgtggcagagacaggaattctctcttggataggtattagtttatccgcgttttggttaaacgttgtagcagtaccagttggcgcagcggttatagcagcatttatgcttttgtttgcagctatagcttttggatttatttttggtttagaaaaatttaaacactaccgtattcagaaaaagtataccaagaaactggctcgggtaaaagcgggtcttcctgcagatgccgaaccgtcggtattcgtccagtatttaaaagctcgtaagcagaaagtctgcccaatgattgattatgtagaaggtgataaatgaaacgttttattcgcactaaatttgaagaaagccttattgaaaaacccttaaaggttggtgataaagtagaaattggctttgataatcaaagcaatcgctttgagcttgaagttgaatttatttctaccttcaaatgcagctcagcgcatacggtatcgattttctttaaaagtaaagacaacaaaatcgtagtatattatgattatggtagtcgagaaacaactactgtggtatatcctaaagatggttaccgtggaatgtatatcgatgattacctgaaagagtcttcagatgatggattttatatctgcaaacttttacccggtcgttctaagtcggtaattaatctcagcagccttaaatacaccatttacgagaagtgtaaagttaatgttcctcttgtagttggtgataaattctctacaactaataactgctatgaagtactagcaattgcagcagatggaagcatgttttgccagaacgataaaggaaaagctcacgtgtttagtacaaatgacatctcgctcgttaaatcaatgctagatattacagtaggtgaacctagtgaagaatgatcaagtttatatcgttaacggccttcgggccgtctttcgtgctaaaaccgaacgtggtataatttctacatatcctattgctgaatttacttttgatgacggcgaaaagattactgttaaatttattcctttgactggcaaatacagcggcaaagataacattgatttagacatatattatgagggcgggtcatggaaattgaactcgtaactactaagaaaaaacttagtatgagtattgtaaaacaaatgccgctagcttcagccgaaaacattaaattcgcaatgatggacccggaatcacgggtcctaggatatatcaatgcatttcgctggaacagacttgacattcaggtggcaatcattagcacaggaattgattgggcattagttcctatgtatgaaacaacattacgtgaagaaacttgtcgtgagcagcatcctgatgggcaagagtatcatactcatgaggtagtgtattattacaccagtcaaaaaattggtaatgtttaccgtacatcaaaaagaactacagataaaactcgagcagaagaagcagccaagcgttctaatgcattagttaaattcgctaaagggaatcatatttacttatgaaaacaatcgtaaaatcttattttggttcacatctgtatggtacttcaactccagaatcggatgtggattttaaagaaatctttgtgcctcatccgcgtgatattctaatgtgtcaggcgatgaaccacaccaatcgtaacactaacaacagcgcaaccaaaaataccaaagacgatattgaccatgagctgttcagcttaaagtatttcttcaagctcgctgctgatggtgaaactgtagcgttggatatgctgcatactccgccggaattggtagttgcatctgaccttcctgaagtatggaaattcattcaagacaaccgagctcgtttctatactactgatatgaaagcttatctcggatatgttcgtaagcaggctggtaagtatggtgttaagggttctcgtttagctgatttgcataaagtcctggatgttatccgagatattcctgagtggaaatatgacgatcgtcccaagcagaaaggcattaacgatcgttggaaagttaaggacatcgccgatcgtcttccggtaggtgaattccttgagtggaccacctttacagaccataaatcaggtcagcagtatttctataacgtgttaggtcgtaaattccagacaactatcacggttaaggaaatgaagtactcccttgagaagcttgatgctgaatatggcgaacgtgctcgtaaggcagaagctaatgaaggcgtagattggaaagcactgagccatgctcttcgtggtggtcttcagttacaggaaatctattctaccggtgaccttaaatatcctctaacacaggctccattgattaagaaaatcaaagcgggtgagttaccgttcaaagaagttcaggatattttagaaacgaccgttgacgcagttgaacgcctggctcatcaagccgagaagaatggaatgcctaagaaagtagacatgaagttctgggacgatttcgtcgagaaggtttatcttgaaaaccacaattctttctacaaatgatacaatgaaggtcttcttgaattacggaagacctcataaaggtagacggtggtatttggaagcagtttgtagagagactggtcgtagagtgaatgctaagttctctgctcgacctactcgaaaacaagtacatcgttttatgtcatgggccggagaaactctccggttctcactttactgggctgaaatatgattttactttggagcatagtagtgccaatcgttgttgcaataatttactttatcgtgggttggtctgtctgcaaacatctaatcaaaaacggaactattgagaaggtaggagagtattggttctatctcatcttttggttccctgcttttattgttggagcgattatcatgttcttccgctgggcaggtaaacttccaaagcgtatcgcagaaaacgctatcaacaagcacgcataactgaggagccttcgggctcctctttttgtttcaaaagaatgcataaagtagtatacaagctcgcgagctggtgatactatagacctgtaccacccaaacagatacaatggagaataagatgaaaactttagaaatcgtcgtaaacaacattaataaagcctttaaagctgctgaagctcacggcgtagaatttgaaccaatgatggtaggagaagcgttctctaaacttgctatcatccgtggtgaaactgacaacttgattgattttgtggatgacttctatcttggttcaaaggtccgtccttactacatcaatgaaattttagaaaaataattaaaaagtagtttactttggagctgtagaatgatactatagctccatcaaaacaaaacagagtaacggagaataaaatgtcaactatcaccatcaagaaagggatttacttcggcaaagagatttcaggtacttatgagttactcggtgagtggttcccggatagcttaagtgctgaagattctcgccagggtgatggtaaagtctttgttgaactgaatggcaaaaagcgtggtgtttgggtattcaaagatgatatcacaattgacggagtagctgctaaaattgaagttgttgaatctgttgatgaaatgaaagagcgtatcaagaaacgctttaacgtcatgggattaatgactaacggcttaattcatgggaatattcgttctctgattatctccggagcagcaggtatcggtaagacttactctttggataaagcattacaacatgctcatgatactaacgctattgattacaaatcagtgaacggtaaaatctcaggaattggtttatactgccgtctttgggaatcacgtgaagcaaattcagttctgctcattgatgatgtagatgtattctctgatatggacattcttaaccttctgaaagctgctttggattcaggagagaaacgtaaagtatgctggagtactgcatcttctttcttggaggataaaggaattcctaatgagtttgagtttgaaggtactgtggtctttatcactaacgttgatattgaccgtgaattagagcgcggttctaaacttgctccgcatcttcaagccttggtatcacgttcggtttatcttgaccttggtgttcacactaatgaagagattatggtccgagttcaagatgtaataatgactacttctatgttacagaaccgtgggttaagaaattccgaagttattgaagttttggaatttatgaaagataacgtaaatcgtctgcgtaatgtgtctctccgtactgctctttatattggtgatttcgttgcgactgaccgtaaaaactggcgtgaaattgctgaagtaacaatgctgaaataatttaaacgggaggagaaatcctccctaactgaggaaaatataatggctactttaatttctaatgatgtaaaacgtgttttgtttaaaggcggaatgtatatcgttgatactcctaaaggtgatacctcttcctggactattaacgagtggattaattacattgatgaaaacggagcgtgggtacaatgagtttagcagctattaaagatattgaatgttggttaaacgatattaaagtatatccgccgggacacatctttgcaggtaaacccaagggtaaagcagagaaagcctgtgaagcaatctgtgaaaagctttataagtttaattttggcgataagaaaaatgtattagctgaagtccattcttcttatcatgaactacgtgtaatggtaaacgtatttcgtgctcctccgttcattgagctaaggaaagaatacgctaataaagtatttgatactttccttgcaaatgtgcaggatgcagtaaagcatttagacgaaatgcataaacaacaccaagatttaaatgcctattataagccttggcgtaaatcataccaagagcttaaaaaccgtattgaacttattcgttatgaggtgctaaaatgaaatgggtaatgacagaaagtgaagcctatgcagcgtatgtttcaccagacgatcgccgtagtgagttgtttggttattatggttcatattgcgttgccgaagaagcagttaaggggcagtcttggtggggctcagatggtacagttaatcataagccaacggaactaattacattcaccgatgaaaatggcgaatcatggacattccctaaaaaggctgctatcaccgtccaggaagaaacacctgaagctaagcgtaaacggttggaaaaaattaaagaagccgctttggcgaaattaaatcctgatgaacgcgaggagctcggattatgaacaaagaatttagtactactcgtatggtagatgcttttggatatccgtgcaacggttatcgtgaatttattcacccggaagttgaaaatcaatttaaagaagtcgtaagaaatattttgctcaatgcatttaaaactcaaggaactaacccgagagatttaggcatttatcttgaagaagccatcagagacgtacaaaagagcgtatcggctaaacttcattgggctgaagaaaatattgcatggtcaaacaagaaacgttctgatttaaattggcccgctgatcgtgaacaaatcgtcaattatgctaaggtgtaataatgttaaaaacctatgaagttaaatttaaacgctttattgatggcaaatgctatgacaataaagaacgttcaacccgaatttctgcgccgtcagcgtaccaagcagtatttcagcatgggcagaccaatggcgtggcattccctgagcaagacgttgaagatattatcttagatgttattgaggtaaaaggtgtttagtactatagtgtctatacatgcgtattacgaagggcagttaaatgctgcccgaaccaagtataaacgagggatggaggaatctgtggaatgtctcaaaggtattcagacgtttgcccagaagacccagaacctcatcttgatggaccgtaaacaggtctcattggatgaagagctaaaagcctctaagatgattatagaagacaataggaaataccaactgaaattgcttaagcggcgacaacaccagtcgccatggtttaacagtgatttccgatctttttaagggccttcgggcccttttgttgtttacatcttagaaaagccatgataagatagcttccgttaactaatgaggagattgaaatgaaagcacctacttggaacgaacttcaagaaatgttcaatactgaagaagcttttggaactatttctgaaatggttgagaatttagtagattctccttcagaagataatcttctgtgtttagcacagttcatcattgaaacctacatcgagaatcagaaatgacagtatacgtagatgtcttgatgaatcatggttggaaaatgagaggtcatcaagtaaagaactgtcatatgtttagcgacaatattgatgagttgcacgctatggcagaagctatcggaatgaaacgttcttggttccaggataagcgagttccacattacgatttacgagatgttcgccgcaagcgtgcagttgctttaggagcagtagaggtatctcgtagagacgcagttctgctttggagaaaatttttcacaaagtagtttactttcggcgaggctgttgataagatggtctcgtcaaccaaactggagaataaaatgaaaactttaaccgagattatctctgcacttgttgaagaaaatcgtgtagcccgccaagcacaccgagcgaaagttgaaaaacgcgccgaggagttgaatgctggatgggcgaagacccgcttcggtcgtgaatactttgataaagtggtagctcctacttggggcaaagacgatcgtcctcatgctccctttgatggttatctttgggaaaatgaattaggtgaagttgaagcttatcacgcgggcagttacttgccatatgttacagaattggattcactggataagcctgagtataccggtgaccacggctggtggaaaatccgcttaactcaagaagagtacaaagaacttcgggagtatggttatcctcttgaagtacgcattccatataaagaatggaaattgcaagatggcacagatgttgttatggcagaagttagagctcataagagcatcttagaagctatccaggaacattcaaaagaggtctttgataatatattcaatgagctgaataagaataaaggggatgccccggaaggacgagtgactgtctctggtaccgtaacgtcagtaaaagtttatgaagactattacggcgtacaatgtaagatgatggttgtgcttgagaatggagctacggtttacggctcccttccaaaaagtattccgtttgaatacagaggcaaagtacagtttactgctacatttgaattagcgaaagatgataaaactcatgctttctataagcgcccaagcaaagttataatgcttgaggaataattgttgtataatgggttcagggagattttgagatactctttgagcccagtccaaaatagaggaaaagataatgaataagaatgaattaaagatgtttgtagccggtgaatttgataagcataacagaaaaggactgtcaaagcgtgagaagcacgtaaaggttctggcagctttacatgatttaaatccagctgcttataatgtagcaattgctggtaacgtagctcgtcgtgttctaaatagcatggcagcacatgaagccaattatgctggttttgttgtagaaaacattcgtcgttctcgctggttaggtgcaatgtcagcagagaaacagctcaaaaagtttgctatcggcaatgctaaaatttacggtcagcgttatagctttgcggcaggggcgtttaaaactgaagaaagacatgaccgcagcgctgctcaaatcttctgttctgaatttaatgcaaacctgcgccgtattcttaatcgttcaatttgcttacttaaaggcgatgagcgtgtgaaataccaggtatcttctactagttctagaaatcctaagggtgtttcatttattcgtgccgaagagcttgacaatgtaactgtacgaattcatattaatagccatttgtccagcggaaagtatccggctcgggcgcttttagcgcaggttcgtactgcattagagcatatggatgtagttaaaaaatcatgttgcaaacaacagggtgaaaactcatctgttcttgaagtacatttggacccatttaagatttttcctaaaacattgagcaccaccccagttattgatgaagatgtagcacatatgtatctcaatgttgttaagcctcttccgttaacaccagtaaatcatattgaaatcgctaagaatagcattactgccgaaatggaatcggttaagcggtttattgatacaaaagaagctgaattaagtaagcatgaattgatgatggcagatttagtcaaatcgcttaacgagtacaaagagcggtatgaatctctcgagtatgcccggagcttactgtgaaaaatcaattaaaagaagacatggtcgttgatgataacgaccttgaaattgagtttgagtatccacctgtacctgaatttaaaattgactgggatgcctgtcttgaaatggtagaccgtcgagaagctgcagctaaacaagttgtgccttgtgaaaaatgtggtagtattcaagtacagcttgttgattggacaaccgatattctgaaaatgaaatgtcggacttgtaagcataaatttgagagaaaattaaaatgattactaaaactattactggtgctaatactaagttttttgtcgagtatgctaataacctcataaaagacaaaaactttgataacatcattgcagatatgattcttgacgcatacgaaagtggcatcgaccctatgcagcttaaagaatatcttcgagcgacaatggattttacagttcttaacatgatgcttagaactgatactgaattcaatgaaatgattgctctgcgtaatgaaggcaagttcaatttgactgatgacgaagtattagcgtgtgctgctcacgaagcttggaagaaggtgattaaatgaaaaccactggcgcgctttggaaagaattttataacgatgaagccttctgggaaggctattatcatgatgacactttaatactctttgatgatgttgaagtagaagaatatgaagacccttcgcctgatgcggtagtaaaaattgaaagcggatatgtttacaaaaccgatgatttcttcacttcccatgatttgagtcttgcaactttctttaaacgttggaaaaagaaacagaccgctcgcactatggtagtcactgttgataaagataactttgacgaagtatttgaaactatctctaatattcctggagtgaaaaaggtaaaatgattgacattaaattagatacttatgcagtacgccagttattcccagaaggtacagcagcccgtgctcaactgcaacagtcagtaatcaataacatcgttaaagaaatggtgttaaaagattcccagaataagttgaagcaagcagtacaatccgaaattgctattgctgctattgatgttcctgatgtacgagcagaagtccgtaagcaactcaatgaattattccattcgcgtggttggaatgatacatctgctaaacctgaaatgtctcagaagatgcgaaacgctgctcaagccagtgctaaagaagctattgatgaaatggttcgtcagactattgaagatgcagctaaagcagcagaaggtcgtattaaaatgacaatcgaaagtgctaatcgcagaattcaggaaatcatcgtccaagcaatgaataaaaactttgctgaccaaatcaatgccgccatcgcagctaaactagaagaacactttccggtaaaagcaaaatgaataaaatcgatttcagcaaactaaaagtgccacggcaagcaatttctgagcacatctctaaagaactaattagtgttcaacctataccaggcgatattattaaagatgcactggcagcactccgtgaagaagaatctaaatctaaggctgaaaatggctcgtaaacgatatatggaagaagccgaacgagtaatgctactcatgtattcggtttattataatgagactggtcaaattgctaacagctccaatctcaaaggagctatgacccgcggcagaaattttgctcaagcagcaattgatggcgaagtaatgaagcgtcttggtatgacaaattacgttaaagcagtacgccatccagattggaaaacagttcaagcccaagtgtttaaggaaatagaagaagatgttcacggtttttggttacgacagcagcattcataagtgtgtattttgcgataatgcaaagcgtttgcttgatgttaagaaacaagaatatgcattcatcaatgtaatgccagaaaaaggtgtatttgatgaagtggttatcagtgatttgcttcgccgtttaggacgtgaatcgcaagttggattaactatgcctcagatttttgctcctgacggtacacatatcggcggttttgatgaactccgtaaattcaaattcaatgcatgattatcgtggaaccctccttcgggagggtgatattgtagctctttattatggctatggcggattagaaaccggcgagattaaacaaattaaaaatcatcgagcaaaggtagaggtaacttactctaatggagttaaagttatgtctaaatggaaatacggcgagtgtatggtgaaattatgaaatacccaattgagtttgtttttcttgaaggcgaccaagtagatttagaacgtaatcttcgtgaagcaatgattgaaagagctatatctgatccacagtatgctttcatgcaccaatggggtgaattctttgtaaagcaaggaaataccattcatggtgttcagtggagttatattggtcttgaaattgattacgatgatgctggtaatccgttagggtcttggcgttgggaagatgaagaccttggtccagactttgaagttgactgttcttggcatgaggaagaactatgagttatgatattggcgatttaaaagctccacgcatggtaactatttcagcagaagagcttgaacgcctgcaagcaattgaagaattgctgtgggaaattgaatgttcgcttccatccggtttagaaagctggattgatgatgaagatttacagaagctgcgaggttaaaatgactaacgctgaattagtaaaagaaatcaagcatatcgctggcgtcactggtggctgggacgacaactacgattttgaatatccgccaaatgctccagacgatgatgcagaagaaatctttgttttagtagaagatggagattggacacaagagcataagtatcaagaccgtactcaaatttggtattatcctgctcgcggtgttcatttcatggtatcagaatcccgttcaggttcatatcatactgattggtattatagtcctcctgaagtagatatcgttactcgtcatgaaaaagtggttactcgcactgaagttgaatggcgtattgaacatgattctgttaatgattctgaaccaacaccatgcaaagtagcaaaggtctaaaaccctggtatgcggctcgttgggaaactgtcgagccagaggaagatgctattcctgaagaggattataatacctctgaacctaccataaatgaattgcttgattatgaggacaaagtgaatggggcttattggtaagcagtttgaagttattgagaatgatgatgaactgagcgaacaatttcctatgttcattccgggatttaagtttcaagttatttctgcagataatgaagacgaccttgaactggtaggaatcactgcagttattgatttactgacaaataaaatcattactattaacgacccaactccacacggcgaatcttggttctggtgcttctacagcgaagatactatgcaccaaattaaagaaattggccaaggtgaagatgttcctctgatttctgaaattaaacttaatcatttccaaggtgcaatcgttccaattaccagagctctttatgcctttgctggtcaggaaaattgtgattcagaagagtatgatttaatgcaaaaagctgcggattacattgtcgcacttgaacaacgtcttggagttcgccatgtctaaatcgtgcattactaaaactattacagtaaaaattctcgatttcgctgatattcatcgtgttacaagagaaattttacgcagtcattggtatgaagttggcgatatagtagaatttagtggaggctattacgacgatgacatcaatggaatggcttggactaaaatgagtcttcttcatgaagaaactaattcatacattgagttcactgtagacgattatgaaggcatatatgctttctgtacttcgttctgcatcaaagaatctaatcataatgtatatagtagctactcgttaatttaactataaatactcttatctaatcgctgaggtaagagtatgttattaaccggtaagttatataaagaagaaaaagaaaaactatatcaggcacagaacggattatgtccttgctgcaaacgtcctttagatgaggatattcaaaagaaccacctcgaccatgaccatgcgttagaaggtgacaatgcaggaaaggtcagaggcttgctctgtaacctgtgtaatgcggcagaaggccaaatgaagcataagttcaaccgctctggtttaaaaggtcaagatattgactacctcgaatggttagagaatttgctggtctatctccgccagaatcgtaaagacagtaatattcacccgcaatatgttgccgatatggctaaacgcttttcacgtcttggtaaacctgagatgattgctgaaatggaattgcatgggtttacatacgaggaaagtgatggaaaatcacaacttgcttcaaaatacaagaagcagcttcgtaagagtttaaaatgaatatcgaattagaaatccagggacttattaataaaaccaacaaggacctcttaaacgagaatgctaacaaagattctcgcgtttttcctacccaacgtgacctgatggctggtatcgtatctaaacatatcgccaatcaggtcattcctttctctgtaatggaagcacacaaagaaggtgttatccattttcatgatatggactacagtccagctttgcctttcaccaactgctgtttggtagatttgaaaggtatgttgcagaatggctttaaacttggtaacgctcaaattgaaactcctaagagtattggagtagctactgctattatggcgcaaataaccgcgcaagtagcatctcaccagtatggtggaactacctttgccaatgtcgatttagttctggctccttatgtagagaagacattcgctaaacatgtacgtgatgcacgcaaatatcaagtagcattagtaaaagattatgctatttcaaaaacagaaaaagacgtgtttgatgctttccaggcatatgaatatgaagtgaatactctgtttagttcaaatggccaaactccatttgtgactatcacatttggtatgggaacgtcatgggaagaaaaattaattcaacgagctattcttgataatcgtattcgtggattaggacgtgatggaattactccaatctttccaaagcttgtgatgtttgtagaagaaggcattaatctacgcaaagaagacccgaactatgatattaagcagcttgcattagaatgcgcagctaaacgcatgtatcctgatatcatcagttctcgaaataatagagcaattacaggttcagaaactcctgtatctccgatggggtgtagaagtttccttggtgcttggagagactcttctggcaaacccgttcttgatggccgtaataatctaggggtagtaacactgaacctccctaggatagccctggatgcaaattataaaagttcggatgacagtaataaactgtttaaactactggatgaacgccttgatatttgtaaagaagctcttttaactagaattaaatcacttgaaggtgttactgcgtcagttgctcctattctttaccaggaaggtgcttttggtgtgcgtatgaaacctgatgatgaaattcttgagctattcaaaaatggacgtagttcaatttcattaggatatattggcattcacgaatttgatatgcttacttttaaaggaagcggtaaactcgtcctgaagtacatcaacgctaagctaaacaagtggactgaagaaaccggctatgcctttagtctgtactcaactccggctgaaagtctgtgctatcgtttctgtaagattgaccaagctaagtttggtgatgttaagggcgtaactgataaaggctggtacactaatagtttccatgtgtcagtagaagaaaacctgtcgccttttgaaaagattgaccgcgaagcaccatatcattctattgctaaaggtggtcatatttcttatgttgaacttcctgacatgaagcgcaaccttgaaggtcttgaagcggtatgggactatgctatcgagaagttggattattttggtgttaatatgccagtagataaatgtctttcttgtggttctactcatgagatgacacctactgaaaacggattcacttgttcaatttgtggtgaaactgatccaaagaaaatgaatacaatccgtaggacttgtggctatcttggtaatccttctgagcgtgggttcaatcttggtaagaacaaagaaattatgcatagggtaaaacatgttagagaaaccaatgaagcaagttgattggaaccaacttagcgaatggggattgatttggaaaatcaacaaagaggttttgcatccgcttggaattgctataacccgtgaccctgaaagtggattatcggctggggctattcaaactgatgagccctggaaatatgatgcagaagtagaagcacgtaatgaggtaaggttcaatgaatttcgacagaatctattcaaatctagttaattctgctgaacacccatctaagccccgtcaaactaaagccgggtatgaacttcatcatataattccaagaagtatgggtggttcagatgatttagacaacttagtatttttaacttataaggcccactatactgctcaccatttattggctaaaatatatggtggaaagatgtatgatgcatattggataatgagtaatagtaagcatagaaaagttacttcttcacaatacgcgtatgcaaaagctaagaaatttgaaaatcagcgtggcgcaaaaagaagcgataaaactaagaagctaatgagcatagctaggtctaaagtaactcttcctgatgattttggaaaaaggatatctgatgggctaacaggaagaactttgtctactaatcataaagagcatatcaaaaatagttctagaaatcgctttaacaccaaaacggttattggctattcaccagacggaaatacaatagaactaactggagcaactgaaataagaaatgcaggattttttcattctgctgtttataaatgttgcaaaggaattcaatctattcataagggatatacttggaaatataaagatgaattatgatagaatttatccatgcgatttcgttaacggccctggatgtagggtcgttctcttcgtcactggatgtttgcataaatgcgaaggttgttataatcgtagtacatggaatgctcgtaacggccagttattcactatgaataccgttaaagaaattgcatctcacttaagcaaatcgtatatccaaggccttaccttaaccggtggtgacccactttatccacagaaccgagaagagatttcaaatttagtttcttgggttaaagcaagatttccggagaaagatatctggatgtggacaggatataagtttgaagatatcaaagatttagatttgctacaacacatcgatgttataattgatgggaaatacgagcaatcactgccaaccactaaaaattggcgtggttctgataaccaaagactctgggtaagaaacggttctacctggacacatgattgaggaaatagatatgctgacttataaaattatgtttaccctgaaccacatggctactgaactgtttggaccggaatttctggctatgacagcgttcatcttaactatttaaggaaaattatgaaatttattaatgctattcgtaaatttatttctaacgttatcgctttggttgcattaacggcaggtgctttcgtagctattccatttattgttctcatcattatttctgactggattaatcctactaagaaagatgaaaaactgtctaatgaagaatttcagaagcgtgttaatactctgactgctaaactccaacaggtcatgaaatgatagaattattttgttgtgataagtggtacaagtttaaagaagactctgttgataaatggctaaataacgcatcgtcaaaggatgttgaattctacaacatgctcaagtttaagccatttttggtaacagctctgacacaggacgggtctgttgaacgagttaagacattcaatggtgttagcatagatgctgatgattttgatcagtggtgtatacttaatgatgctgaccgttgctatctcgaagaagccactgttgacaaaatttatcctatgactacagcggataaacttgaattaattgaaagattgatttctgagattaaggctgaactatgatagaaatctatggcatccctgaagaagtttggagatgccctggatgtaaagcagttcgtgacttgctcgataagctgcaacttccgtatgagttctataacgtaatcaacgaggtagatggtcaaccggtttatgaccgtccgttgattgagtcacttgctaaacgcatcgggtgctatccatcgcttgctattcggtatcctgtcatttttatggataacgttaagcagtatgacattccaacattcaaaaccaatcttattgctgctgggcatgacccagatatcatagaagattaaccggttcctttctaaggtcatcttgaccaccttctgtatatttctatacccttcatttagaggttcctatgggacctctcttttatttttaaattcatttcacaaagttgtttacaagctagttgatgagtgatactatagctctatcaacggataacagcataccgtttaactcgagaggaaaatatgaactggttaaattggcaagaagctctagaagctatgagtaaaggctgtaaagtaaagcatgtgcattttactgatgacgagtacttttatatgcgtaatggcgctatccgtgacgagaacggatatgatatgactcgctggtacaagggtgagtcttggcaaaacgaacattggtacatcgcatgaaaacatttaatgtaggtgatatcgtccgtaccagaatttgggatgggtttcaatttgaagtagttgtctacgttggttcagagggggttctgcttcaccgaattaacaatctgattgagtggcaacttgaacgcttcgtgaaatatcatgaattcaatagctaccactgcactgtagctccggttgctagtaaagaatactacgatatgctcgaagagctaaaatctctcaaagattgatttgctacaggagatttgatttagaatctcctttgtcaaaacaatcgttactgaggaaattaatatgtcccaagcaatcaaaaacgtactgaactcttttgcttatgataaagtatctgcaatgctggaagaaggacgttgtgtaactccgtctttgcttgatcagtgggaagttgagcttcacggtacgatgaaagaagaaggccaaaaaattggtaaagcccgcatccgtgaattagtggttgcttatcttctgtctgaatttggcatcaaagcctttggtgtagaaccaatcaccccgggtattggcgaaatttctgaaacaactattcgcaaaatgaaaaatcaacgtaagaaaggcttccgcgatgttaaagcggttaaggcggcgaaatgatttcatatatcgtatgtgcatctattcctaccggtgtatggcatagaaggattaagtatatccgggctcattctgagcctgacattagtcaagctaaacggatactcgcaaatcaatgggatgaagatactagcgtaattatcagagtatttccaattgattcatccactctagacagccaacttccatctccgtcagagatgtggcaagaagggttaaacgagcaggaactgcgagagtatcttgatgcgtaaggttattctatacacagaaatttttactaaccgttgggtatttgatagtattttgcttgctgataccaagtttgccgatgacattggcagagctagaaaactggcatatgaattagcagaaaaatccccaacatttgtacgtatttcatacattgtaacaacttccgattacgtgtataaagtatcaaaagaagcattatacagattttgtaatgttatgatttcttctggaaaagcattaaactataatcaattggtggaaattttaaatgactgaagaacagattgcagaagttggttttcttggatggttcatatctaaaacgcctgacggcagaaatacgattgaaactcctaacggtgaattcatcattgaagaagattttgacgcgttttggatttatgaacgctctggtgagaatgaatacacatccgtggatgctttctctaaatttgaagatgctattgactcggtgaaagcatggctaaagtaaaccaaattatgattgtagtagaaggcattggcggatttactatagattcttatatgggtgtttggtttgacaatgaagagggtatgtattgggaaacgcatgcctctatgttaaatgaaactcattatgaaagtttatactcttcattcatggaaatgatgcatgaagtagatgaatctgagtggtttgaacttagtttggttgagttcaaacgtatcatggaacagctgttccaatgctatcgtattatgaagggtgaactatgaaaattcaattgactcttacccatgaaaatattaaaggtgtgttctgtcttgaaaatagccaaataacttttgcacaagatggaacgtactggtatgctgaatcagatgatatcgctggttatggaatggagcgtgtatttgaagattttgaagccgtcattgatgttccattagatttcacgtataacgatttttatcgtatcatgatgaaattaattgcatgcgctgaattgattaagtaatgctttaatcctctcgcttcccaaatttgttataatagatattattaattgaagcgaagaggcaatatgagtaattatgtaaataacaaggaactgtataaatcaatctgtgcatggaaagagaagtgccgggagtctgaagctgctggcggtcctcgagtagtaaaacagaacgatacgatcggccttgctattatgctgatcgcagaaggtctgagtaagcgtttcaacttttcaggatacacccaatcctggaagcaagaaatgatttcagacgggattgaagccgcaattaaaggcttaatcaacttcgatgaaactaagtatgataacccgcatgcgtatataacccaagcttgtttcaatgcattcgttcagcgtatcaaaaaagaacgcaaagaaatggcaaagaaatacagctattttgtccacaacgtgtatgattcacgggacgatgatatggttgcgttagcagatgaaacctttattcaggacatctacgacaaaatgacgcagtatgaatccaccgcttataaggcgccagggtctgctaaaaagagcgaacctacaagcgatggacctaatctggaatttttatatgaggctgaagattaacctcgacgggtttttagaagatgtgcaagacctagacgctatcccttatttgctaaagatgtatttaagggaggtgcttgatcttgatattcacattgacccgaaaaatccacatgacgctgatttcaggtcagattctgctataattgaacatagttataattggactgatactgaattcacatttgaaataaattaccatccaaaggaataacatgaacaacattacccaggaagagcgcgacgaactgcagcagaaactaatggaagcggcagaagaacaagctattgctcgagccaacaaaattgttcgtaaaaaccgtcgtgaaattgagcgattaaaagctcatgctggagacgcggtattagacaacaatttccctgcttacaagtatgctattgaaaaactgcgtactattttaaaacaaccttttaatgatgagattattctgacttgctggaatacctctcgtaaaactgtttgggacattctaaatgctggtacaagtaaaatttaaacgtatacgtaaagacgcgggatttactttgaacactgctaccggaacaatggcagtaaaagtagcagataatcaatatcgtgtgttaggttctaccgaaggatgtaagctaatagataagaactctcttgtctgggttgacaccttccaagttaaacggtggtatgaatggtaaatgaagagaactggggattcattgatttagatgaacaccctgattttattactagtgaagagaattgggatgtatgacgaatttgatgggttctaatcctggacatgattggccggaaggaaattacacgtgccggtgcagtaattgttcagaacgttatacaggaccaaagcgtagttacttctgttataaatgtgataccgctaggagagaagcacctgctcccgattatgaagcaattcataatgccaaggtagatatgcttagacgctttgaagaagctaagcgtatatgtgaagcggcgggttatgttgtatacaagaaaatttaaagggcttcggcccttttgctttattacgggaatggtaaaatatccaaaattaacaacaaaggtcaatatatgaagattaatattttaatggctcgcggacttgagggatgcggcgtaaccaagttcagtctcgagcaccgtgagtggttagtaaaacatggccatgaagtaaatatcatttacgctaaagataaagcgtttactcgtaatagagcacatagctataaagatgtaactattcctgtgtctcttgcagatgactacgataagactttatctctgcttaacgcatgtgacattcttatcatcaactcagtacctgctgtcaacgctccagaagcagcgattgataactataagaagctcatagagaacattaaacctgaagttcgggtagtcgtatatcaacatgaccatagagcattgtcacttcgtagaaatgctggtcttgaagaaaccgttaagcgtgctgatgtactgtttagtcatagctcaaacggcgattttaataccgtgctaatggaagaatattttccaagcggcgggttgagtttctttgatgattctgactcagctcctccggtttataactttcaacctgccatgaacatcaaagcaattcgtgataagtattggaaagacttctctgccattgattttgatatccatcgttggattggtcgtactactacgtggaaaggctatttcttgatgtttgactttcatgaaagccatctgcgtcccgcaggtaaaacgactatcttggaaggtttagaacgcagtcctgcgtttattaacatcaaagaacgctatgaaatcgattattgccgtcattatcatcaggttaaaactggaccaggtctgaatcctcaagttcttgaccgatatgttaactctgagatgcttgagcgtatgtctcagtctggatttggctatcagctgtcacgtcttccggataaattccttgagcgttcgctggaatacacgcatttagaactaggcgcttgtggaactattcctgtgttccataaagctactggtgatgctttgaaattccgggttgatggaaagccgttgacttctcatgattctggcattctgtggttgaatgatgaaaataaaaatgaagtctttgaacgaatgaaacatctgtcatctgaccagaagctctatgataaagagcgaaataaagcatttgaattcctggtagaacaccaagattctgagcattgttttaaagaacaatttgagttaatgacaaaataagtaatgggccttcgggcccttttgctattcacggaataatataaaattaaactctactagagaggttatatgaaaattattcactcaggcgattggcatttaggtgtccgcgcagatgacccgtgggtacaggatgtacaacgacacggaattaagcagcatattgattatgccaaaaagcatggaattaaaactatcattcaatacggtgatatttttgacgttcgtaaagctatcactcataagacaatggaatttgctcgtgaaattgcagagtctcttgagaaagaaggaattaacttaattacgatcgtcggaaatcatgacatgcactacaagaatacgttgacgcctaatgcatcaaccgaagttcttggtaagtataagcatattactgttattgaaaagcccgtgactatggattttgatgggactttgattgacttgtgtccatggatgtgtgaagagaacacatcagaaatcatgaagcatatcaaagaatcgtctgctgaatactgcattggtcattgggagcttaatggcttttatttttataaaggaatgaaatctcatgggctggaaccagatttcctcaaaaagtacaaacaagtatggtctgggcacttccacaccatatcaagcgcagcaaacgttaagtacatcggaacgccttggacgcttacagcgggtgacgagaacgacccacgcggcttctgggttcaagacactgaattatcaacctttgatttcgtccctaatgaaatcacttggcacagaaaactgatttatcctgttactggaaaaattgactttgaagagtttcgtaatctcgcagtacgcattattatcactgcggtcgatgaagaccttcctaagtttgaatcagaacttgaaaaggtagtacatgaattaagaactgtttctaaagttgacaactcggttgagtctgaagatggcgaagaagtagaagttaaaagcttattggatttaatggaagaatatatccaagcacttgaagacctatccgcagatgatatcaaagccttaaaggttatgtctaaacagttatacattgaggcacaaaatcagtgaagacttttaaactaaatcgtgtcaagtataagaatataatgtcagttggccaagcggccattgacattcaacttgataaatgccaaaagaccttaatcacaggtaagaatggtggtggcaaaagtactatgctcgaagctattacttttgccttatttggtaaaccgttccgtgatattaagaaaggtcaattaattaactccttcaataagaaggactctgtagtagaactgtggatggagtatgacggtcatagtttctacattaaacgcggacaaaaaccgaatgtctttgagattttacgagatggcaataagcttgatgaagccgcaagttcaaaggactttcaatcctactttgaaagtctcatcggcatgtcatacacatcgtttaagcagattgtcgtattaggaacggcaggatatactccgttcatggggttatcaactgctaatagacgaaagctcgttgaagatttgcttgaagtgtctcttttggctgatatggacaaactgaacaagacacagataagagaaatcaatcagcaaatccaggttaatgatgttcagcgtgaagcattgactaatgaaattaaaactcatcatgagtatgcagaaaagcagaagaaactttctggtgataacgttgctcgtttacaaacgatgtatgatgaacaagtcaatgaagcccgtggatataaagcagaattagaaactcttcaaagcgaactgcttgaattagtgattggtgatgacccagcagagtcaattcaagaagttcaaggtaaaacctttaagattcgttctaaaattgaatcatattccaaggttcttggactgtatgataaaggtggtcattgcccaacgtgcttgcaggatttgcattctaacgacactctaatcactaagattaatcatcatgttgaagaatgtaataccattcttggcgagttaaagacgcgccagagtgaactggatgaactagctcgcgagtataacaatgtccggtcacgtgccagagatatcaaaactcaaatgtctagtttaaagcaaatgactatcactgctgtggaaaaggcacgtcgtattaaagcagcaattgataaagcatcgcaggagttcattgataactctgacaagattgaactgctacaagaagaattagataaaattatcctcgtcaaaactaatttggttatggaaaaatatcgtcgtggtattttaactgaaatgctgaaagactccggtattaaaggagctatcatcaagaagtacatcccgatgttcaataagcaaattaacagctacctaaaaattatggaagctgattattcgttcacactgaacgaagagttctctgaaacgattaaatctcgcggacgagaagagtttagttatgcctcgtttagtcaaggtgaaaaagccagaattgatatagcattactattcacatggcgtgatattgctgaaaaagtttctggtgttaaaataaactgtctgttccttgatgaagtttatgattcggccaccgacgcagaaggtgttaaggcaataactgctattcttaataagatggtagatgccaatgtgtttattatttctcaccgtgaccatgacccacaggcatatggccaacaccttcaaatgaagaaggtcggacgattcacggtgatggaatgaatgagtttactacgggccaacagttgttggcctttcctgaattaaagcgttatgtgttagttaatttgttttctgatgaacgccatctcgtaactgaagaaatgttacgagatgcttttacgggaaatgaatataatagagtcatgtccaacaggaatgccggttggatggttgaagattattacgattaaggtaaatataatgattaattttgttgatgtgaaagatatccaggttaaaaacgtacgtgcagattccaacccgaataaccaaaatcgtattcgtaagtcttgggttctggctctgaccgaagaaactaaacaggctatcaaggataagattaaagattccgaagctcgctttgctttctataaatctatcgatgatgaagtcgcagaaaaatggattgaactgatgcgtaagcattacaatgaatcaatcaaggctggtgccaaaattgttactgatcgtcacggtggcgaacgtctagaaaatgattactgtgtagatgctgatgagcaactcgttgcggcaggtcagattgttgcagaagaattaactgctacattcgcagcttgatataatttatcctgaacttaattaaaaggtattgaaatgaaattctctaaagaaactctgaacattctgaaaaacttctccaccatcaactccggtatcatgctgaaacctggtaattttatcatgactcgtgctgttaatggtacgacttatgctgaagcaacaatttctgataccatcgatactgatgtagcaatttatgacctgaacagtttcctgagcattctgtctctggttggtgatgatgcagatattatcatgcaggaagatggtaatctggcaattaaagatgctcgctcaactatcttctggccagcagctgacccgagcacaatcgtgttcccgactaaaccgatcccattcccggtggcaaacgtaattatcgattttaaaggtgaagacctgcaacagctgatgcgagtatctcgtggcatgcagattgacacaattgctatcaccaatgttgatggtaaaattgttctgcgcggttataataaagtagaagacgctgcactgacccgtccgaagtattccctgacactcggtgattatgaaggtgacggtaacttcaactttatcatcaacatgagcaatatgaaaatgactatcggcgattataaactgatgctgtgggcaaaaatgaatggctccaagaaacagactgcagcgaaatttgaaggtgcatcagcctcttatgtagtagcaatggaagcagacagtacctttgattttgagtaataacttcggggcttcggccccatctttaatctgaatgaggaaatataaatgaaattgacagtaaacgaagcagacttcatgtgggaacagaaatatcgtccaggtactatttctgagtgtgtacttcctgctgaagataaagaaattttttcagctttagtagctaaaggaaaaattcctcatttaattctccatagcacttctcctggtactggtaagactacagtagctaaagcattgtgtaatgacattaatgctgaaatgatgttcgtgaatggttctgactgtaagattgatttcgttcgtggaccgttaactgcatttgcaagttctgcttctattgcaggcaagcagaaaattatcgtgattgatgaattcgaccgagcaggtcttgcagaatcccaacgacatctgcgttcattcatggaagcgtatagcacaaactgtactattatcattactgcaaacaatcttgacggtatcattaaacctcttcagtctcgttgccgtgtaattaattttggtaaaccatctccatctgatgttaagccaatgcaaatcgagatgctcaagcggtgtctcgcaatttgtgaaaatgaaggcgtggtagttgaagataagaaagttgtagctgctttggtcaaaaagaatttcccagaattccgtaagaccatcaacatgcttgatcattattcttctaagggtgtgattgatgcaggtatcttgtctattgttctaaatgaccgcggctcaattgaagatgtcattgaagctattaaaaccaagaacatcaaagaactccgtgctcttgctccaaaatatgcagcagactatacttggtttgtagataaactttcttctgagctgtatacactggttactggtccaagcattatccgaatgtatgaaatcatcggtgaaaataaccagtatcatggtgtagcagcttcgattgaattacatttggtttatatgcttattcaacttgttgtagagatgcagtggaaatgatgagtttatttgaagatgatgatcagtataacgagcaccaaatagcgtggttaggtaaagactggacgaaagtccaggaattatctgattcatataaagaaaaagcagaaaatcaattcttcgagattatcggttctattaatgaaaagaaagagcatttgaacatctcgactatggattattcaaaattcatggttgaaaacgctctttctcagcatgccgactgtatgcctgctgtttatgttatgaaccttgttggtcaagggctatctgaccaagcacactataactacatgatggcctctgttcctagaggtcgtcggtatgggaaatgggctaagttaacagaaaacacccaggatgcattgattcttcaagttataatgacatattacaaggtcaatgcgattgatgctaggatgtatagagagaccctggaagctaaaaacaagcttaaacctgctctcaagaaaatgaaaggtcttgtgactgatgaattggtcaagacaatcacgaaaaacgtgaaagaacagaaaaatcttaagaaaacagcattggaatggtaaagatgattgaaattacactgaaacagcctgaagacttcctgaaagttaaagaaactctgacccgtatgggaattgctaataacaaagataaggtactatatcaaagctgccacattcttcagaaacagggtcgttactatatcgtccattttaaagagatgttaaagcttgatggtcgccctgttactattgacttagaagatgaaattcgtcgagactcaatcgcacaactgctcgctgactggggtctactgagtattaatcgtggtcaaactcttgcccagatgcagaataacttccgggtaattacattcaaacagaagcatgaatggactttaaaatctaagtacacaatcggtgcgtaagaaaagggcttcggcccttttactttataaaaatcggagtataattatcccacctaaagactaataactcggtctataaacaaaggaaacccatgaaagaattttatattagcgttgaatctctaggcaatgacattgtagaacgttatatcgattctactggtgaggaacgcatgcgccgtgttccgtattctcctgttatgtttagtcattgcatggaagaaacaaagtacaaagacatctatggaaagtattgcaagaagaatacattcccaactatgaaagatgcacgcgattggatgcgtcgtatggaagatatgggaatggaagcaatgggtatggatgatttcaaactcgcgtatatcagtgatacttacggttcagaaatcgtctataataaaaaattcatccgaattgcaaactgtgacatcgaggttactgcatctcaattcccagacccgatgaaagcagaatatgaaattgatgctatcactcattacgattcggttgatgataagttctacgtatttgatttactgcattctctttatggttctgtttcagagtgggacaagaaactcgctgctcgtttagattctgaaggcggtgatgaagttccacaacatattcttgaccgcgtagtatatatgccgttcaattcagaaaaagaaatgatgcttgagtacatcaatctttgggaacagaaatgcccagcaatctttactggatggaacattgaaggatttgatattccgtacatcatgaatcgtgtgaaacagattcttggtgagcgtacgatgaaacggttctctcctctgaataaagtttcatctaagattatcacaaacatgtatggtgataaagaaatttattctatcatgggtgtgactattcttgattacatggatttgtataagaaatttagtttcacgaaccaaccgacgtataagttggatttcattgcttattatgaaaccaagaaaggtaaattagcatatgacggtccgatcaataagttgcgtgaaactaaccaccaacggtatatttcgtataacatcatcgacgttgaatcagtacaagcgattgatgcggttcgtggatttattgacctggcaatctcaatgtcttattatgcgaagatgccgtatcaaggtgtaatgagtccgattaaaacctgggacgctatcatctttaacagtctgaaagaacaagacaaggttattccacaaagtcgttctcatgttaaacaatcatatcctggtgcgtatgttaaggaaccagttcctgctgcatatcgttatatcatgtcgtttgacttgacatctctgtatccgtcaatcattcgacaggtcaatatttcaccagaaaccatcgttggacagtttaaacttcatccattgggtgagtacattaacaagactgctcctcgtccgtctgatgaatattcatgttcaccaaatggttggatgtatcgtaaagatgtagatggtgtcattccagttgaaatcgcgaaggtattttatcagcgtaaagagtggaaaaataaaatgatgggtgccaaacgaaatcaagaactgattaaaaaggttctgaatgataagaagtttggaactatcgataaattcacagaagttaatgtctatgaagatttctctgatgatatgaaagcagaactgctgacatataccgaagagtgtcttgacaaactgatgtttgaatgtaaacatgctgaaatcttgggtaatactaatcagttaaaccgtaagattctgatcaactccctttatggtgcattgggtaacatttacttccgttattatgatttacgtaacgcatcagcaatcacgttgtttggtcaaatggcaattcaatggattgaacgtaaagttaatgaatacctcaacaaggtatgtggtactgaaggacattcgtttgtagtagctggtgatactgactcaatttacgtttgtgttgataaggttatcgagaaggtaggtcttgagcgtttcaaagaaactaacgatttggtcgaattcctgaaccaattcggcaagaagaaaatggaaccttggattgaccaatcatatcgtgagatgtgtgaatacatgaacaataaagaacatttaatgttcatggaccgtgaagctatttcttgtcctccgttgggttcaaacggcattggcggattctggaaagcgaagaaacgatatgctctgaacgtgtatgatatggaaggtactcgttatgcagaaccacacctgaaaatcatgggtatggaaactcaacaaagttctacaccaactgctgttcagaatgcattggaagaatctattcggcgtatgctgcaggaaggtgaagaatcgttacagcaatattataagcagtttgagtctgagtatcgtgaacttgactataaagtaatagcagaagttaagaccgccaacaatatcggtaagtatgatgatggtgcaggatatccagataaaggtactccatatcacgttaaaggtgctttagcgtataaccgagctaccgcaggatttgaaggtataacaccaatcatggaaggcgagaaggtgatggtcatcccgctgcgcgaaggcaacccgtatggcgagaaatgtatggcatggccatcgggcactgaactgccacaagaaatccgacaggaagttctagtgtggcttgaccacagtgttctgttccaaaaatcgttcgttaaacctctgacgggtatgtctgaagcggcagggttagactatgaagagaaatcgtctcttcttgacatgttcgatttttaaaaaagttgtttactttaccacaaggatgtggtactatagctctcgaaataacatactgaggagattacaatgaaatcgttacttgctgttattgttgctctcacgctgactggttgtcaaatgccacaaggtgatatcgtcccggcttcttctgttggacaggtgcgagcaattggcggtactgtaggatactatcgtgctagcaaccaggtctctgctgaatcgctcgcggttgagcgtcggttggcgaaagaaaaagctaatcctaatcgtcagctatctgcgatggaacttgacatgattgagcagaataagcatgagctggaagaaattaagcgtctgcgtaaaactcaaaaagaacgtacatgcactgctcaagcggcagcagtgaatgaccagattcgtttaactgattttgctaacggcggattgagttataatgagcataaacaacgtatggagcagttaaaatctctccaaaatcacatctacaacaaatgcatgtctaactgaggagattaacatggaagcagtatttggtttaatcattcttttcttcatctattttttgccgacctttgtagcttgcagtcgtaagcataaatcacggggtggaatctttatcacaaatctagtattcggttggtccattatcggttggttaattgcgctgatttggtctgcttctaacgcacagcagaatacaattattatccagcaagttaaataagaggtctcatgattgtaactccaatgacagtacaagatatccgtcaagaattcgctgatgctttgctcaacaaagaatttgtgattgataagacgggtgtgaagactattgaaatcgtaggtgcatcatttattgcagatgaaaacctaatttttggcgcagttaatgatggatatattgctcgggaacttgagtggtataaatctcaaagtttattcgttaaagatattccaggtgaaaccccagctatttggaaagcaattgcatccaaacatggtgagattaattctaactatggctgggcagtttggtcatcacaaaactattcacagtttgctaactgtgcaaaagaacttatcagcaatcctgattctcgccgcggaattatgatttatacacgacctcaaatgcagtatgattttgagcgcgatggcatgagtgatttcatgtgtactaacaatgttcagtatctgattcgtgataataaagttcatgctgttgtaaacatgcgctctaacgatgtcgtctttggatatcgtaatgactatgcgtggcagctctatgttctggaacagttaaccaaacttcttaatgcatcaggtaaaaattattcagttggcgacattatttggaacgtcgggtctttgcacgtgtatgagcgtcatttctatcttgtagataactatgcttatactggtgaaactcatattgcaaagaaagattataaaggtgaatggaaatgattcagtttgtaattccaagttataagcgcgccggggcagttactgccctgactatgtttcctgaaggttatgttccacatcttgtagtacgtgaatcagaaaaagaagcatacgaaacttggcacggtcatgctgctaaaatcgttactgtccccgatgatgttgatggaattgcaggaactcgtcgtctgattactgaaatgtatgcaggacaacgaatttggatgcttgatgacgatactaccattcatctgactgaaatccgcgagcgcgacgatcgccgtgttccacttggtgtcggcgaggcaatgagccaagaggtatttgatgatatggtcaaatacgtagagactgctatggattgtggttattatcatggccatgctcgcttgccgattttcaaaattacatcaagctggggtcattatcgcgagaatagttttgggttcaccaatactttctatgatttgactaaacttacagcagaagatattggttacggaattattgaccttaacgaagatgcttatgcttttctaaaattaattaacatgggtcatcctcatctggctctgtttaagtacctcgttaaatctggtaaggtgcagtctcctggtggttgttctacacagcgtgatactgctcgacagaatagagcccttgaacaactacatgctgctttcccaaatcaagcccgttggaaatctaaagacggcgaaagacgtgggttattcggtgataacgaacctctgaaatcaattcgtatgtgtattaacactcgagtgaaatctcaggccttccacgagtttggtaaggtagaaccatatctgtgagggcgaaagccctccaaggacctcttatgaacatctataataaatctgatgtagctggtaacatattcaaggctgaagaattcagatgcttcgtatgtaaatctgatgagtttgttcatgaaggaactactggctcagatggaatgcattgctggtggcatggcatgtgcgttggatgtaaaatacactatgaaatagatatggaaacagtggtttataacaccaagaagaaatggaacttctgttaatagcttcaagaacaaagtaatataattactctatcctttaacctgtgagaaaaatataatggagacttatggaatataatgaatgtctgacttaaaatctcgcctgattaaagcatccacttctaaaatgacagcagaactgactaaatcaaaattctttaacgagaaagatgtagttagaactaaaattccgatgcttaatatcgcaatcagtggagcgttggatggtggtatgcagtccgggttgactatcttcgcaggtccatctaaacacttcaaatctaacatgtctctgacaatggttagtgcttatcttaataagtatcctgatgcagtatgtttgttctatgattcagaatttggtatcactccagcttatctgaaatctatgggtgttgaccctgaccgtgtaattcatacaccggttcagtcggttgaacaattaaaaatcgatatggttaaccagcttgaagctattgagcgtggtgaaaaagtcatcgtgtttatcgactctattggtaacatggcgtctaaaaaggaaaccgaagatgctctgaacgagaaatctgtcgcagatatgactcgtgcgaaaagtctgaagtctctcttccgtatcgtaactccttacttctctattaagaacattccttgtgtcgcggttaaccacacaatcgagactatcgagatgttcagtaagacggtaatgactggtggtacaggtcctatgtattctgcggatactgtgttcatcattggtaaacgtcaaattaaagatggtactgagcttgaaggatatcagtttgtcctgaacgctgagaaatcacgtactgtcaaagagaaaagtaagttcttcatcgatgttaaattcgatggcggtatcgatccatacagtggtctgcttgatatggctctggatatcggatttgtggttaaaccgaaaaacggatggtatgcacgagaattcctggatgttgaaaccggtgagatgattcgtgaagaaaaatcctggcgggcaaaagatacgagcagtacggaattttggggtcctctgtttaagcatgagccattccgtgacgctatcaaagcccgttatcagttgggtgctattgattcaaacgctgcggttgatgaagcggtagcagaaatgattaactcaaaagtttcaactaaggttgatggtgttaaacttcctgagagtggttcagtatcagctgctgaagttgaagatgaattagagaacttcatgaatgaagactgagtttgatttagaatctgaactcgagaaatttgaacaagaatctccctcggaagagggagacttcgagcgtcaagaacgagtgttcaagaaaagccatgaaataatccaagaagctatgaagaccgttatccaagaaattgtgataaaattaaatggtcaatcacacttggtttatgttcataaattaaatatttctccttctggggaagtaactattgagttcagtactccatctgaagctcataaggatgaactttatcctcatgtggaagcttgtgttaaacaacaaatccagagtgcattaaagaccaagaaaaaatcattatggaaaatcttttaagaggttaaagtggtagaaacaatcttagctaatctgatttacaaccaggctttctttacgaaggtttggccatatatggacaaagagtacttcgagcaaggacctgctcagacggtgtttaacataattaagaaacacgttaatgaatacacagcaattccttcaaagactgcgttatgtgtagcactggataattcgtctataactgaaacggaacatgaaggcgcaaagaaacttattgataagttatctgatgctcccgaagatttgaattggttagttaaggaaactgaaaagtacgttcaagaaaaggctatgtataacgctacgtctcgaattattgaaattcaggctaatgcccagcttgagccaaataagcgagataagcgtcttcctgatatgggagctattcctgatatcatgcgcgaagcgttatcagtatcgtttgatagctatattggtcatgattggatggaagattatgaagctcgttggttatcataccagaataaagctcgtaaagttccgtttaaacttagcattctgaacaaaattactaaaggtggtgccgagactggtacactgaacgtattgatggctggcgtcaacgttggtaaatcattaggattgtgttcattggctgcagactatcttcagatggggcataacgtcctttatatttccatggaaatggctgaagaagtttgtgctaaacgtattgatgctaatttgcttgatgtatcactggatgatatcgatgatggatgtgtatcatacgctgaatataaaggcaagatggaaaaatggcgtagttctagtactcttggtcgtttaatcattaaacagtatccgactggtggcgctaacgctaatacattccgagctcttctgaatgagttgaaactcaagaagaactttaaaccgactgttatcatcattgactatcttggtatttgtgcttcttgccgtattcgtcaatatactgaaaacagttacacgttagttaaagctatcgcagaagaacttcgtgcattggctgtagaatctgaaactgttctttggaccgcagctcaggtaggtcgttcagcgtgggatgcttctgatatggacatgagtgatattgcagaatctgctggtctacctgctacggcagactttatgctggctgtgattgaaactcctgaacttgctcagatgaagcaacagttaattaagcagattaaatcacgttatggcgataagaacatcaacaataagttctttatgggtgtgcataaggctaatcaacgctgggtagaaattgagaagcaaaacgacccaactaagcctaatccaagcaataccgtccgagaaggtgccggtgcacagaaccgtgtagccgaatctaatcgtcaagaacgagtatcacgttctaagcttgatgctctggcagaagagttgaaattctaggtaaattttatgatttttgtgtttagcgcggtccgtgaccagtcaggtcactcttttgttgtaacagccacagataccattcatcgaggcattgaggcatataacaaagcagacctatctgtatgcgactatggagaggtcaaggtgtataacagcgatggcatctgggttaactctgctacatatctacctactaagaatctgacctctgacactttgttgaaaaaattgttcaaaaggtagtttactttctccaaaggccatgatactatggccttactgaaacaaaacgagtagaggaaaacatcatgtggacaattgaaaaagcattagacgtagtctttaagagtaaagatgaatcagcggaaaccgtaccgcattgtggtatggtagttggaagcaaagtagttaaatctccatatgctaatctgcgttgtggtggcgtagtacgaaaagcattagatgaaggcgatacagttttagtagttgttgagccattcaaaaacactgatggcaatgtgtcaatgttagtatacgcaaacggtgattatcgcctgatttctgctcttaacgtacaagctgcttgaggaaaccaaaatgaaaaagattgtacttgctttagtgttcgcagtatcaagttgctctgcagttcctgctatggccaactatgataaagacctatgcgagtggtcaatgactgctgatgagtctgaagtagctcagcagattcgtgcagatgttggtcatattgtggaaaacgtagacccgagcaaacaaacagaagtgcaagcagaacttaaagacgacggcgcagcacttaagttgaattatgttctttactgtgatgctcagtttgataacttcaacatcgttaagtggattttaggatgattacgtacgttttaataatggcgctatctactggttcaggtggaatgtctactgaaaagatggcattcactggtaaagatgaagccgtgattaagcaaaagtgtgaagatacaggcaagcagtttatgcttatcaaagacaatccaaaatcaatgtctccgacgctgtatcctacatataaatgcttacgtattacgcatgaataaatagtaggaggctctatgaaaacatacaaagagtttgttactgagatggtcgcaggtgatgctggcggcaatccacagaatattgcatcaggtaccacttccggggacatcgtcaataaaggacccgaaacccttccaaagaaacgaaaagcggataaagacgctgccaagaaaaagtgataaaatggccttattagtttaaggccagaggaaatattatgtcttgggttgataacgagtatgcaattcgtgcaatatctcacctacctaaatttagacacgttactacatcttcaacattcaagttaaactgtcgttgcccaatttgtggtgactcacagaaagatatcaataaagcacgattctggatttttgatgcaggccaaggattacgctgtcattgcttcaactgtgagtataataagtggctatcgcagtatcttaaagataatgaacccgacctctatcgagagtatcttcttgagaaaagaaaggagcaggtctttgataagccaaaggctgtagaaccgtctgagaaaattaatgcaaaactccccgtaatagaaaaacttaatttctgcgagagattagatagacttcctaaggaacatccgatagttaaatacgtgactgccagatgtattccaagcacttcttggaaaaggttatggtttactaaccaatggccttctcttgttaactccgttaatccaggaacctataagaatgagacgaacgaaccacgtttggttattcctatcttcaacaagaaaggagagattgagtcgtttcaaggacgagcactacgaaagaatgctccacaaaaatacatcacaatcaaagcccacgaacacgcgaccaaaatttatggtctcgacactattgatgagtcaaaactcgtattcgtcatggaaggaccaatagattcgttgttcattgataatgctattgcaatcactggcgggtctttagatttagctcaagttccatgtcatgataatcgcgcgtggattatggaccatgaacctcgtcatcctgatacaattaagcgtatgaaacgtttagtagatgctggcgaaaaggtagttttctgggataagtcgccttggaaaagcaaagatataaatgatatgattatgaaagagggggcaactgcttctgaaataacagattatattaatcaaaatatatcgcagggtttaatggctaaattgcgtcttgacaaatatgcgaagatataggggccaaagccccttaaactaaagcaatcctccagtcataataaacgacacaactttttctaacggcatcggaggaagaactagcccgtgcgtgctagctaatggaactaccacataattccatgcagctaaagcagcagtggcgattccgacgtaaagatatcttccaaatcctcctttgtctttacattcttgtttcacttcagacatgaatcctcctgctatttatgttaagtgatataatatttatctaatttaattgaaaggaataaaataatggcacactttaacgaatgtagtcaactgatcgctggtgcagataaagctgaagctcgatacgcaggtatcgtacgcaaagttggtggtgaccctctgcaagtaatgcttgatatgcaaaaatctcttcaggttcgtcttgcaaatgacaagcctggtactaacatgcatcctgatgaattggctcaggctggggatatcgtgcagtggctgcgtaatcaaaaagactacattgatgacgaattccgcgaattgctgacgtctcttggcggtatgagtaatggtgaaaaggcagctagcgctgtgtggaaaccatggaaagctgaccacgtcaagatgcaggaaacttatatcaaagacctgtctgacaaagaccagcttgaaatcaagtttgaaatgattgatatcctgcactttgttctgaatatgtttatggcgcttggtctggattctgaagaaatctttaagctgtattatctgaaaaacgcagagaactttgctcgccaagacagtggttactgatggctaaaagaatatctaagcgtcgtttaaaaattatcagaaaacaaaaagaaagggccttagtattggcccttcgagaagaaatcattcgagaaattgataaagaaatattaaaggcacttacggcaactatataaatactcctgtaaactaaataggagattaaaatggcttacgtaaacatcaaaacttttgaccataccactgctgatggcgaagttaaaggtactgaagtatctgtagcttttaaggtgtattctgattcacatcgcattgctaacgcacagtatcagattttcccatctgaaaaagctgcttattcaacagtagttgatgatgctgcaacttgggcaaccaccaacgctaaaatgtttgaagctgatgaagaagtataaaaattaaggactcctccgggagtccttttatgctatactgggaatagtatattattcctactaactgaggagaacaaaatgatatgttatactaagccctggtatcaatcgccattaaagaagtctcattttgattgttggtacagaggtgtaagagctgcagcgttattactaaaagctgcgcctgctttaattaaagcaaatgataaatggtttgaagacaataacatgactgaaggagctatgtgtggcaaacgcaaaaatctataaagtaagcttacaacgcgcagttcaatcaagaaatgatgcaaaaggagctttgcgtctagaccaagatagaatttttactgttgctctatatagtacgttcgacaaagatttcaaagatttaattaataaattcgaggcatttggttggtgtccttctgaagattatggcattattaagactgctcatgtctttgacgtagatacagttccaggaagtcctgtttctatactgcatgctctccacttgaaaggatacaccaatgtatgtcatgaaactagtctgtatgaatacgaaaatgacataatttcaagaggcaaaaagattatcattgatagcacagattctctaatagaatttactaagttagtttggttatatatgggtgcagattttatcaaacttgctccaagcccgctgttacaaaaagcagctgatggatataacagcagtagttgtctgtatcgcaatactgagtggttcatgtgatggatttgtttgaaatgatggaagagcctcaggaagaggttcaagttcatccagtgatttctaaggacatcaaagacgaataccgtataattatacagaagtatggtattaaagccccagaagctcttctagacgaactagcttcaatctggtctgacccgccgccctggtctccctgggcaaaataatttcacaaagtagtttactcttccaaaaagccatgataagatacctctcgtaaccaaaaaaatggagaatatcatggctatttcattaaacccacaagctatgctagtagaaagcgttcattctattgatattctgaattccgtgaggcagcacagaggattacctgtgtatgatttaagcgcatgggaagcgttagccaatcgttttgactgcaaagaacagtcaattctgtggcaatgcatgaacgataagattggcgaagaatttcataagaaacttgactctatcgttagacgtcatcaaattgataacagagaaattctctatagaggtctatcgtgtcgtgaggctaaagcattttatgacgcccttattaaaggcgagaaatttgactttggaaaggtggcgtcattcacaacagatgaaacgatcgcccgagaatttgcaggcaaatggcattactcgacctttgtagtcattgaagtcaataattgccatcaatcatttgattatcataccaacatgaaagcacttttaattaccgcgccggattctgaattcattcggccgaatgatttgattgataacgttgctcagcgcagaagcgctaacatcgagatgattgataaagaacgagaaaagatgctaccgatgggaactaagttcaaagtggtgggtcataacaaagttgaaaaatctggtttacttatggactactttagtgttactatagcttagtcaactagtgattatctagaactagggacctagacccattataccgtccgtaagacgaaagcatttttgaggaaaacataatgaaattcactgctgaaaccgctaaagtttatactcgtttaattacaactttaggttctgctcaacgtcggcataaggagttcaatctcaccccagaatatctgtttaacatcatgcagcagacacattgcgcatactcaggcgaaaagtttggaactgttaaaggaaatcatcctgatagcatgacgctcgagcgttggaataatgacttgggatatgtagtagggaatgttattcctgtcaagcaaaagtataatactttgcgtggaaataatacgattgaaggccttgaacgaaaagcgaatgaaattgcggcacgcatagttcgctcttctgattctgttaaacctacaagtgataaagaagcttctcgtttggaaaagattcgtgagtatgaaaaaactatcacatcaattaaaactaacttgcgtaatcgcgaaaatcatctttctcaatttgtgcaaaaagaaaagaacggaactgcaacctcggctgatttagaacttattaatgcgctgagaactcgtatcagtggtggtaagtctgaattagctaaagttgagcgtaagttatctgctattttagcgtcagttccgaatcgtccatcagatgctgaaatccgtgtacaatcaatacggctaattgttagctcacttcgtcggttagaaaaatgctcaatgctagataagttaaaattgaaaaaaggtcttccattgactgcgtccttcttccaacttttgagaggtaaaatgtaatgcaacactatggatatgtagtagcgtataaggataaagacggatttgaccatccagtcacaactgatatgtatgatggagaacgatgtgtagtcttcactaatgaagaatcagccaataaagcacggattcgtacaatgtcggttttaacagacaaattagcaaaaggtaattttactgggaaaagcaaaaccaaaggaatgctttggtggaaaacaactgagctagtgtatgaaccacttagcgatgttgagcgtgaaaaactcaaagcaaaaattaaaaatctacatgtagtgagggtaaaagtggcatgattacgtttgaccaattaaaagaaagtcaaaaagcgatttttaataaagtcattgaaatggtcaaacaaggagctaaaggtcaacatattacgattaatggacctgccggtacaggtaaaacaactttaaccaaatttatcattgatgctttgatttctcagggtatctctggcattgcgttggcagcacctacgcatggagccaaaaaggttttatctaagctcagcggaatgcaagccagtactattcatagtcttctgaaaattaacccgacgacatatgaagaaaacgttctgtttgaacaaaagaaagttccggatatggcatctattcgagttctcatctgtgatgaagcttcaatgtatgaccgtaagctgtttaagattttgatggcaactattcctgcttggtgtattgtcattgccattggtgataaggctcagatacgtccggtagaacctggaagtaatgaacctgcactgagtccattcttcactcataaagatttcttacaacttcatttgaccgaggtgatgcggagtaatgctccaatcattgaagttgctactgaaatcagaaacggtgggtggattcgtgactgtgtagttgatggtcatggtgtacgtggttttactaaaggaactgcccttaaagattttatgctaaattattttaatttagttaaaacaccagaagatttatttgaaaaccgaatgcttgcgttcacgaataaatctgtggataaattgaatgaaataatcagacgcagaatctatgaaactgaacgaccattcgtagtaggtgagattgttgttatgcaagagcctcttaccaaggaacttaaatttgaagggaagaaattcagcgaaattcttttcaataatggtcagtttgttcgcatattagatgcagttgaaaccaccacgtttttgggtgccagaggtgttccaggtgaatatctggttcgtcattgggtattagatattgaaacctatggcgatgatgaagagtacgctagagagaaaatctgtgtcatctcatccgaagaagaaatgaataagtttcaattcttcctggcaaaaactgcagatacatataagaattggaataaaggaggtaaagctccttggtctgagttctgggatgctaagcgtaagtttcataaagtgaaagcattaccggcttcgactttccataaggcccagggcatctcaattgacagaagcttcatttatactccatgcattcacatggcagatgcttctctcgcacaacagttattatatgttggtactacccgtggtcgatatgatgtgttttatgtgtgaggtaatatgtttgaattgaaattagaagaccttcaaacaatgattgttggcttacaagaatctaagtttgaagcaccagacaatgttaagcgtgctattaacattaaaattgatacagttctgaatgagcttcgtgatatagcagataatgctaatgctattacttggttcacaggatatgacccaaaggtgtatctgagcgaatatattggttgccagttacgcgaaattaaatttatgctagaggctcaaaatggctaaagactttattattgattttgaaacattcggaaatgtgtcaagctcttctgtgattgaccttgctctaatcacctttgattctgaccccgaagttctggaaagcttcgatgaattggttaaacgtggtcatcgtatcaagtttgaccttaaatcccagaaaggtcatcggttgtttggtaagtctactcttgagtggtggaagaaacaatcagctgaggcccgtgctaacctggcctcaacgccagacgatttatcagtaattgctggaattaaagaagctcagcaatatctgattgataatggaattcacccatgggattcctttggctggtgtcgtggacagagctttgactttccgatttttgttgattgtcttcgtgatgttcaacgagcccaagggatttctgaagaagaaattgatacatttaaagaagaaccatgcaagttctggaatcagcgtgatattcgtactgcaattgaatcgctgcttctgactcgtggtctgacaactactcctcttccaaagggtacgctcgacgggtttatcgcgcatgatagtatccatgactgtgctaaagatattctaatgcttaaatacgctcaacgctatgctctaggtctaagcgaagcaccaagcccagaagataccgatccgctgagtttacctaaggggcgtggctaatggaagagtttgagttcgatgaaaactttgaagagtggttcaaccgggaaatcctcccggaaatctctccaacgatggttctggtggccaaggctatgatggctaaagggtgggaagctgggtatctgttcggcgtagatgttgggtgtgaaatttctcatcgatagctatttactttatgaaagagccgttatataatggctctacattaacaaactgagagaaacacgatgaaaaatttggttgtaggcgaaaacgttaaagtaattggtggtaagtgggttggtcacaatggtgtaatcgttaaagtagttaatcgtaatgacggtaaatctgggtataagatttaccgtgaagattttggtgattacatccactgcttgaaaaaattcgttgaatctagtgaaagctatctgcgcaagtgggtacatgtgaattcacttgacaatgttattacccaatcggtgagttctactaattcagccactaatctgtcgctgcataaaaatgttcttgtcactgatgagtgggaagaagacggtaaaaccctagtaaacgtagtgtttcaaggcaactatgcagttctgcctaaagccgatgtagagcctacagaatcgcaacgtcaaggtttagtataaaaagttgtttactttgccacaaggatgtggtactattatcttatcaactactgaggagaataacatgaaaactgaaaacaccgtaaaaattactgccgaagcttttgaagacattctgttcaacccggacttaatcgtcgttcagaaagagaaaaccttcggtaaagaagagcattggacctggttgtatgtattcgcgaatcatggtgatatcgtcccagttcgtacctttgctcgtgtaatcacagttgatggcccagaatacatggagattgtgtaatgaattttaaagaaggcgtacagtacaaattcgtcaatgatgaagcggaagaagaattttcttcacgttatgaggttaatgaagactttgtgtttgaactctatgaaaatggcgggagttttactgttactaaagttgactaccaaaataatagagtatccggaattatgtgggctaatggcacagaatgtgatgaagtcggcggtgaagaccttgtaatttttgatagcgaattcaaatactttactgaagttggaacttccgcgaatgtaattccaaccgatttggttatgaatctttctattcataaccgtggtcaagcaatcgctgctattgcagcactgcagagtgcatatcaatgttaaatttagctcctatttttgaagcatcaaaactgtcttatcctattcctaaccgtagcattgggaatgtcatgttgcaactttcttcagaaactggagaaatgtgtgattggattaatcgtccatggcggcagaaagaagagtttgaaggcgagtgcgcagatgttattaactgtgtagtagatgcactttggcttcatttcagaaatcgtcataaagatgatgcgcatgtatcagatgatgaaatctccatgatggttactcgtgcgctgaatgagcaaatcgtagtcaaaacacaaaaatggaaggatgctgttaatgccaatgtatgattacaagtgtgaagtctgtggaaaaaagatagaaattatgcgtaaaatttcccatcgtgactatactgttaactgctttaaccctaagtgtgaaggtcaaatgaagcgggtggtttctgctccggcagttcactacgatggattaaagagtggtgattattgatgggaactaaagcacgcattaccatgaaacccggagaaatccgggttattaaagtaggtaatataacttatagggttaaattaaaatgaaaaagattttaattacagcgcttgccttcatgatgattggatgcactgacgctgataacgcaactcgcgtgttagataacgcgggatttactgatatcaaaatcactggatataagttcttttcttgctcagaggatgattttcagcacacaggctttacggctattggaccaacaggaaaacctgttaacggaacagtgtgctcagggctttttcttaagaacagcacaattcgttatgaataaatgaccttcgggtcatttagttgtttacatggacatcgtgttttggtattatagtcttgttggccagaggagaatattatgattattggaatgacaactgcgcaaaggcgtgctaaacgacagttaaaaatggtagagcgggctattggaaaatataggtttgcttggtggccaatcaatgacgtgaatggccgtactatttggatgcagaaatattatgaagtctgtgaagaatggatttcacttaatgaaaataacgagtaccggattgaacagtactacggaaattctcgatatgcatacgctaacgttagtgatgctcaatggactatgtttgaacgacaacggccacgatacccagagtataaagcggttaaaggaggccatgaggttcttggtaaattgatgtatatcaaagaagaattacttgctataattaatagttgatataattccttcactaaccgaggaaatgtaatgattaagaacgaaattaaaattctgagtgaccgagaacatatcattaagcgcagcggaatgtacattggtagttctgcgtttgaagcgcatgaccgttttctttttggtaaattccaatcagtaaagtatgttcctggtattatcaaactgattgatgaaatcattgataactctgttgatgaagctattcgtactaatttcaaacatgcgaacaagatttcagttgacattaaaggcaacaaaattattgtaacagataatggtcgtggtcttccgcaggctcctgtagtaacacctgaaggagaaactattccgggaccagtagctgcatggactcgtcctcgtgcgggtggtaactttggcgatgatgctgagcgtaaaaccggtggtatgaacggtgtcggttctgcgttaactaacatcttttcagtatcttttactggtgcaacatgcgatggtaaaaatgaaatcattgttcgttgttctaatggcgcagaaaatatctcctgggaagaacatccagcaaaagataaagaattcatcaaagataagactggtactgtagtatcattcattccagatttcagtcactttgaaagcacaggattgactgatgttgaccaatccatcattcatgaccgtctgatgacgttagctgtagtttatcctgacattgaatttaaattcatgggtaaacgagttcagggcaagtttaaagcttatgcccacatgtatgatgaaaacgctgtagtgcaggattctgatacatgtgctattgctattggccgctcagatgatgggttccgtcagctttcatatgttaataacattcacaccaaaaacggtggcacgcacgttgacctagttctcgatgaactgagcaatgaactcattccagcattaaaacgtaagtacaagttagaagttaataaagcacgaattaaagaatgtctgactgtcatcatgtttattcgtgatatgtctaacatgcgatttgattctcagactaaagagcgtttgacttctccttggggagaaattcgtagccatattgatattgattataagaaacttgctaacgctattatgaaatctgaagatattcatatgccgattattgaggcgatgttagctcgtaaacttgctgcagagaaagctgctgaaactaaagctgctaaaaaggcacagaaagccaaagtagctaagcacatcaaagccaacaaatatggtaaagatgctgacaccactttattcttgactgagggtgattctgcgattggttatctactcacaactcgcgaccgtgaacttcatggtggatatcctttgcgtggtaagttcatgaatacatggggaatgtctgctgcggatgcgatgaaaaataaagaagtatttgacatttgcgcaatcactggtttgacgattggtgagcctgctgaaaatactaactatcgaaatattgccatcatgactgatgcagacgttgatggtgttggttcaattttcccaagtcttttagcgtttttcagtaattggcctgaactgtttgaacagggtagaatccgctttgtgaaaactccggttattattctcaccaaaggtaaagaacaacgttggttctattctcttggtgaatatgaagaccataaagacgatttcaaaggttggaaacttcgttatattaaaggtcttggttctcttgaagaagatgaatacgaacgtgttattcaagacccggtttatgatgtagtcactcttcctgaaaactggaaagaactttttgaattaattatgggtaatgatgctgcaccacgtaagacatggatgagtgaataaagaataaatagtaagggtactattgcccttacttagaaggaattaacatgcaacgttattggattactttgatctcaggcgactatggatatctgttcgctgaaaagaaacctctgcccggaacttgggttactatctgggtggaaaacattgatggttctaaacatgaggtttatggtcgagttagtagggtgtggtaatctaagggacctccgggtccctttttctttataagaatggatttatatggctttaatcaagaagtgcttggagatgattctaggattcttgcttaaagttatagtgatataatttccctaaatcactgaggaaaatattatgaaacgtagttacatcccatcagaagaattattcaacgatgctatatatcgtgaatatcgtatcatccagcggttctttgacatccaagcagctgaggaattcaaagaacgcttcaaagaaatccataataaaatttttacaactaacaccgctactgctgaagagttacttgaagtagcagaaatcattaaacgacacaattgataggaataaaatgaaaattaaatgtgatgatgaagtaattattggttcttctgacgctgacgattcaacgtttaccattaaagcttcaggtaaagcttttgacattttgtcaaataaactttataagtataaagtccgtgccgttgttcgtgaactttctactaactgcgatgatgctcataaactgaacggcaatgaaaatcgtccattttatatcaaggctcctactcgtcttgacccacgatttgtaattcgtgattatggtccaggtcttaatcataatgacatgatgacgatgtataaaacgttctttgaatccacaaagaataacagtaacgatttcatcggtgctcttggtcttggttctaaatcgcctttaagctatacgagtacatttaacgtagtgtcttatcatgatggtaaagctacaggttatactgtcatgaaaaaccgcggcgaacctactattcgtccaatgttcgttgatgacatgaaagaagatgaagaaactggtcttgaaattacagttccggttaaagtagaagatattgatacctggcactatgaaatcgcatatattttgcgtacgtttggtgctgttcctccgaaggtagattctcttcgtcgcgaaattgaatatttcccggtagataagaccgactggttcagcgctaatagctcttacgaaagttatggtctgtatgcagtttatggaaaaatcgtatatccgattagcggtgtagatgttaaggcagattggctgcttaatcgttatggcaaggtttatgttcatttccctcttggcgaattagacattactccatctcgtgaagagctttctcttgacgaagaaacaattgctaatatccagaagcgtgtgaatgctcttgaagaagaggtaattaccgcagatattaaagcgtttgaagcgtatgaatctgatcgtgaattcctgcgcgagttcaataagctgagttctaaggaacgctctattcttcagagccgtggtattaccattgggaaccgcgatattaaacaagtagttgcgaagtacaatctcgataaaattcgttcatattatgttgataacgaagtgtcggtttatgtttcatgtgatgagcctgctcgtcgtaaagtgtcaagcagttcttggcatcgtcataaccaagtaaacatttctgatatttgcggggttgatagaactaaagcgtttgttcttattgatgataaagccggtaaacgcatcgctacagttcgagctctgtgtaaatctggattagttccaatctgggcacacattactgtaatcaaagacaatgaagatgaattgcatgtcattgatgagctgaagaaaatcatggatactgatgaagttgtagtattccgtgtgtctgaacttgaagcccagagaaaagctcttcctgattatgacactggtccaaaagagaaacgtccgaaatctcctaatgtttctctgcattggattgataaagacgggtactgggaagaagaccgtcagactttagtatcatctgaaattgctgagcttgaaggttatgcaatcggtcgtaatcgtgatgaaatccacactttcccagataatgtttggtggtggaatatgaacatcgcgagcatgcggtctctggcagaagcgtgcggaattaagaaattctatgcaattcgtccgggtgctatgaaagccgcggcaaaagccgatggattgctttcatttgaccgatttattatcgaccaatacatcaagtgtattgataaggtagattatgaccagtacatgccatcaaatgctactggaaatcgtatctgtggaaatattgcgcattacgataaattgaatttcttgtcgagtaagtttacagcgtctggaatgaaaaatccgttcctgacaaaattaaacaaaatcgctaaggtttgtcgtacaagtaaaatcaaagatgaaaacgatgatttagctttatgtaataaaatttataataaactgtctggtgatgctgagacaatcttctataaaaagattgaacagtttaaagatgattatcctgtcatcgcaagtgtcttggatacttggcggactgacagcaaactcgtcgatgatattgtaaaaatcatggagctccttgacggagcttctactcaaaattctgaaaataaaggtgaataaatggctgttacctgtctgtctgaaatccaaaaagatgcaatcgttaaaaacttcaaaaacggtctgtacactaagaaagagctcgccgagaattatggtgtttcccgtgacactattcggcgtgtgtttaaagagcgtgaagctcgagctgccgcggcagctgttcctgctaaagtagaagctccagttgagcgtgaatttaaatgggcagcaagttccaaattcatttcaattactgaaggccgtactacttataacgctgatagccaacatcctgggtttaaatctgcgctgcagaaacttgtagatggtgatatcgctggtgctattgaccacattaacctggaacaaggcatcaagaaattcgttcagggtaacgtccgaattgaagatggtactttattctataaagatatcgagctgaaatccggtctgactgagcgtatcgttcgagccatggaagatggcgaagactttaaacgttatctgcctttcctggaaaacctgatgctgaacccatctcgtcgtgcagtttatcgtctgtttgatttcctgaatgcaaacgatatcgacatcactgatgatggccacttcattggttggaaagtagttcgttccacttatatggactgtgcttcaaacacgtttgataactctcctggtaaaactgttacaatgccgcgtaaccaggtagatgaagacgatcagcgtacttgttccgcaggtctgcatgtctgctctaaatcttacatcggtcacttcggtagtggttctgaccgtattgtttcagttaaagttcatccgcgtgatgtagtatctatcccggttgattacaacgatgctaaaatgcgtacatgtggttatgtagtattagaagatgtaactgatcgttggggttcagaacttcgctaattataaggagccttcgggctcctcttttattatgggtgaaacatgattaatccatttaacgtatctcattctaaagttgttaatcttcgtggtactcatcatgcggctacggtgttttgccatcatgtagttaaacatgaaggtgatgttcactatgcttggttgcactgtgatgaactcgtagaacttggtgatgactttgttgtggaaccagacacatgtaaccacgacgatcgtgtttattttggtgaattacatatcagaggaatttatggcattgatgaacaaagccctgcagagattgaaccaactccggacatttaccctagatttgaataagctaaggggtgaagcaaaagtaaaaatcattgatactgccagatatagcttagatatcgatccatctcaagatagaattgacgttcttaaacgatgcagaattgctataccggcagagtatgtggtagcagattttctcgatggatacgtgaacgatcaagttgttgaccataataacaacgatccatacgaatgggcctgggacgtattagctcatccacactaccaaggtgttagagttgaagttaaaacacactttgttcatgaccgagcaaatcataagccatggattaacgttacgactggtaaagacggtctattccctaatggaagtggaataaatctagggcccatgtttaaacataaagtcgcagactgtataattatattcgttgcagaagaagtgtcccagaatgtcatacggtacacaccaatgtttgccggcggtatcgaacacctcatggaagtagtaaaaccttcacgagttggagcaggcgggtatatcatgcacaaattttaaaaagttgtttacttccgggattggccatgatactatggccttacaaactgaacgggagtaaaacatgagttacttagagctaaaatcacttcgagctaaacgcggaaatgcttctattaaagctgaacttttgaaagagtataggattctcgaatctatgaattggcattatgctatcattgcttgcgataatggcgattcaacttacggcggattgtatcccaatggagccgctgcagctcgcgatgagcatatagataaagttaaagccttagaagaaaaaattcgtaacttgtgcatttaatggtttactttactgttcttcagtgatactataatcatgttagctaaactggagaacaaaatgaaaaagttacttacgattttgaagaacacctttgtagtattctgccttatcgttactttcattggtgttttcgcatgggatttagttaacgtttggattaatgctttcatctgaggaaaatataatgattcgtagtagttttgatcgtcgctttaacttaatgagaactgttgttctgtcatttatcgttgcggtagcattgggaattgtcgccgtgttcggattcggaatttattttgccattaatgcgattgatattattcaaactgatggccttaaatccttagtagaaaccgtatgggaaggtcaaaaatgaaacgacacatcgtgtatcgtctgcttgctttaggtcttcttgtgttttgggttggtggtgtaacggcagtagtatatttttggtagtagaaggggcttcggcccctcatcggagaataaactttaatcaactgaggaaattaacatgcgtaatattatgacttttgctgatctcgataacgctggtgcagaactgatcggttctattcgtaacggtgattgggcagcaggtgctccatctcgtgaaattactgagcgcgaaggattttattttttgatgttcaatgatggcaaagcaggttatattggtgcatctgctcgtttctttgtagctaaacagcgttcaaaggcaggatttgaaagtgttctttctcatatccgttctggacgttctcagttgggtcgtactctgcgctcgaattgcatgacctacggtgtgttctggattcctgccaataaaatgaaaccgcttaccacaggttatggcaaaggtcaacttgcactggcgtttactcgtcagcattcaagcgacgcacagacctactctgagctgaatcgtattctgaatgataacttcatctttactttgcagaaatactaatgagaaccttcttcgtgatgggctatgtgtttctgatggccttaatgatttgctcaggaacattcatgtggtatggcctcgtgcctaccactaaagtaatcggaagcattgcgttcactgcagcatttattatgtttgagcgcatttgtaaaattgtaggagtttacaaatgattaagaaactcctaattgtggcagcaatagctgccgcctttctattagttatgtactatggaatgatttacggaatgatttatattgtgcttttcatttccgatgttatagtacaaatcggctcactaatctggtaggtacaatggatatttttgacactctattaaaacaagcaggttctatcgatgatttggctaaagcgtcaaatcttcgtcatcgcgatttgaaatctatcattgataatgaagcaaaagagtatgcgatttacactgtagaaaaccgcgctattccgaacttaattgatgggtttaaacctgtacagcggtttgttattgctcgggctcttgatttagctcgcggtaataaagaaaaattccataagcttgcgtctgtcgccggtggtgtagctgatttaggatatcatcatggtgaaacgtctgcccaagatgctggtgcattgatggcaaacacatggaataacaactatcctctattagatggacaaggtaacttcggttctcgtttggttcaatctgctgcggcaagtcgttatattttctgccggatttctgacaacttccgtaaaatctacaaagatacagaaatcgctccagcacataaagataaagaacatgttccgcccgcgtattatctgccggtaattccaactgttcttctgaatggcgttcgtggtattgcaacaggatattcaacttctattcttccacacagctttgaatctgttttagaatgtactaaagcggctcttcgtggcgaagttatggaacctgaagttcagttccctaaatttaatggaaaaatcgttcaaaccgaagacggttctgttgaactgcacggcgtgtataaagaaacttcacggaactcgatctatataagcgaaattccatacaagtttgaacgtgcttcttatgtagagaaagtactcgatcctctggaagatgcaggatacatcacttatgatgatgactgttctaagactggttttggcttcaaggttaaattccgtaaagattatgctttaagtgaagaccctgagcagcgtcatgctaaaatcatgaaggattttaaactcattgagaaaatgagccagtacatcgtggtaattgacgagaatggcaaactgaacgataagttcaaaacttcaggtgagctgattcgtcattttgtagaagtccgtaagacattcaccgccaaacgaatcgagcataaaatcgctgaaactaagcaggcatttaatcttgctcaggcaaaagctcaatttatcaaagaggttatcgcaggtaacatcgttatccaaggcaaaactcgtaagcagttaactaaagaaattgaacagaatgaactattcaaagaccattctgaaaaactcgtttcaatgaacatctatcacatcactgatgatgaagcaaagaaactcgctcaggaagcaaaacgtcttgcccaagaggttaagtactgggaaaagacaactcctgaggctgagtatctgaaagacctggaagaactatgatagaattttatttaattataggttctataattgcagtattaggtctagttttattgctcctcagttaatctagggaacctggaggtcatctccaggtccttccatataaatctatatccctccaaaatccctccttagaatgccccaaattattttcacaaagttgtttacatgcttactcggttgtggtattatagcaatatcaaaacaacacggagtaaaacaaaatgattacatcattaaaatctgatatcaaaaacattctttatatttctactcaagctgatggcactcgactgagccactatgtcaaaggtaacattgtggtgcttgatgtgttcgaagttaatcgcgagtatcctatgcgccaggtaattcaagcgagtaactatgaagacggtgaagagtatcaagtcgttctttgtgtatatgatgatttctgggtgcttaaacttgagaatgacgataagttcttgatctttaacgtataacatttttactgctctttgaagaaaatttttcagagagcagaataaaatggtttacaagctggttagcagatgatattatagtctcataccaaacaaattgaataaaacatcatggagaatcacaatgtctaaagtaacttacatcatcaaagcttccgaagatgctctgaacgagaaaactgctgctatcctggttcaggtggctaaaaaagatttcatcacttctgctgagctgcgtgaaatccttgaagaaaccatgaacgcaggttctgttaactcaaacatcggcgttctgattaagaaaggtcttatcgagaaatctggtgacggtttaatcatcactggtgaagcacaggacatcatctctaaagcggcagttatctatgcagaagagaacaagcctgaacttctgaagaaacgcaatactcgtaaagctcgtcctctgactgaagatatgaatgagcacaaagacctgatgatgaaacttctcggtgagatggaagatatcttacctctgaaagaacttactgtttaccgtagtaactatatcgcagttctggaaaaacgtaccttcggtattcgtagtcttgaagttaacaacaacggtactttccgtatcttcggttataagatttctgaagagcatcagaaacacttcactgacctcggaatgtcttgccgtgtagctgcaacaggtaatacttacttagatatcgcccgtactgctgaaaacattgaaaccatcatccgctctattaaggaactgtaatgaacaagtttaaagtattgaatgaactgcagcgttgtgtagaaaaagttaacttgaatgcgaatatcccaactgattgttgggatgtatggttccgtgggcactttatcggatacattgataagaaattcgcaaaatgctatgctatctacaatgcagatggtaaacatatcatggatgtagataattaccaaaaggcccttgctaaatttgttccaatggcggaagctgttaactcaatggagtggttagagaaaatgcagggtgaacctgttattcgtcaaattggtattcgtgaaaagaaaagtttgtggcagaaaattaaaggattctttaaatgactgaacaagaaattaatgatttgattatgaatcttgtgaaagatattaatacccgggctcttcacaaataccaaaacggtgaagcatggacaattgcagactgtaagaaaggtgcagaccatggccgtgaagttattaaaacctttaacgagaagctgatcaaatgtgtaatgtaaatagcgaaattccagaaatctgctttaaagtagctgattggtgggatggacgattacttcaacgtcgtatcgtttgtgcagcaaatcgttttgaattgaaaactggtggaacaattgtagttccaggcactcgccattattctgttgatatggcgaacgttctagatatgttccgcgacaaattggtttctgaccatgtccatggagacaatcaaggatttgttgaccagtggggcgagtacttcacacgtgaagaagcattaatcatcgctacacatgcgggccaagttaataccgttcgtcctaaatcaggacccgccaatgaattattctcagaggatttatactaatgattagtacattaaagaataacattacgcttttaaaaattcaacgtaaatcgcttcagcgctcattagaaatgatggacgataattggggtacatataccaatgaagccgggtttaaaatggcagatagcaaattcatgaaaactctcatggataaggaatacatctgtccgtttagtcatccatttaatggcggcgctaaaccgtttcttgctgaaatgtacaaagtaatgacagaagaaatgattaaagatattgactattacatcaaggaacttgaatgtaaggaagataaagcgtgagagcaataagcgccaaggcagattacttcaatagcttaaatcgttcagaaaaggctcaaattaaacggtttatcttggaattgggatatgtgcacgctggagatttaaaagcacatatccaagaatgtggtattgctaagcgttttgatattacatgcaactgcttaaatgaggtaatttcacatgtacaacccagtagcgaagaatgactttaacaaaggaggcgcacataaagataaaaagcgtgctgccaaagaatcaaaacgtaagcaaaaacacaaaggtaaagacaatgcgcattctgaataattccaaatgtactactttaactattatgtgtgatgacctagaagctctccataagaaattaggggaccattctggattagtagcagatatccattctgaactaatggaagacctccagaatgctggctatggagactggatggtacacgattggaataatggtacctttactgtagctattatcgctaatgttgaacctgaagaagttattgaacaatttcagaaatgtgttgatgcttatgacattggagattatctatgaatactgaaactttacgcagagaagatgaagccaaggcatatcataaacgcgttgaattgctttcagcaattaaagtagaatacaccttacaagttaggcttaaagttcttaactcttgggctaatgacttagaagtaaaacatttagagcaagcagtaatgtctacgtttaaccaggacacttctaagccattcagtttgtcagccgacttttatgcgtatggaattattactattaaagcaaaggatagaggtgacattataagtggagttgagtatattgaaagcattttaggtaatcgcggagaggttgttttagcatgagtcataacttagaatctgtcgttgaatcacaaagatatctcgaagcgttaatgaataaaatcgcgcttggaagtctgattgacttgtcctttcaagaggcaattgacgtatgtcactggttgaatcgtagggttcgtccaattggaaaggaatggtatttaacggctagagtaaaagatggtcgctacgggctctggatgtcctctggtgctgagtatatcactaccaaggaagatttgaattctcgttgggaattggcataaactggtttacaacgcggtatcaagatgatactataatcacataatccattatgttgtaggaaaaataatgactaagtttgaaattgtccaagaaatcgttactgttgcttctattctgactaagttcaatgctgaacatatcatggagaagcgagatgaatttattgcgttcttgaatgaaatcggaatcaagaacgagcaggggcgtcagttaaatcagagcaactttcgtaaaatggtttctgagttaactgacgaagagaagagaattctcgttgaagaatacaacgagggatttgagtctatctatcgaacaatggctatgcatagtaataagtaatcacttagctcttccaagagctctaaccgcctgaccacatatcgatgttagtctttcgttagataatgcaggtttggaattgtaccagtacatttcaacagtcccagcataaacattgtctaaattgaaatacggacagctaaacatatacgatatctcaggcggttttctttttgttggtaagaaagcaaattccttatccgtccaaaaatatctacccgataaatgcgtactatattcagcagacgttttgtcgattggatatcctcccaggtttttagaatctaccgtgctaggtaaagtcccctcataagcaattaagtctacgaagtagttcaagtttttaggtctgaacgtaaagaccgcagaaaaatctgcaccacttgagatatgtactatctggagttgttcgagtgctatgttatcaaatcgggcatccctatccttttgaaccagtttatcatacttatcataagtactatcgacgtaagcagtaataagactatcagacttatatccagcaaacgccaacattgctaaaagtacgacaacaaaaacacgggaaaagagaactcttcccgtggctccatctttgaataatagctcgagcaacccaagaaacatatcaaaaaatggtattgattgtttgcttgccatattgctctccttacagagctatttattgctatcttctagttataagaccttgccagtattggtcagttctgtcactaaaccagtttttaagcttattagcttcgtcatttgaagctatttgatagtttcttacatctccatccattttacctggagtaaaatcaaaggtagtaccatctgacatcattacccgaagatttattgcgtcgccatttcttattcccaaggttgtaccttgagggtcaccgttccaatagttaaccccaccttgtccagatacagacacaaataaagtaacctctttaccttcaaagttaccctgtactgtattttgggttgtcggtttagggctccagttccaaccaccaacttgccatgaacctctatagtaaatattgttccagttacgatattgcactgttaaactaaagttaaaaacacttcgtcctatcatattggacatccaaaacggtgttcctagtcttaatttggctccggcttgggccatccacggctcgccggtttcagccttcgcggaacttccaacccatggtcctgttactgccatgatatctcctcaaagatggggccgaagccccatagcattatttagatttaagttcttcaatttcggctttaagacctttgacctcagctgaaagttctttcactgattcaacaagaagagcaattactgagttataattcagacgaagcataccgccatcttcttcattatcctgagtaactgcttcaggaagaacttcttgaacttcttgagcaatcaacccagcagaacgagtagtaccgccagaagtattatgaagctcgtaagtattaccgcttaaggtctctactttttccaaagcgttttcaataactttaatatcagatttagctctacggtcagaacgaatctcaacgttatcaaaagaaccgttacgagtacagaagaagtcaccgccggctctaaagtaaaagctattgtcttgtccgtatccgttaacattaagaatagcctggtgatagtttcctacatattcttggaaatataacgaagcataagcaccattactaaatctagatactaatcctgcggtgtttaaatagtcgtttttattgccaccagggtaattagtagtgctgctaattccgttgtagttactaatagcgcccgggaattggcaagaaccactgttccagaagttccatactggtccggaagcaccggcagatcttatactaacattaccagggtcatcggcccaaagaagacctttttctgtaccatctgctttacggaagaacacatgactgttaccatcgttctggacgttaactgaagtggatacactaaattcttgattaaatctagcttttccatcaaccgttaaaacaccgttaacagcagcgtctccggtagcccacaaagaagtagtttttaactgatcacctgtaattattaatctaccagttacagtaccacctgctagcggaagataagtatcaccagcattactaatagcagaagcaaccttatcatcaacatatttcttgttggttaggtgcgagttatcagtaggagcttgacctgcaataacaaacttaccagaagcgacgttgatgtttccatcagcattaatcacaccgctgaagcgggaattgcctttaactatcaagtctgagttcaagttagtattacttgttactgtaagctgcctgttaatttgggcatttccgtaaacagtttggtttccgctagcatcaactttgaatatatcgctaaacgtgtcagcaggattaatttggttgttggtatttgcagataccataacggtaaatgagttagatttaccgatagccatttttcctggcataccgtttttcttgactaaaccaatatcagagtttttgccaagaacgatcattctgttatcttcagaaacgttcaagttgcctgtgattttcgagttctgggcctcgaactcaccgccgactgtcattttaccagtttggtcaataacagttgattggcttgcagtatcgccattcggtcttaaatgaatcgcttggcctgcttttgcatagattacaaaagcacctgcagtgtttgaacgaacagcagggccttgcgcccattcaagcatcgtctcgttattgccatatgctttgactctaatctcagaattagatgtatcgccgtaaggacgaaaagcaatatatttcgcggctgctggtgctgtagtagaagctgacataattaatgcgccaatactaccaccttgggcctcgcgaattacagcaccattcttaaacgtgactactggatcattatttccaacaccattaacaattaatccaccaaacgtcgcagtttgccctaaacctaagttaaaattgttacgagcatcggcggcagtattagctccagtaccgccagacgaaattggtaaaataccgttagtgtttgatgtagttattacttcttcccacggcgtccaattgaccgccggcgcggaagtagttcctgttccagcaccatatctaaagtaggttttattattacgtccagatataaatgtttgtttattacggaaatctacaccagctgctgatctcatcttttcaacgataagaatgaaatcaccttgcagattagttaacgcaggaggcattccagtaatatttgctccaggaccttgagctaagcatgaataaaccctacgagtaccaacgtcggatgaattcaagaaaagatcatcaatagacaacgttcttccgccaatgtcttcagcaacttcttgtccaagataacctccagtcatgttaactctaaccattccaatgctgttttgatcaaatactaaagcattatccgtctggttatcaccggttccccaacgaagagtaccatctttagctaaaccaagtttacgttgaagaatcggattaacaccagttaatctgaacgctattgataagtttgcatcggtatttctttcaagaactaccggtgtatgctgaacgcctttaatgtatatagcctgggctccagcatttgtatcagattggtagacgtttaatctaccggtcatggtgtcacccgatttggatactttgctattagcagttccggttaaattacttaaataattgtttaagtttccaccgaataaagtaccaccaacaatgtttccatcagtctggaatgtcacagctttagatatgtcagaagggaataatactaaatccccagtgtttctaatttgcgccagatgacgcatgttgctagtattaccttcatagttccaaaaatcaaatccgccaggaacagttgaagtatttgaacgatggttaataaaatcagtacgacctgacccgttttctttgttccaagatatgtatgcaccttgagaaggtggaacatacgctgcaccgccaccggatagttttaacaccctaccactgacggtattagcagtaatatcaccactgactgtaacatcagctccaaaagtaccgccacgggatttagatacgaagtcgttatcatcggcattaggtttatttgacgttccgtaaagcatgttatagcttactttaccatctgccaatccgcggtcatttatagcaaatactctgacattaccggatgaataatcgatattaagggcagccattgtatcgccggttctagaaaagaatcctgctccatgcgaataataaggagacccggtatactcagctttcccatttactgtcttaacgttagccctaaatgttgtaccaccaatagctttaaggcgattcattaaatcgacatcggatgtaatatcaacaattgattttccgccgccgccaacaccaaaagcgccgacttccatcacatttccgctagattcaccgacatcacgaacagccgcagttctaagacccaggttatttcgagcgtctcctacgttagtagcacctgtaccaccgcggttaaccggaagagtaccggtagtatcactgaaatctggttttgcgatactatcaaaaatctgtttcattgaaacaagaatgcttccagatggtgtagtagcaccagtatcttggcctgtttcgtagataattactttaccactatcctggccgttgtatccagcagtgttcagcactgtgacataaagcccattgccgtatcgaggaactttagcgtaaaaatcaaatgaagcctctgaatctgtagcagcatcatttttaacaacgtaatattctggagcgtttcctctattaggagaaccaaccctgcgccattcaacccagttatctaaattgctagtgctccaggatgttaaattgcgaccagatagcgtgataaaatcaacataatgtcttccgtgtccagaatcaatgccgccggtaatcattaaatctaactgtgaagacgcatctcctgggtgtttaattgtagctactttaacccaacgtggagttccagcagttgcagcagaaattacgtattgccatgcctgacggttgttttctacattagttagaagagtaccggatttaccaggacctcttccattcatagcgtaataaacctgggaatttctgaacgttaaattgctgtcattagttaattgaagaacaccggttcctctcaggtttttaatgtacgcgtcattagcgcctacacccatttccaaagtaagagtgcttccgtttgaaatttttaccgttttattagttaaacgaaggtccccaggtatagaggtatcgccaaacccatctaataatgctaaacgacgaacttcagcttgagtcgttccaccggttctttgaacaaaatagataggttcatttccgttatcatacgtaccgatttcaagaaatccttggtcagatgcaccaccagctccaatgtaccagccatcattattagcacacttaccggtgatatgacgtactaatgctccgcttaaatccgaagcttcaaaattgatcgctttattcggagaaatagtaacgttgtcttttaacgtagtagttccatcaacattaagattacctgcagtatctaagaaaggaacccctttacctgcaagctgaacaacgttatcggcttcatctttagtgtaaatggcaagagtacgcccatgtgtattcaacgcgatttcgccacgggctacgatatctgcacctggtgctttattctctgtgctagttcttttaaattgtatttgttttaagttttgatcggccatggctacctcttagtatgtgccaaaatctattgttaccccgcgtgaaataacctgatctaatctaggagcatattcaccggatgttgctttgtttactataactacgccagcttcagctctaagtgcaccggtcatggtatcaccagctttcttgactgctgcgttagctacgttgctaacagtatttattcgcccatcgacataatctttacgagttaaatgctgagcggctgttggagtagaagcattagcaataacttgggaacctgaaacaatatcaccaactgttccgatagtaccacgcctagcactgaaccagattgtacgcccctggaccccatcacttgtacatgagttccaaataccgatgccgtaccatgaacgcaaatccatgttagatttttctctggtatctccatctccgttaccagaatacaacccgttcaggtttgaaccaccagaaaacgttgcggaaatcttaacgccagctttaaattcgacttcttgttggaaaccttgagaacctgtgccaccgttagctttagatacgaagtcattatcatttgcttgaggtttatctatctcagtataaacctttttacctctataagttagggagtttcctgccggcacaagaggaaaagtacctgcgtgccaaataggatttccaccaactgttgaacctgcttttaaatcggccatagtttatcctcttatatattttctatttatacgaaaaaaggaagcccgaaggcttccttagtctgatgtttctctgaatgattgaactggaataacaccgctcggatcgacttttgaatttggaagttccataatcatagtggttcctccttcaacgcctttattcattcttacgccattcacgccaaattcttgaacaacactgttaagtttttcgctgtgcgcggtttgaacaaatacaaggtttttgattttagagtcaccaactacagacgtttttggatatcgtgataccacgatagtaaatccatcagcgtctgtaggaacagcggtaaatctttcaaatcttaaccatctatcagctccattttttggaacttctaatgatacgtttgaagataataaagatgtacccttgaaccaccgcaagctggctctagtagtagaacccgcatcaagaaggcttttagatgcatacatatcacatactaaaaataccgaatcccctggagataatccataatcagcgattttgcttatagattcattttgaactggatatcgcttatattcatatccagtagaatccgagtactcattagtgtcttcaatggaacgataagggcagcctgtatatcctacatcgccaacgttatcatatacagtatctactttagctctggaatcttctttaactacaccatcatttccgtaaaatgactcaattaatatacgtccttttgctgctccgagcactccaacataggcagagtttggaaatgatttggaaaagtcagaacctggccaagaagcagaccacttgtttttaaaccatctgtctattaacgggctggattgaaatcgttcatgtgtcattataatatacaatcctgaagttaatccatttgcatattctacaaacgctttgttattagcgttattatcatcagtggtaacatcaaatgttttaaagttaataaaactgtcgccattaacctgaacgacattaatccccctccgtaaggaggaggtcatatcaaaggcaccattaatattcaattctggcttattaggaacagcattagaatgcgtagcataagcttttagccaatacttcacagagtttgcctcagagaggactcgtgtttccacgaaatcctcaccaaaggctgccattaaaattggttcagccattaatcacctacccattcaaatttgagagtttggtttggacggtctggccagattttaactgggccaagcttaatccattccaggacttcaagggttttaacctgagttgatactgagctcggagctccgatatcagctgcagttggaggagtagcagatgtaaatactcgcatccaatcatcaaacttattaaggtttggattataaatcctcatccacacagtatgcgcgaaacgcttatcggcagtttcggttgtcggaggataaggcgtccaaagctgataagtgttgtttgtagttacaccaacctgagttaaaacaccaccagcagcagttttttcttcatatccggtcactactaatgtgcttggattagcagggtcaatcggtgttctgatcggaaccatataaccacgaagacctttcaatttagtagcgtctttgatttcagcagtccaagaaccttgtcgcaatacagtatcattagtcggaacataccatgattcagaacccgcaatgacgatagcagaactgcttaagttaagattaccggtcatggtgtcgccagctttcttaacataacggccgtcagctaatcttgcgtagtttttggtagttaaaatcggatacgatccagttgaatcctgcgcaaaaatttgtgtatcagcgtcacgggaacgaataaatgcggactgtgattgggcaccgaatattgaattcaatccctcgacagcaagcatctgaacgtccttaaccataacagttccgccaactattgcatttccagaagacctcagagttttagttgacacttcgttaggaacttctaacgtaccgttaccgccaaatgtgtaggtctggcttgcagcagtagttcctgttccgttttttacgcgaacttttaaatttccggctgaagctgtttgaggctcagcataaattataccacgctcgcttccgtctctattttgaaaacgaacatgcacatttccagtatcagctgttggagaaattttaacttcgccaccattagcatatataatattctggacagaaatattattgctaaatgaagtgtcctgactaaatgaccaagctccagaaatagtctgcgctatatcgcgacgagcatatttgtctggggtttgaccacctagcattccggtgtcataggctttaccaagacgaggtaagtaatgtttcaacgtgaggttcaattcatacggagacactgcgacgcccttagaggcatacccgttatccggaagagttgagccattggtatcattacctttccacgttccatcgcctgtagatagcctcacggtccctctaacgctgtctgtagcttgccatgactctgttacctgaatagtctgtttcaagtaagcaggaggaacaattctatcacttaatgtgcctgcatcaacttgtgcctgcgtagcatactgagcaagaccgatagctccttcagttgctgttttagcatgtagcgtggcagcagtaactattttcttggcgtcggttccggttctaacctcagcagcagttgcaagagtagttgtacctctttgagaagtacttgcttcctgtatgttgatggtataatggtcccagaggttcccagtaatagttaagccagaactagtattaacttggatacgatcagtattagcaaatttatcgaacagtaatttagggtttaccattactgtacttgaagtaccagcttcaaattcaccctgggcaccaggtgtcgcgaagcgagcaataccagtacgatcgttagttgctgtacggtcatttaatgttttaggtgtaactgctttattagtcacgccgccagcattaacttctgtctgtgtagctatttggattaatccaattgctccatcagtagcaacttttttatgcaaagattctggtgtaacgaccgtaggaatatttgaagaagccggagttccgtttctaacttcgctatcagttgctaaccaaactattcctgactgatttacagtagctttatactcacgaagagtttttggagtaactgcatttttgtaatcagaatgatcgaatataccggtgccagcagaagaacgatcagcagttgtgttaggagcaccaccagtttttactaactgaataacacctaaccgtgaatccgatgtagtacgataaagtaacttcttaggagtaacaatcgtaaaatcatctgttcctgcatccattttagcattagtcgcaatctctgctaaacctctacgagtttcagtagcagacctttcgttaagctttttaggagtaacgattacattatccaagtaagaagcagttgttgcctgattaacttcactggaagttgcaattcttgctataccagtctgagtttcagtagaacgacgtccgtttaaggtttctggcgtaattgctaattctttttccggacttgactccgcgttagcttgagcctgtgtagcaagagcaataacacctaatcgtgctctggtagtattgtctttagcatcaacacgttctacggtagggtcagattcagttacaatccaatagctttttccggatgctttatcttcaatatatgcaagctcaagaacaggaacatatgacgtagttccgttaaaggtaatcgagcttgattgaacccatgctgcatcaggtggatactctgagcgttttggaaattgcagtaaattcaaattgctagcgatggtatcaccatcagaagctttaattactacggtctgtcctttacgcatataattcattgcgattttgacagtatccccaacagctacgtcagtaggtaaagtaacgttaattgttttaactgtactattgtcagtgccaaatacagaaatatgctcattaggcattaaggtaacgtcagaagtaattattcttacacgtgtacgtaaatcattttcaaagatacgccatattttgtcgatagcgtcatacaccaaaaatccattacctgaagtacgtacttgaatttccgtttgtccgggagtcccaattgagatagttgggtcaaacgtacgcacagtcatatggttaatcggcgatgtaccatcaaggtcagtaaaattgatgatatcatttgaattagcgaacaacggcagagtaataaaaatctctgagttggaagtataacgacgaactacgttatcacctgcctgaacttgcgtcggaacaatcccgttcggaactaccatcttggcagtatcgccaaaatcggttaaacttgcacgccatgcaccattactaaacgtaagcataatttgtgaatacggacgtgtaagtcttacctcacgcagacgcgattcaccaaatacgatagacgcaccagtatcttgtgctttaataagaattccgttatatccagggcgtccaccgatatcacgaactacaatggtatcaccttcgtctggtgctaaaggtaacaacagcgtagcattaccggcagcgttagagtcaacgttgatgaactgaccagattgaatttcaaactctcctttacggacggtataaatccagttcgggtcaacacgtaaagaagtccaattcgcctggttaaaatctccagcaggctttggaatatctttatttgcaatccagatacgacgtccataagtcacagcaaaatcggtgagatacccacgcgtcgggtcatatttttggatagtgttttcttgaataacgtactcgacggagacgccgtcggttttaacgttgcggtcagctagtgccacatttataactttatttccgcctgcgtccaagccgttcgttgcacggaaatgttgtttcagtaaatcgctcatagagtctcctatgggggttatgcttcattatagaagtatttataatggctgtactaactaattgaacgaggttcaaatgtctgatttaaattgcttattcgccgaagaagaccaagtaaaagaaggtgtcattctgattgacttgtcgcaaatcgcaatggcaacaattcttcatacgtataaagaaggcgataaactaaccactcctatggttcgtcatcttattctttctactttaaaatttaatgcttttaagtggaagaaagatggatacacaaaaattgtcatttgtgttgataatgcaatcaacggatactggcgccgggatgtagcatattactataaaaagaaccgtgctaaagcccgcgaagaatctaattgggattgggaaggttactttgaaggtcttcgtactgtaattgatgaatttaagcagtatatgccttattatgtcattgacattgataaagctgaagccgatgatagcattgcggtattaaccaaaaagttcagtcttgaaggccatccagtcatgattgtttcttcggatggtgactttactcaattgcataagtatcctaatgttaagcaatggtcaccgatgcagaaaaaactggtaaaatctaaaaccggctctcctgctttagactgcatggttaaaattattaagggtgataagaaagataacgtagcttctattaaagttcgttcagatttttggtacacccatgttgatggtgagcgtactccttcgacgaaaatgacgtttgttgaagaatgtcttgatgctggcgaaaacatcaaagatttgcttactgaagaacagtataagcgtttcttagaaaatcgtgtgttaatcgattttgattacatccgtgaagacattgttgctaacattttagattgttataataactatcaactaccgggtcgtggtaaaatttatagctactttgttaaatccggtctgtctaaattaatgaaagaaattaacaacttttaaggtgaatataatggctaagaaagaaaaagagcaagtagtatttgatgaagcagtacacggacaggctctgcgagatatgattaaggaagcctcaggtaataagttgaaagcagaaagttatcttgaacttaacaaagacattaaagaccgcgccaagaaagaacttggcgtagaaggcaaactgtttaatcaactgcttgctctgttccataaaggtacacgcgatcgttacgaaactgaaaaggacgaagtggtagaagcttatgactctattttcgcttaaagatgagggggacacatccccctccgaatccattaatcagctgctagataagcaagctaatggattcgctattgaatctatggtaacagaacttggaatgggatatctcgaggcaacgacacaatggctagaagaaaattctattcctgagggaaacttcagcagatatattccacctgcaatcatagaaaaaattatgtcagaagcattagaagaaaatatgcttcgaccatcatttagtcaaacacataaaacgaatagtctggattttttattatgattcgtctacgcatgccccaaaacaataatagatacgttaacggtaagagcgtttatcttttatatttaatgctcaaacaacacttcgctggtcgatatgatgttgttaagtataattgggtcatgcgtgtctctgataaagcttatcaaaagcgtagagacaaatacttctttgagaaacttgccgagaagtatacgctaaaggaattgactctgatattcatgagcaatcttgtagctaatcaagacgcttggattggtgatatcagtgacgccgatgcgttgatattctatcgtgaatacatcggtaagttgaagcaaatcaaaactacattctctgaagatgtaaagaatatttactactttgctaagaaagttaatgtagataagcttcatgatatttttgaatataatgagaaagtcggaacatcttatgtgttcaaacttcttcagtcaaacgttatatctttcgagacattcatcatgcttgactcgtttttagatataataaatacacatgatactgcaacggataacttagtttggagtaattactccactaaattaaaagcttataaaaaacttttaaacgttgacggtgctgaagctaagaaactctttattagcataatcaaatcttgtaaagaaattagtatataattaatctatcgtccagttgcaaggacccatgttgcaacaacaactgttaaattaaaaaggtaatcatatgtttaagcgtaaaaatcctgctcaacttcaacaacaactggctggtctgaaaggtggttcttctttctctaatgaagataaaaacgaatggaaattgaagaccgataatgctggtaatggtcaagcagtaattcgcttcctgcctggtaaagatgaaaactctctgccgtttgtaaaactgatcaatcacggtttcaaacacggcggtaaatggtacatcgaaaattgtacttctactcacggtgattttgattcttgcccggtttgtgctcatctgagtaaaaacgattcttataacagcaacccagctgaatataagcttctgaaacgtaaaacttctttctggtctaacatccttgttattaaagacccggctaacccagaaaacgaaggcaaagtattcaaattccgtttcggtcagaaaattatggacaaaatcaacgcgatggttgaagtcgatgttgatatgggtgaaactccggttgatgtaacttgtgtgtatgaaggtgcaaacttcgtcatgaaagttaagaaagtcgggggtttccagaactatgatgaatgtaaattccttggtcagtccgagattgcaaacatcaatgatgaagaaactcagaaattcctgaccgaaaatatggctgacctcagcgaaattgtggctccatctcagtttaaatcgtttgaagttaacgaagccaaatttaaacagattatgggtacagcagctcttggtggtgccgcggcaaaagcagcagctcaagccgataaaattggtgatgacctggattcctttgacaaagacctgtctgattttgaatccaaaccgacctcttctcgttccgcagacgatatcatgggcgatgctggtgacagcgttggcgatgacgatctgaatgatattttgaacgacctctaatataaagggaccttcgggtcccttttttctttatccctccaaaaatattttcacaaaattgtttacaagccagttgatgagtgatactatatctacatcgaaacaaaacgagtagaggaaaacatcatgggtaaattaaacattgatatcgtggcagaaccttacattaataaatcaggattttgtactgatttgatttttgaagatggttcacgtttttatgacactgaccatggtattgattttgatttagttattaaagaaggccctggtggcggttggccaaatattgacctccgtggttctaaagaagcagttcgtgcttggttagaagcaaacgagtgggaagatattgatttgatgatggaagactggaaagagtaattacctttggggacttcggtccccactttgaggaaatgataatggcacaggttactgtagaaatatatgattatgaacacttcattgaaaccattgaaaaatacggtttgattgaagttagtaacaaatctgccccatggggaggaaacgaaatcacggtagaaggtgatactcctactctatggttatggcttgaacaagaatattttcctggcatggatgatgaatgccgtgaagatgcattaacgacttttagcgggtaaattatgaaactgaacacagaatatcgcattatcccaagccttgctgccgagtgggacctttcatctagcggaaatcgccggatgcgcttgatgattgaagagcatggtggttcgttctttcctactaaaatgctcgacgaagataatattttcatcacagaagtaaaatttaaagatggaacaactgctgacgctgaaggatttggagacgcatactttgaaatatctgattatgaattcaaatacttcgaaccagtatatgaaattggtagtgcaatccaacctggtcctactcgcttggacttgatcgttaccccagaaaatgcagaagaaatgattgacttgatcaaaaaagttttcaaaaagtagtttacacggagctatgcttgtgatagtatagctccataatctactggagaataaaaatgaaacttcaacgtcaaagcattaaacttggttctgaatatcgtggtaaatggaatttctgcatttgcgacaaaaacccagaagaattagagcgtgttgaagaagtactgtgccaaatggaagctccattcactatgggtggcgaaactgtctattggaatgattactgtgataactgcccatgctatgaagatgggtatggctcaggcttctggattcctgttgaagatgttgaagaattcaaaaaagcatttaaacttgctaaggccaagaaatgattgaggctgaattagtagttttgttaatttctgttactgccgcttttattagcggcgttatattaggattatttttatatgcctaaaattagtgtaattggatatccacgtgttaatattcgttgtcaatttgatgaaattcctggagtaactcatattgagctcgtatttgaccctcattcgcgatgcaatcaggtttcaggtaaaattgattcagcgtatggtgaatttttaattaatgaccaagttgttgtttcagctatttctggtgaacaggcgggttcgttgtatattctgaaaagggaagtatttgatgaaatttcagaagccataaaagaaggatttaaaactcttcagagcatgattaaagctagtgggtatacaagtcatgtggattttaactgactgggattgtaagtactgtggcggtagcctatggcaattaggtggccggtgttttaagtgtggaatgaggcaaggttaatggaaaatttcgcagtagatgattatgatgatttgatttggtgggacggacgcgaatgggtaactatctgtgcaatgtctaacgttgatagtgctattaaacgtctccaagagcttcaacagaagtgggaagatggcaatgttgaacgagttgaattttgctgaggtttaaatgattcaaatagtttatgcatttgctcctacaaaaaccgtagatggcaaaaatgaaaacgcttttggtttaggtgatggtcttccatggaaacatatttcccaggacatgaaaaactttgctaatcgtactcgagatactatcttgatttgcggagcaaagactttcatgagttttcctaaacctcttcctggtcgtaagacaatcgttgtccaagacatgagtcgtgcgttagcaactgctaaaaatggcttctttgcagatgcttatgtaagtgaattagaatttatcggtttcttgggtggtgacattatggccgctcatacttcttacaacagcactatcacttttaatagagaccttaattattctatcataggtggtgccggaatcatccagaaggcatatccatatgcagatagggttatccaaacaaccatcagaaaaagtcatagagtgaattctgatgtcactctacctgctgaatttgtagcagctcctacttggccagaatcaggattcattactaaagaaaatcactggtatcatattgatgaagtgactaacatttcagaggtggtctatgagcgcaaactatgatatcactcagctatcagaagacaaagttcaaaagaagtggaaaagatttccatttaagcatggtattcatcttctagttttcagttataatggtcttagcacttataacggttcaactacagtatataaccgaaatggaaatatacctattgaaattgaacgtgattataagaagatgttcatcggaatgtcacatggcaatgtgatggtcaaagatgatgtagtgtctattattggacgatttgaaaagcgtggtgatcagcttttctttactcctcttcaggaaaaatttaatgcgtgaataccaagaattaattaaagacatttttgaaaacggttatgagacggatgaccgaactggtaccggcactattgcgaagtttggtactcagttacgttttgatttacaaaaagggtttcctgctgtaactaccaagcgtcttgcatggaaagcgtgtattgcagagctgatttggttcttgcaggggtctactaatgtccatgaattgcgtcttattcagcatggttcattactagaaggtaaaactgtttgggacgacaactacgaaaaccaggcaaaagacatggggtattccggtggtgagctaggacccgtgtatggaaagcaatggcgtgatttcatgggcgttgaccaactaaaactagtcattgaccgtattaagcaattgccaactgatcgtcgtcagattgtaactgcttggaacccgattgatttggacaaaatggcattaccaccatgtcatctgctttatcagttcaacgttcgtaacggatatttggacctccagtggtatcagcgttctgtagatgtattccttggtctacccttcaatattgcgtcatatgcagcactagttcatatcattgctaaaatgaccaatcttaaacctgggcatttggtattcactggtggtaacactcacatttatctgaaccatattgaacagtgtaaagaaatcttgcgtcgagagccaaaagagctgtgtgaacttgaaattaattattggcctccagtaaaagataaagaatttcatgaattagcaacagaagaacaattagcttgggttacaggaatgatgaaaccatctgactttgttcttaaaggatatgaatctcacccaacaattaaaggaaagatggcgatatgaatattcgatttgttcgtaaaggacaccagtctaaaacaatattaggcgagatgtgtgatgcattctctagtgatttgcctgaagttaatgacaagatagtttttgacgggaccgaacaaagggttctgtctattgttaaatcatatgaatggtctataggtaaaacacaattaatctgttggtttgaagttgatataacatgaagatatgtcgggtggttaataaataccattccgacttcgatgtaaatatccaacgcggaacaatgtggggaaattacgtcggtaaagattgcgataatcgtcctgatgctattgctgcgtttaaggacgattttattgctaagattcggaacggagaaataaagcgagagcacttagaaactttaagaggaatgagattaggatgcacctgcaaaccgcttccttgccatggtgatataatagctcttgtagtgaataaactttttaaagatacatttgaattagaggacttatgcaagtaattaagagctcaggtgttagtcaagaatttgacatgcagaaaatcattaaagtcctcgaatgggcgtgcgaaggaactaaagtagacccatacgagttgtatgaaattattaaatcccatctgcgtgatggcatgagcactgcagatatccagaagactatcgttaaggtagcggcgaatagcatttctattgatgagccagattatcaatatgtagcatccaatgcagcaatgtttgaaatccgtaaacgtgtttatggacagtttgaaccgcctgcatttattgaccacatttcccgatgcgtcaacgcaaataagtacgataaagaaattctaagtaaatggtcagcagaagaaattactttgcttgattcttatattaagcatgagcgtgatttcactatgacctatgctggaacaatgcagcttatcgagaagtatctcgtaaaagaccgtcatactggtgaattgtatgaaactccacagtttgcctttatgctgatcggtatgtgcttgcatcaagatgatggcgaaagtcgtttagcaaacgttattcgtttctatgacgcagtttctactaaaaagatttcattgccaacaccaattatgtctggtgttcgtactccgacacgtcagtttagttcatgcgtggttattgaaggtggtgatagtcttaattcaattaacgaagctgctgcatcaattacgaaatacatcagtaagcgtgcaggtattggtattaatgcaggcatgattcgcgcagagggttcaaaaattggattcggtgaagtcaaacatactggagttattcctttctggaaacacttccaaacagcagttaaatcctgctcccaaggtggagttcgtggcggcgcggcgacactgtactatccaatctggcacttggaagttgaaaacctcctcgtacttaagaacaacaaaggtgtagatgaaaaccgtattcgtcatttagattatggtgttcagattaataacctgatgattgaacgcttgattaagaatgattacatcactctgtttagtcccgatgtgtgtcttggtactttgtacacagaatacttccgtgatgctcaagcgttccgtactttatacgaagagctggaaaagaacccagacgtaagaaagaaacgtattaaagcccgtgaactgtttgagttgttccttactgaacgtgctggtactgctcgaatttacccgtacatggtagataacgttggtgaatatggtccttttattcgtgatgtggctacggttaagcaatcaaacctctgcctcgaaattgcgttaccaacttcggatgttggccaggaagatggcgaaatcgcgctatgcacactcgcagcattcgtgctcgacaacttcaactggcaagaccaagaagaagtcaacgaaatcgcagaagtaatggtaagggctttggataaccttttggattaccaagactatcctgtagacaaagcgttaaaagctaaagaccgtcgagcactaggtgttggcattactaactatgcagcttggttagcaagcaactttgcttcatacgcagatgctaatgatattacccatgaaatgatggaacgtattcaatatgcactcatcaaagcctccgttaaacttgctagcgaaaaaggtccgtgcacgctttacaaagaaacacgatacggacgtggtgaactgcctattgattggtacaatgaaagaattgaccaactcgcagctccaaactatgtctgtgactgggaactcctgcgagaagacctcaagcgatacggtatccgaaattcaacgttatctgcgcttatgccatgcgaatcgtctagccaggtatcaaactctaccaacggtattgaaccaccacgtggaccagtgtcagttaaagaatcaaaagaaggaagcttcaaccaagtcgttccaaatgttgagcacaatgcttccctttatgattatgcctggcagctcgcgaaacagggtaataagccttatctgaaccaggttctgattatgcagaaatttgttgaccaaagcatctctgctaatacttattacgacccggcgaatttccctaaaggcaaagttgaaatgtcggtaatgatggacgacttgctttatttctggtactttggtggtaagactctttactatcataacacccgtgacggttccggtaacgatgatatgattcaagactctgctgactgcgcggcctgtaagctttaataaaagggaattataattagaccatggatggttaacaccacagaataggaaatagaatgagtacagtttttaataccaagcaagtagatatcatgaccgaaccgatgttctttggttctggtctaggaattgcacgctatgatattcagcgtcataaagtattcgaggaactcattgagaagcaattgagtttcttctggcgtcctgaagaagttaacgttatgatggaccgtggtcagtttgaaaaactcccagaacaccaacgtaatatcttcactgataacttgaagtaccaatctcttcttgattcaattcaaggacgagctccagcagcagttttatctgcacttatttctgacccaagcttagatacttggaaccagacttggacgttcagtgaaactattcacagccgttcgtacacgcatatcatgcgtaacctatatgtagacccagctaaaatctttgatgaaatcgttcttgacgaagcaatcatgaaacgcgctgagtcaatcggtgtttactatgatgatgttatagcgaagactcgcgcatgggaaaacgcaaaaagtcgctgctttaatcaagataatatcgaaattaaagaagctaaacgtgatttaatgaaatctctttatctttgcttacatgttattaacgcgctagaagctattcgtttctatgttagttttgcatgtaccttcaacttccataaaaatatggaaatcatggaaggtaatgctaaaatcatgaagttcattgctcgtgatgaacaacttcatttgaagggcacacagtacattctgcgtcaacttcaaactggcactgatggcgaagaatgggttgagattgctaaagagtgtgaacaagaagcaattaaaatcttcatggaagttaaccgccaagaaaaagattgggctatccatcttttccgcaatggtggtcttccgggactgaacgttaaaattcttcatgacttcattgactatctgactgtatctcgtatgcgtagttgtggtcttccttgtccgattactgatgcaccaactcgacatcctattccttggattcgcgaatatcttaactctgatgcagtccaatctgctcctcaggaagttgagataagttcttatctggtagctcagattgacaatgatgtcactgatgatgttttaattggatttaaaaagtacttataaggaaaggggcttcggcccctctttattatgaatgatattgctaacgagttttcttttataaaatatgttcaacttgagttagaaccagattttaccatcaaaccaattttgatagcaaacaagttgaatgtagtttatgccatcgcagttgatgatgaactagtttacattggtaagactaaaaatcttcgtaaacgtataaattattatagaactgctattaatcggaaagaccaaacctctgattcggctaaatctgccaagatttttgaagcactaatggctggcaaaaaagtagagttctatgctcgtcagtgttttaatcttttgattaataatgaacttggcgagatgtcaatatccactatggacttggaagaacctatgtttattaaaaagttcaatcctccatggaacacacaacataaggtaaagaaatgttagagctatataaaaatttaatgaatctgtgtgaaagctcagaagttgcaaaattcttttataaagattttaccggtcctatggatggtaagttcagagtgttttcatatcactatgcaagctacagcgagtggttaaaacccgatgctctcgaatgccgtggtatcatgtttgagatggatggcgataccccaattcgaattgcttctcgtccgatggaaaagttctttaatttgaatgaaaacccattaacgatgggaattgatattagcgatgtagaatacattatggataaggctgatggctctctagtatcatcttatgttgatgatgggtatctataccttaagtcaaaaacatctctctacagtgaccaggcaagacaggcttcagctttgcttaacagtgaagaatattcttcgcttcatcaggttattcttgagctagcgctagatggttatacggtaaacatggaatttgtttcacctaataatcgtgttgttttagcatatcaggagccacagctgtttgtgttaaacgtccgtaataacacaactggcgagtatgttaaatatgatgatttgtacgctaatgctaaaattcgtccttatttaattaatgcttacggaatttctgaccccaaaacttgggttgaaggtgttcgtgaacttgaaggcgtagaagggtacattgcagttctaaacactggacagagatttaaggttaagaccgaatggtattctgctcttcatcacactaaagactcaataacgtcaaatgaaagattgtttgcgtctgttgtatctgcaaactctgatgacttgcgttctctttttgctggagatgaatacgcaattaagaaaatttctgcgtttgagcaagcttatctagattacctcagaaagtcacttgagctgtgccagtcattctacgatgaatacagaggtcgtgctcgtaaagactacgctattgctgcgcagaaagccacggttaatcagcgtcatctttttggtgttatcatgaacatgtacgaaggaactgtagatgtagataaactgcttaaagacctcgaaagggtgttcttgaagtactgggcaggatatgttccaaaagagtacgaaaaagaaattgaaatttctgaagaatagttgtttacatcctcaccagagtgtgatactatagacttatatcaactgatgaggatattgaaatggatatgcaagcaattactttagatatggttgttaacaaatatggtactcattctgatgggatttttgtgtggaatggcaccaagaaggtggggttcgtcactgacctacggacgcacatggcgcgcaaggaagctgctcgtaagaagcaaaaagagtacactaatcgtgtgaacgagcagcgtgccgaagcccttcctgaagccgtagatgaaatgattgatttcctagataatcatctcgcgaagtatggtgcagaggtgttcaagaacatcacccagccaaacgttcatgctaacggatgcaaatgctatgtaattgttgacccgatttatggcaagcatcgtcttggcattatgcatcgcgagctgaattattctgagatggcagaatatgtagaagcttgcttcaagtgttctccttcggaaagttctgatcgtcacatcctcatttcgggattatcccgtgatgatatcgtagaggttatccttaaactatgctcaaaataaacacaacttggttgatgattggagtgttagcattatccgccgccggattgaaatatctttcgtggcgggtagaaaatcttaaagctgacctcaaagtcgtccaagatgaatctgatcgacaagcaaaagaaatagaaaatatcggtgtttctataaaaaatctgcagacaacatataaaggctatcaggaaaaccgagcagctcgtgatacttctaacgctaagatgaataaagattctaagcgcggaaacgtagttgcagctaagcctggattagttgaaaaacagattaatgcaagcttcaataagtttgcagaagatatccaggaggctaccagatgaaacgaagtctattagccatgggtattatcagcttacttgctggatgctcttctagtgcaccggatgtcccggttttgcatcctgagtggccagacccaattcaaaaatgggaaggacattgggaagtaaaagtaattgatggtaaagcctgggttggtatgccgtttgaagagtcgcaagagtatcgcatctggatgaatgacattttacgttatactaaagatgctaatggaatgatatgttattatcgttctgaacttaaagaaccgcggtgtattaagtgatggcattataatgaaccaaaaacagtatgaaacacttaaagggttaattgctgaaaatgaattagcgtgcatcgtgtttggacgcgcagctgaaaattatgacaaaaatgatatactgtcaatgaataagccattgcgagcaattaaagaaaaatatcgtgcaaattggggtgaaaagtctaaggctcttcatgattttattgacactcttaaggatgtataatgaaaaaattggttttgacacaaggagctccaggctctggcaaaacaacctgggctaatgaatatgtagcatctaatccaggttggtatgttttgtctcgtgatgatttgcgtgaaggcatctttggccttaataaacgtaatgattacaaatattctaagcttcgtgagaagtcagtatctgtatgccagttttctatggcgaagactctactcgagatggaaaccactaaaggtgtaatcattgctgatactaaccttaatccaacgactatcaagaagtggcaagagttggcatatgaaattgatggtgtcaagtgggaaattaaacgctttgacgttccttggactgaattgcttaatcgtaacctctatcgtggcgcgaatgcagttcctattgaagtgcttcgtagcttctattctaagatgcacccatatgatttgtatattccagacgaatcattgccaaaagcagttatctttgaccttgacggcacgttagcagataacaatcatcgttctccttatgacttggccaaatgtggtaaagaccatccaaaggaaatggtaattgaatttcttaaaatgcttcgtaacaaaggatataaaattcttaccgtttctggtagagagtctggaactaaagaagaccctactgtttatcagcgtattacgaagaaatggctgttggaccatgttggcgaaacaggcgaacacttccaacgtaaacatggcgattcacgcaaagatgatgtggtaaaagaagaaatcttctgggaccgaattgctgatcgttataatgtaaaacttgcagtagatgacagggcgcaggtagttgaaatgtggcgtcgtatcggtgttgaatgctggcaagtagcccacggtgatttttagaggaaagtataatgtttccaaagtattctgaagtagtaaaagtatcatttacgcaagttgttgctaatcatttaacagatgagtttactccggctgaagtagccaaaatgcatgcagagtttttatctgcaatgaatgcacttattccaaacggtgaagttattaaattttctattgaccggtcaggcggttcatctgaagttaaaatttcttgtggcgaaggtgaacacgattggtttatcgttggaattattgctaattttgaaccccaacaggttgagacttatgttgtctgacgctaaattttcacatgatgaatttatttcaaaggttaaaatcttcgcacaggaagtagcaaaccgggttcctggaagtaaagtgactctccgacgagagtcatcctttaactatgttgatgcttatatcattacagttaataatggaaagagcaatcaacacactcaattggctttaaccggaacaggccaagttgaaatgactaacattttaggacatatctaatgactttacgtgaggctgtagaagctcttttaattgaacatgctcgtggcattaaagcagaaattagccaaaatggtattcgtctaattaatgctgttattggttctgaccaaggtgtttggtcaattccacgcgaagaatatgatgctattttgtacagtaacgttgatgttaaggaaggccaacctctttatggctatgtcttttccgatgttcttgaacgaggaaatcatccgtttccagatggtacaggcattcgtacttctcgagtagagagttttgcttctcctaccgacgagttaaaattggttaaaacaaataacacaacttatctggtgatttaaatgaaagcgtcgacagtactacaaattgcgtatctcgtatctcaagagtcaaaatgctgctcgtggaaagtcggcgcagtaattgaaaagaatggacgaattatttctactggctataacggttcaccttctggtggtgtgaactgttgtgaccatgcagcagaacaaggttggattggtgaaattccttacaaatctacgggattgcgtcaagacggaattcacgtcaaaaaggtcggattgctcaaagaacatcgagcagcccactctgcatggtctaaagtcaatgaaatccatgctgagcttaatgctattctttttgctgccaggaacggcagtagtattgatggagcaacaatgtatgtcacactgtctccatgtccagattgcgcaaaagccatcgctcagtctggtattaaaaaattagtatactgtgaaacatacgacaagaacgaacccggttgggacgatattcttcgttctgctggaatcgaggtgttcaatgttccaaaacgtaatttggataagttgaattggtataacattaaagaattctgtggaattgaataatgaaacttagaattgttgaaattaataaacttaacctaagcggtgatgttgttatatcatactcagtagaacgccggtgttggtttaaatggaaaccattagcaacatttaaatttgaagatcaagcagttcgattattaaaagaattatccaagcgcaaatctgtaattatcaaaactattaaagagacatcaaaatgaaactgactactgaacaaaacatccatatccgtgaaactctgaaggctgtgctgagcatgggcgaatcccagattgtgtttgaaaaagctgatggtactattcgtactctgcgctgtactcgtgataaagatattattccatctgatttggtagaaagtactactaaatctgcccgagcagaaagcactacttcacttccggtatatgataccgagaaagaaggttggcgctcatttacctttgataaactgatctcggtaaatggtatgaaagttgagcatctgctgcagatgatcggtaagtaatttgctttaaactgaccatgttaatataactacatggtcaaacaataaaggtaacacatggaacttccaattaaagctctaggcgagtatgtaattctcgtatctgaacctgcacagcaaggtgatgaaattgtttctccttccggtattattcttggaaaagaagaacaaggacaactgccggatatgtgtgaaatctattctatcggtgatgatgtaccgaaaggatttgttgaggtaggcgatttgactccgttgcctgttggtaatatcagaaacgtacctcatccgttggtagcagcaggtgtgaagaaacctaaagaaatccggcagaagtttgtgacttgtcattataagtccctggcgtgcgtatataaataataatatgaattgggcgtcggaaattagttacccgagcaattctaagcggtggatgcccgagctaaacctcggttaccgtccaccaaattttaacctcatttgaggaacgattcaatgaacaaacaacttactaaagctctggaactccaacgtaatgcatggaattccggtcacgaaaactacggggcttcaatcgatatctatgcagaagcactagaagttctgaaagggtttaaacacctgaacccagcacaagctgaatttcgtgatactttagaagcgatggacgaactgaagtatgctaagcatcttggttctgctgctcgcaaagctgttcgccactttgtggtaacgctgaagtaatttgtacgcccaccatgtgtacgcatgggtaacgtatgatgtggacgttgttggttatccccacgtaaaacatccgaaaccatcggtgatttgctaccaaagtgcagctagaaataaacggcaagtgcatgctaccccgaggcgatggccaatcgggagtacgcctcaaggcctatacatccatcggtgtatatcttatccctgagaaatcagacccggaacctttaagctaacggtgtgcaacagataagagtttaatcgtgcccttaggggcttgagggagctacaaccgaaagaactgtcgaaagaagttgaacctcggaagaacgtgctcccatgtatttctccaaaatggaagatgataaaatggctaaacaagctaaagcaaaaactgcagtaaaagaagttgttggtacctctaaacgcgctggctacaagcgtgggtcgaacaagcgtatcaatcagacggttgagaaaatcatgcgtcgagctcgtgcggttcttcgcgatgatgcttctcgttttggtaagccgaaagcataagttcagggactccttcgggagtcccttttttattttccgcagaatgaaaaaagttgtttacttctaggctcaacaaggttactatagacctgtaccacccaaacggacaacggagaataaaatgaataccatcaacctgaacgcaactatcaagactaaagaccacgacggttacaaagctcaaactgtccatgagaaaatgtggattttgtctaaagttcaaggtgatatcgttccatgcatgacaccggacggtccatcagatgatttctgctggcatatcacgctaactaattggttcacaggttctgtatatgttctgaacactccagttgttggtcgtattcgttctgaaacttacacagatgaagaagacggttactcagaagatgtaacctggtatgaaaatggtcgtaatcgtgccgatgctttaattgagcaaatgaaaaaggtcggtaaattaaacatggataattggactaaacagtaatcttgactggggcttcggccccatctttgaggatatcaaaatgaattacagcaaaaaccgagtatattgcatttccccagaaacttaccgtagatggaaagacgctaagaacacaattaactatctcattgccactgttgttggagttcaaggctggacgccgttagaacttgattcgctgggccgggttgttaagattaaaaccgaaactggtaaaatcatttcggcaaaaaccataggagatgaatatgaccggtctctgtcatgcttattttcttctcatgagttagaagaaggacgtgttgtgcaaataggagcgtttgaaaaccaaagctctgatgaccgctatgcagtttttgaaatcccatcaacgttcgttaaacctactccagtggttaaagatgggcgtagcgtcttcactttaaaagaagcaaaagaaatcatccttgagctaaccgatatcgttccagaaactaccaagtatgaactgtttaaaagcatcggatttgcagaagtaaaaactgttaaaactgtagaggtgaaaaatgtctgaagtttttgaataaaagttgtttacttcttgggtggtctgggttactatagacctgtaccacccaaacagataaacaaactacggagaataaaaatgaacttcactaacttcaaccgcaaatacgtacagaacaatgcttgggacgtttctactactttgctgtgggaacacaacaatggcacagtagctcaaatcgatatgtactgggaagataactacgtattcttcagctttgaaaatggtcctactctggatattcagttcaacggttctgaaatcaaagttggtttccatgatgaagttcgtaaacgtgatttatcttcacatccgtcttggaacacaaatcgtcagctgcttgttaaaatttatctgcgccacatcctcggtcgtaaaacaaccgaagaacaacgtgaagcaatctgggatatcgtttcaaacgaaatcaagttttaactaactcggggcttcggccccactattgaggaaatgataatggaaaaaggtaaattctataagcttaaaaagactccaatcttgtctccaggcgctcttatcaagggtgtttttgagcaaatcggtaataatccgattaaaattaccagaacctttagatatgcggaaaacattggattaattgaatttgaaatcattaagcctggtggagagcgcgaacgagttatagtagatgaaccccgcttttctcacatgtggtgtattcttactaatcaagaatttcaacattattttgaagaaaccaccgacaaagaacctgaaccgaagaccgacgatgatggaagcaatgattggggcgtttggacatcaaataaaggaaatgatacctacaatggtggattgacaaaggaagaagctgttaatcttgcaaaagtacaatgcctgaatgcaactaaagacacaaaagttgtaatcatgcaaccttttgctgtccctgtggttcatgttaatattcgtccattttaagaggaaattgaaatgattgtatcagctttctatgattcacgaaagaaaaaagttgaaaccattatcagcgatactcgcgatggtacacctgctaataaaaatggtgtgaaagcatacattgataagtattgccctcctgaatttcgtatggttgatggtgtagattctctgagcattaatgttataaatgctaaaattgaattcattaatgcaactatgccaattgggtattctgacagtgatggctcaaatgccaaaatgccgaaagaaaaattcataactaaattttgaggaaatcaacatgattgtatccgtgcctaaatctaaagctggtattttttcttgcagtttgaaaaaccacccaatggttgatatcatgtcagctgatgttaaacaacacaccgttgagtatgaaattgatgctccggatttctttgaattgcccgaatgggcagtgagacttgatgcatgaaatatcatatcttcagtacagtaagattagcaaatggaattcctggagttgtatgtgacacggctccagccattaaagcctactcggttgagccttggtatgaagttaattgggttgatggcaatcgttcaattcatgcggaatctgagctttatccgattactcaattaagggctgctaacgacgatgtctattaatcctcatttcggtcatatggttgcccgacgtatcaccagggaaatgctaaagactgctgagtattataatatagaattaattgatatagaaccctcggacactccagggttaatctggttcaatttcaccggtgccgcaaatagcgttgccaaatttaaacaagcattgaggaatttccccgaatgtcaaagccagtaatcgcaaccgatgttgatggaatcatcgttaagtggcaaagtggtctgccttactttgcccaaaaatataaccttcctgtagagcatatccttgatatgatgactactgaaaaattcattaaacccgctgagctgtttgattgtgaagaagaactagctgttaagctgcttctgaagtacaacaacagcgattttattcgttatcttgctccgtatgctgatgctttagctacagttaataagctcaaagaaaaatacgattttgtcgctatcacggctcttggcaattcagtagatgctaaccttaatcgtcgtttcaatctgaatgctttgttccctgatgcatttacggaaatcatggtctgtgattatgatgaatctaaagatgctttactggaaaaggctaaagtaaaatacggcgatcgcatcgtctgttatgtagatgatttgcctaaacatattgctgcggccagcaaagtctttgaagatactgaaacccgtgtgttctatatgcctcgtggtgagcgagaaggttcagtgactgctcctggaattatggttgaagattggcatcaaattgtaacttgcctggaatctctgaaatccgttaagaaacctcagaagtctctttccggattgtgggaagaagctatcaaagaccaaattcgtaaagagcaacatccttttaattggcctccacggcaagttccaggagattggtggaaacaacctatcattccgtttagtcctggtccacatgttcctcctggaaacgactggtggaataacggtcgtattacatgtgataaccaccaaattaattgctaacacactgggtatggtataatagccataccctaggaggaaacatgtttgtagttcatactaaggttggtaaacgctggttatcatgtgattatggccatgttaatcagttttatcgttggaatccaatttggcgtgaagcaaagtcgtgcccgatttggaatgaatgcatcaataacgggtttgtttatatcgatggattaacttatcatcgtagcgtaagcgaactttcaaaagaattaggtgaataatgatttttgatatcatcaaagcaattgaagatgctaagggttctaaagccaaaacccaaattctcattgacaataaagataacgttgatttaaaacgagcttatctgctggcgtattccgggcgatttaagttctttattaagaaagttccagaatatactcccgttaaatatccaaatgttccttcaaagacgttttctgatggtctagattacctccaagacattctggcagcacgagtacttactggtaatatggcaatccaggggctagtagatttgctctctaagatgaacgagggtgatgctagtgtactggtccgtgtacttcttaaggatatgcgttgcggcgcttcaggttctattgctaataaggtatggaagaaattaattcctgagatgccacagatgttagcatcagcctactccgagaaagcgctatcgtatattaagttccctgcatttgctcagcttaaagccgatggagctcgatgcttcgctgaaatccgcggagatgaattagatgatgtaactcttcttactcgttccggtaatgaatatctgggtctagataaacttaagcgtcaacttatcgagatgaccaaagaagcccgagaacgccatcctaacggtgtgatgattgacggcgagctggtatatcatgtcgaagtgaaagaagaagaaaacgacctgtttgatatgtttaaagagcctgagcttcctgagctaagtaaagctaaggaattccaacagacggctcgtacagaatcaaacggattggctaataaggccattaaaggaacaatatctgccgaagaagcagaaggcatgagatttcaagtttgggattatgttccgcttgatgtagtatattccgaaggtaaggttcctggatttgcttatgatgtgcgtttccgtgcgttggaaatgatgagcaaaggctatgacaagattattctaattgaaaaccatgtcgtacacaacatccatgaagctcgtgctatctataagacatacgtagaccaaggtctcgaaggtattatccttaagaatatcggtgcttattgggaagataagcgttctaagaacctcgttaaatttaaagaggttatcactgtagatttgaaatgtgtcggttcgtacgagcatagaaaacaacctggtaaaatgggcggcttgatgttcgtatcagaatgtggtcgtattcgtgttaacgctgggtcaggtcttaaagataagcccgaagaattacatgaacttgatcgtactcatctatggaaaattagagattctcttccaggaactatctgggaacttgaatgcaatggttgggtaactgctgaaggtcgtgatgatggtacggtaggattattcttgcctatcattaaacaacgcagatatgataaagaagtggctaatacattcgaagccgcatttggcgtgaactttacagaggcaacaggaataaaatgaaagtattatacgaagtgattgctaaatctcttgacggacgtggtggtatttctgttcacacagaagttcttgagtttaataacattaatacattaagaaacttcaaagaaaacattgaagagtatgagtctgtaaatggactacaagtttggcgtacagtaacaataattaattaaggccttcgggccttttttcgtataaatagaataaacaaacgaggatatgtcatggaacttttaaatgaagttttcgatgaagagaatagtaaaatctatcctgtcgagaacgttaagccaaaacttaaggtaccacaggtctttttgattaaggtgccgggtaataacaatttaatgattcggttagtgcaaggatcaggtcaaggtgatgcagttaagaacatcaagatgggtgataaattcatccaggtctacgtgttctctgtatccgaaaaaggtaacatcggtgcgcttaaaggtggtttaggccaagacccgattggtgctatcaataccatttttgagaccgtcaacaaagtagttaagcaaattaaagctgatgcagtaatgttccgctttaatccaaagaaaatgcaaggacaagataaagctatccagcgtattcttgctcggttgattactactcgcaccggtggtcgtttcaatctaatgaaagatatggcttactacaaaggtaagtatgcttattctattatggttcgtaaaggtaagaaacttgaagagattgaaggaattcctgaaatttcagaagaactttacaccaaagtagattcaaaagtaggcgaagtttatgtgtctaaagaaaccggcgaaaacgttaccaaagccgaagcattggctaattccattggcgaaaaagaagacaagaaatctgaactcgctgtaatgagtaaaatgaaagtgtctcgaaaagatttaatccgagcacagtacggcaaatttgtttcatatgttgatgaagattggccagaaaataaacgtgaacgctggtacgaattaactactaacactccagtactaaacgcagaaggcgatacggtagacctccaaaaggatattaaatccgggttagaaaaatcaattcctttttatgttgatgatatcaagcactatcgtgttcgtggcggatatggaagtaattttggcgatgcagttgagagattatttgtaggccaaatgtcgagaatgcatgacgactggaaggttttcattccttcgggttcagacaaaatgaaaatcgctgagcaacgaatttcagaagttgctgacgttattgctcaagctaaaaatcctgcatctatggaaacgatgcgtaaaatcgttgaagtagct

SEQ ID NO: 16 - DNA, 175676 bp, Unknown
  bacteriophage strain capable of infecting bacteria of the genus Klebsiella
caaagctaatgaaatcggtgtaatgagaaaccgatccaacttcgtaatatttattacgggttcctgcatctgttaatttttcaaagtcatcgcctgtataagcagcgatcgaaatatccccatccttgaacgggcctattacaatttttgcgttaccatcctgatccattgccgtagaagcataacgaacatcataactttcgtcatcttcgttggtgaacttgaacgtactggaaatgattgatttagattccacctggttcaagaaatggatcccagacataggggcgctgtaatagttgtcaatttcacggagcaatttaatatttgcttccgaaccaataatagaagtatcagactgatcgacataagtcaacatcttagatacactgaaagatttgttgaaaatttcaacgttgtcagtatagtaagagtcgatcgacgaaataacctgaccgcgtaaccattcctctgattccgtcaacttactgatatcatacgttactttgacagattgcacaatatacagatagttaggatccataatcgacggggtgatcgtcgcgaggttatatttcgaaagatacgtttgcatatcttctttctgtaccgatgttaggcgcaaacctgactttggtttaacagaaatgaaagcataaccaggtttttcgttatcagtaaagcactgtaccgcctggatgatagaaccaaatctgtgagacaggaaagattcataatccgatgcagttacacaacggcgttgtgtttcacgcataacaggggccagttctcgaatacgctcgatatcttctggatcaccaccaccatcagcaccgacataatcaggggatttagtcgggttttcttcgatgttagtgatgctaatattggttaatgtatcgacatagataaaatcttttgcaccgttagccgcttccccatcggttgacaggtattcaataacgatagtcgatccattagcaggtttcaagcccccgatatattcagcggttaatgcaccacccgccacttgttgacttgcttcaccttcaccgaaataaacttcggtatgtccatcaacagtttcacgcatgtagtaaatcgtgcttgcgcctgttgcgtttacaatgctttcgtttgtccagtcttcccattgtgcgccgtttacagttaaacgtacctgactacggtcaatgtttggatctcggatcaggatacttgaaccgtcataaattagttcagtacgaactaaacggccttgcaccaggttcagcattgatgtatagttgttattactatcacgaacgataacaacgtcatccgatacaacaaaagaataactgtctgtattctttacagtaccgatgaattttgtaccgcgcgggatacggatcgatgttggggtcagtgggttagcagccgtaatcattactgctgtgcttgcagccgtgcgcgaatctggcatataccccagttcttgagcagactgtacaacagaactacgcaatgcagccgtgcgaataaacgattcaaatagagccgtgttacccatctgctgaatataaagagtagcatacgacagaaggtcgatcagtacgttcattcgtgagccggaaaaatcgtaatccttaaactcttcttgtccacccagccaatcgatcagatctgttttaatttcttcgaaagtacccccgataaaaatatcggggatttggttaatctgttttttgacagtcttagtcttagcagtagccattattataaattcctcttgatcattcgactatttagtatttcagtactggaacacatacactaatcgaaccaaagttgattgctaatcctatgagagacagcaatttattcacatattgtgtgactttactcaacgccagcgtacaaatttggttgtagattactttgcagtgatctttaaacgagcgcgaactatcaatgaaatttttgtacagagactgagcaccagtaatcgcattttcatatgacttgagaagatcgtcaaatgcgacaccacagaagcctaaaaactcgtttattgtactcatcaaaggcaatttctttaattcttccatcgccatactgtatgtatctttcattgcatcttgtagagatccaatctgttcctgtatagcgtcatacgcggcctgtgttgcagctacagcagcgtttgcaacatccaatgcagattgataagccgctgttgcttcgtctgttacagcgccccacatccagtttaagtactggttgaattttctctgaattgcatcacgttcgaaaatctgattttttaacgttttgtaaagttcctgcccttgttcataaagccctcggatctgttcgtatgactcatcaacaaaagccttgactttttcctgtgcttgttgatataaatccattgcagtaaatccagggaagttaccgcccagaattatatcaagtggtttgatttgcatcatgatgttacggatagccagcaccgcagaccataacgggtttggaacttccggagggatagcccatgtttgcatgatccgaccgtataagtcgattaatgcaacgcaaccgttttggaacatcgttaaacaccaatcaaataacgcgctacacgcatccacaaggtcgcgagcgccagctttgacatattccacagagtaattgtatgcgcttcctatggccccgtatattgcgtttatgacggtttcatatgtttgttgtccggatttgatgattgcattaaacgcatctttcaaagtctgaacagaattatcaccaaacaccagatcgtaaatgttgatcgcaacacctaagatggttacttgaggcaagaactgattaatcaatccccatgcaccaccgataatgttaaatgcagcgctaatcacttgtctgaaaactttcatagcagtttgccatgcttgctgtgacaatgcgagcgcccccgccattacttcttccatcgatacggataaaccatcaaacatcgtcgcgatcccgaatccattctgtacagcacccgttaacatgttaaactgtagcttgaacgtattacgggtttcgttccatgcctgtaacatagcatcactgatatttgtatatgcgaaaccaacagttgccggaatgcacgaaatatcagcacggcttaattcactcggtaatgctccataagtggaaggcattgcaggaggaacaggaggaatgcttgtatctgcgttggtgttaacctgcatacccgtatatttgcactggtgcgcccctgtttcgtcatgcttcatatatgctatacgattaccattccaataataatcaatattggtgaatgcgccagtgtcctgattatacgcctgacgtatgcgagcatcacatacagggtttgttccggaaagatacccgccactgttttcaaccttatacatagccagttcgccagggtttttgtataggtttgattttgacagatccgcgccgtaccaatcattaccaccattgattttagttgcaccgatggatgtaatgtaagcatcaatctctgcttgagtgttgaaataatagccaatcttcggaacaaggatccctgttggttgtccggtatttggatctgttcccggtgaattgacaacaggtagatccgtgcttctatgtccgaacggttcttgagtataaagatgagtaccgattttgattatctcggtatcccactcaaccccaacagccggataattttctgtatgcccttgccagataacccgccgataatagccagcggggatctcagcatcacaaggatgctgataattttgcataattccatcaattattgattcataatccataatcatttaattaccccacttggacggtgccgccagtgatttttgttaatgcgccagaatcaataaacgtgttattcgttgctttgatattgatatctttagcaccgatatccatcgtttcttcaatctccattttcgcattttttgcagtgatcgttgcgtcttctgttacagctacggttgcattctgtttcacatttgcggtaagattctgatcaacgttaactgttgcatctttgtttacagttagttcagcgttacctttaatcaggccaacgtactcaccttcaacagtttgttgaacgttgccacgaacaaactcagttacgttaccatcaaccgtttgttgaacgttacccatgttgtaaatgaatgcgtcgccttcaataactacctgcaagttgcctttaacattgagtttccggccctgcatcacaatttgataatcatcccctacgattttaacaatgcgggttccatccgggcgaatttcttcgtaactccctgctgggtgaacacggttatatcgttcgtatcctggggtatcatcgaattcctgaatgtgtccggatctcgattcaaacaccatgttatacggatattccgcattataagatgatgctggttcttcaaacatcacacgggtatcaccaggagtaaacggatcttccggactagtagccgacaatgtagcaccgttatacgcagcgtaagcagcactcagagagcgcccttccggatctggtacttgcaccccatatgattcaaggttgcccgtgaggacgattttagacacgcgagaagaacggcctggagtttgactagcccacagtgaattgcgaagaccattataagccgcttgccaatcttcatttttcatcgcttttagggtattggtgaatttagcaacaccaccgacgcccatttgaaacgacatgttttcgatcgccatttgacgaggacggtttaggttcacatacacttcacggacgttagcggttctctgaatatcagatcttactttggctaaatcttgagcaaataaggttgatacctcttctgccgtgattgtcccgtttgttacttctcgacctaccgctttactgatcgcagcgttaatttttgcagtgtcgcgagtcttttcgcggataagcaaatgcccgatcccgattgtcggatatccttcactgtctgtataccagcgtgtgcggatcccttcatcctgcttgagcatcttttcaatcgtaaatccacccgtatcagggcggttatcttctggtatctcatccagtgggcgatcgtctgggtttactgctatgcttgtgtttgaatcacgaatgatgacacttgatgatcctttgcctttcaaaccacctaaagcaagggagttaacatcgttaccaacatagcgagggtattcacccataggatcgcaaaaacctttctgtgtgtctggttgttcgacatattcaccagcgacagtaccaattatcataccatcttggtgccatttgtcacgccaataaccaacaacaaaggatccgcgagtgataccagttggagagaagcccacaccagagatcgcagcgcttctaatatcctgaataggcatcatccagggtaaatcttcaacaggaacaccgattgcatcggatttttgtttttgggctgggtgttgtccaaatacacggacttgaacacggcccaacccgcgcggatcatcaacgttttcaaccaccccatcaaagaaaggggagtgtaaatttccgcctaatttcatgagttagccttttccatttctttaataaaatcattcagaaacgcctggatgtcagacggactaatgatttttattgttcgttttgcttcattttgcaacactgcatcttcataaatatctacaggagctaatacaccttgatactgtaaatacagcattggtttgtcacctttgtcataccaatgaccagggttattggggtcttcgacaaggttataatacttgttgttgttttcatctacatgatacagaacctgttcaccgccaacctcagaataacgctgtatagcgcactgatacgcggcttcctgatcggagatccaaccatagaaagggtcataaacagagttaagcatcaacaggatccagtagtattgctggtttccatataatgattctgcaagttgttcaggtcgtagtgtgcctgttatctggtaactacgggttttatattttccaatcacacgattaaaataaaatcgatagtctcggaaaatatcagttgtctgggtgcctttgtaatcaacaggcgggaagtatgaaaatagcacgataagttcccctatctaaacgttatattattctatttaggatttacgcaatggctggaagacagacgtataaagggtcgtttgtacccgaaaacatacagaagtataaaggcgatccgcgaaagattacgtataggtcatcgtgggagcgctacgttatgaagtggctggataaaaacccacacgtaaaacgttggaattctgaatgtatagtgatcccgtatttctgcaatgcagacggtaagagaagacgctattacatggatttctatgtggaaatggaaaatggtactacatatctttgggaggttaagccccttaaagaaaccatgcctccaccgaagccagtaaacaacaacgtacacaataaaaagaaatttattgatgctctttacacctatacagttaatattgataagtggaaagccgcaaatgagctatgccgtcaaaaaggctggcagttcaaaatcgtaacagaagaatcactcaaaaaagtttttgggtggcgaggtcagtaatccctggagggaaacatgagttttatttttgagtttgagatcatcgcggaagaggataaacccaaagcaccacccaaacgcaaattgagtgattgggttgaactggggatcaaattccgtaaggcaaaaacgaaaggtgtttctgctaaacgttttgccgattctgagggattaaactacgcaacgttcacaaagtcaatgcatcgttacaaaaaacagattgatgatgagattgaacgacgttccgcagagacagaagcccgtaaaaaacgtaatgactaccgtaaaaaacacgggatcgagatcatcaacgatttccgtaatagtctgaaaaagatcactgttggtgtatcagcggcaaagcgacagaaagattcaacagaatggtttggtaatttcatcaaaaccagtatcaaaacacaccgtgtggcaaaaccagcaacgggtcgcctgtacacgtttgcatatgatgcaaaatataaagacaccctgccgtattgggatagatttccactgattattttcttaggatccggaagatcgaaagcgggtaacttagtgttctatggtttgaacttgcactatgcgccacccagagcacgacaggagtttttagaagagttattgaagcgagggtacggatccactaaacgcctctctaacaagactgtactcaaaattaactggggtaacgtgaaaggtatgcgaggcgcaacagaaatgatcaaagcatatctaccatcacacctcaaatcaccattagcagagattgccccgaaggattgggcgaaagctgtttggctaccgactcaacaatttatgtccaaagggaaaccttacggcgcgaaaaaagtctggagcaaatactaatcaaaaagccccaaccggaaggaaggggctttatttttacagggtgctaactatttctgcaagtttgccaggggtcgcaccaggtctaactttcatagcatctttcaggtttttgtcaaccatcttttctgcatctttttcgttaaacccgcgtttcaccatcacagcaataactttttcgcgaatgcctttagccgcttcattcagatcttcggattcagccagaaccagtttagaaaccatatcgcctttatattcctgggtgaattttttaccagatactaggcgaggtttgccggaagcatcaactacggtaaacactgcatattcaccgcttgctttagttttagaacgcccagtgtacagaagacgcatatcgttgcttgggagtttgtaaactttacctttcaccagagcttcatccatagggatctcgatttcgaaatcttctgctaactggttatacagatccagattttcttccgcctcttcatacagagtagcagctttgaatttttctggtttgtcgaaatccagatcatcatccggattgccactgtagaaagaaacagtacctttagcccaatcgacataagccgcttgaactttaccagtagtcatacctttcaaacgtacaatgtttttaccgaagtatgccagatcgtgagaatccggtgctaaaacttcgaaatcagaaccatgtttgaagtgaagaaaaccgattgaatgtttatcggaagttttagcgcgttgaccacgtgctacggtacgagcgagggttttaccttcggtcagaaattctttgaattttttcaagtgagtcattttgtttttcctgatttccaatatgggaacatagtaccagtatttagtgacggggtaaaggaaaagttttcagaaaaagcataaaatttattagatctaagtattgatcttcataaaaatttatgataaaataaaatattaatatattatagatcataaaatttatgaattcaagatcagatctaaaattttttaataaattatttattaaattttacttgatcttgttagatctttttgataaaattttaattaataattattatagatcaaagattttaaaaggtcaagcattttcttcaaatttttatattaccccgtcaggccgctttgatcccgttccccgctaaatagaggaaaggagatcctatgtctacagaaatgattttaaaccaaatctcacctacaaactttcgggttgatattcctgataacagttacatgaaaggtttgactttacaagttcaaggggttacactaccatcaatgaacctcccagcagttgatattcctgcaaatatgatggttcgaggtaaagtacctggttcggcttttgagtttgatcctttgatgatccgctttgtagtcgatgaggaaatgagatcgtatcttgggatttacatatggatgttgagcacaaacgattacaacgagtttaactctgttgcgtgggatgatcctaagcaatcattcgctgtgcatatcctggataactcccagatgaaaacgatcgccacatttagattttatggtgccttcccaacaaacttgggtgaggttgaattgggttatactaacgatagtgatgaagcggttacgtgtatggcaacttttggcttccttcatatggaagttgaaattgacggaaaagtagtcacttctcaaaagagaatgagctaatgatttatgtgattagtggaaaaaagcgaactggtaaagatacggttgctaaatttattcaagaggcgtacaatgatgttcagtgtgaagcactggcatttggtatcaaaagaacgctaagagtagcaatgcagcgatatggttacgctaaaccatacattcgtagtctggttgaaggaaaatattctgatccggatgctattttttacgaaggtgatcgagagaaacctcttgtgatgtctaatgaagatgttctaaatattttcaaaatcgggcttgaaatcctcaaagaacgtggatacaatattgtttatagtcctgatgatattgataatctgattatgagtaacgatactccctggagtatcagacgcttgatgcaagtgtttggaactgatatcgtatgcaagtatgataacacggtttgggttcgttacacactggaaagattcgtcaataaatatgctggtgacgaatacaatcatcttctggtaactgactgtcgtcaggaacacgaatataaatacctgaaacgcttgggtgctaagtttgtgtttattgtaaaggataccggaattgttgatgaacattccacggaaaaaggtttgacacctcaacctggagatagtatcatcactaacgaaggtactttgaaacaactaaagagcaaagtgctcgatacttttaaattttaacaatgggtaataaaatgtctgatattcaaaaactgcaaaatgaagtactggtactgaaaggccgcgcattcgatcttaacgaagttatcgcgcaaaaagaaagtgaactgtcggttcatcgtcaacttctgtccgacctgtgttcggtactgggtattgacgcaagccagccagtaaccccagaagcagtgattggcgcggtatccgctctgatcccttccgttgaagtcgaaaaaggcgcggaagatgaagccgcctttggcgaagaagcgtaaaaacaaatttattacaaaggggcttcggccccttttttattggggtgttttatgaaatcatttcttgaaatcacaaaacctgttgtagatcctggtatctacatgtgtgctaaattcgatcaggcttcatgtgaggctttgaaaaatgttcaaaagacattaggtatcacaaagaatgctgtttcagccgaaaagatgcatacaacgatcgtatacagccggaaaacggttgatttgttcccgcaacaggacatcacagaacctgctaaactggttgatgttgaaaagtgggacacaaaatacggtagcactatcgtagggatcctggaatctgaatacctgcatagccgtttcaaagattctattgatgctggcgcaacatacgattatccggattacaaaccgcacgtaacccttgcatacgattcgatgcttgatgatatcagcggagtgaaaaggttgttgacactgcccgtggatttgactattatctgtgaagaggctgaatcactggatctggataagtcgttaaaagatattacagaacacattgaacagcgtggcgataagtgggttgttttgaatcacgatcgcacaaaagaacttggtgaatacgattcgaaagccgccgctgaaaagcgtttgcgtcagatcgaatacttcaaaaatcagtgaggattatatgaacagaacacgtttaatgtatcttgttaacagtgtacgaaaagaagttagcgaggcgtttactagcgcgttaggtgactggtatacaatcaaggtagcggctactgctgaccacattgcagatcgctttaaagaccgttcagtatcgattaaaaaagatattgaaacttatcgcgatatcatgatgagtctagcaaatcattattcgtgttatgttctaacctacgcggtgaaggccaaaacagaagggacacaggaagttattgtttatcgtcgggtaaatggtaaaatctttgcttgtcctataactgttcaaatgttctttaacgaaggcgaagagaagccagtgatcgctatacggttgcgaacggtgatccctgagtatgtttctttagctaacagaaaaacaatccaggtcaactacgttccaccaaaaattaattttgaatacgacggttatcgtcgggttatgtcccgcctggatcgtctaatcgcttctaaagattgtcctccgcaactttggatgttgaaaaactgaaaaaagcccttgcattcgtgcaggggctttgttatattggccttgtcgaaacaaaggaggctatcatgaaactttactggttaattttctcaaacgggtttgttatgaaaggaagtgttcattgcgcaaaaacttattgtgaatggaacaattgcactttcaagatcctgagtgttgcggcgtctcaacctgtaggggattactaatgactggtgataagtgggttgataaaactttgttgttgactttggtttatattatggtaagatacttaatatagaaaaaggaggatatcatgagaaacttaatgaacatcgcagaactcatcgcatacggcagctcactctatgttttggcgcacggtgacggaaaaggttacttgattttctttggtatcggccttgctatctctttcatcaaaaaaatctttaagtgagaaatatattatggctaaaccatccggcaaaaaatataacgtcatcgatgtttataacatgactttaaaagactttgaaaacatgtgtcgggcttatggtagttctactacccttcgcgaactggcagagtctgctaaaaaggaacgtcctcatgtttgcccgaaatgcaacggaaaaggttatgaaaccattcgttataacgcatatccgtctgggttgccagattctggatgggtcgaagatatgaaagatttcaacaaagaatgtgacctgtgtaatggtcatgggcgcaccaaagataaatttgttgcaaaacctgttaaagtggaatatgtaaaatcatgaaaatcgttgatttgattaaaatggctaatagcctggtaacaagcgatcattatgccgactattgcgaacagtatgaggtgccgctgcaacgcgcgatcaatcaatccgggtatgatggtgttagcgaaattaccaccgaaaacctgaaaacattcatcgtgtttgctaacaccttctggatgtatctaccggataatcctggtattcgtcaacctgcattctttacgctttgcaccttctgtgaaacgtatttgcctgattgtgaggatttcgaagaaatctatggctaaagtagagttgatgtatcttgataaaccaactggatttgttttcccttgtgggtttgctgatagtgcagaacaaatgatgtctatcgcgttttctcccagcatgaagccgatccctggtttagatgaaaatgtaatgaatgagtgtaaccagaacggaaaagtatggtatactcgacacgaagggaatgttgtttatcactccaccctcgaaaaccttaaatctgaaataggctatacaaaatgaatattgaacatgtatttgcacaggcattagaacagaaattaaacgcagaactcgatctgtaccgttatgacatggaagaacagattcgcggtgatcacaaaaacagtctggagcatgaatccagtcgtcgtgaagtgtggaaacatactttcttcgaaaacctttctgctggtgtgacaaaagccagtgctcgcgctaacaacgcacttaaagcatttgataacgcttttgcaggtgaataaatggaactatcagcgggtattatctttattaaagatggtgccgtgttgatgggccatgccaccgaaacgccccattgggatattccgaaggggcatgttgaaaagggcgaaactcatattgacgcggcgatccgcgaatgcttcgaagaaacaggatttgaagtgttcgcggaggaattggttagcctgggtgttctcgattacacgaaaacaaaaaaccttgctttattcctctatgtagggcaagattacccagtagcggaagaatgctattgtgcatcaactttcgttaagaacggacggactatacgtgaaatggatgattttaaatatgtcccgatctcacagattccgtcacatgcacgtaaaacgatggggcaactactgcctaaaattttagcaagatgagaaatatatcatggaaaatcaactgactttaatcgatatctgcaaatcaattcgcgatgctgttttaaccaaagcatccgaagtcactgtttactcttcatggagtgctgaattcggctatgaagaaattgtaaacttccccgaccgcctcaaaaataccaaatggttccgttatatcgatcctaatgagctttcccttgatgaactggaagaactcaatttcagtcgttgggatgaacatagcggcctacgcctgatccctttatggttgcttccatacatcgatccggaagcaaaggttctctgcattgatggtaacgaagttctgtttaaagatgcagacaacgatcaccgtttcggtatgttggcctacggtgttaaaccaaaggtataatatgaaatacgtcgattttaatactctatctgaaatgggccttgtttggcgcattaaccgcgaaatcttacaccctctggggcttgcgctttcccgtgatgtagaaacaggttcatcacctggcgcgttaatagctgatgatggtgtatggcatttcgacgaattcacaaacgaaagaaacgcagagaagttttctaaagttttggatttacatcaaagcgggaatctgttagattatctacagaagaacgcaaaataggggcttcggcccctttgaggatcatattatgaatggtaagagggttattgtcgttggcgaatcaaagcataacgaaaaaggcgatcacctgatcattaacaacgatcggggtggatggtacggggcgacacaaataaaaagcggttatgcaacgctggttgaaaaagatgcggttagattggcaactgctaacgatcctgggtattatggtactcgcgaagagtttgaaagcgaaaaggatcaagagatcgcggaattgaaaacacaggttcataatgcgcgggtgtacgctgcaatatgtttcaccgtagcggttatgattacgattatatactggatggtgattttataatgtcggatgaaattgtaagaaaccgtattcgtgagttaaaaactttccaaagtcgcgatcatgcgatcatggttggtagttacattcattggttcaagaacaacgatctggatctgaatccgtcctatcagcggccctacgtgtggaagcagaaagagcaagatgctttcatgaagactttgattactgggtttccttgcggtatcattgcgatcgcggttgatagtgaattcaacgaatctcgatgggtagaagtcattgatggaaaacaacgcttgacaactatcatgaaattctggaacaatgaaattggaataccgatgcctaacggttcccgtttgttttggggtgaaatggaaagacatgaacaacgtgcttttgaaaacatttcattgccagcgcttggactcgatgagtgcaacataaaagatcggttgaatttctttttgaaagtgaactttgcaggggttccacaatcaccggaacatatgcaagcaattttaactatgtatgagaatgcaaaatgaattttacaacagcgccttttgaaactggtaaatggtacttcaaaaaacgtcagagtcgtatccatagctatacttgcaagaaagaccatctttactatccgcaagtaatgcaagctatgtgtgataccgaaggaaacattcactctgttattgttccttctaataattgtaaactgagtctggttcagcgcaaaattcctaaagaattctatgttctttatgaagagtttacccctactcacctggaagaatcgttatttttcaaacagggtaaacgttacaaggtttctaaccgtgggatcattgattgcctggctgaaatcgatttagggaagtatggtcataacacatcgttacgccgcttcctttcttatggtagcaaccgacaggaacagcagaacgttatctatatcaataaagctgatatgcatggtaacgcgatccacattctgggaaattcatgcaccagtgaagtacaaagttctttccggactaaaattcctggatggatgttgatgtttttggaagaagtaggtgaaaacaaaccagccgtggcaaaggatccggtcgaaacgatgatccagaatcatgaaacactggaagaaacaacccgccgtgaactcattcaggatgaagttgtggatcttccaaaggcagaaggaatcatggtaagtcatgaagatttagccctgcttgatgcggtcaagtttctcattgaacaaagttctgttgattatggttcccgtgctcgtattcaactgagtgcagaaggttacacgtatggtgtagattctcctgaattcctgatcaagtgggccgaaaaacgccgtagtgagttgatgaaatatagcgatgaactctttaataaaatcaatgagttgaaagcaacaatcgaaaaattaccaaaataatcaaaaagcccttgcattagtgcaggggctttgttatattacacacatcgaaacgaaacagagaaaggaaaatatcatgaacatgaataaaaacattgccgctgtagttggttgtgaagtttctaacgcagaacgctatgataacggtttctctttctgtgttccgactgaactcgatgcgtacaaagccgcttacaaataccgcactatgcataaggtaaacgttacttacgcgcctaacatcgaaatgtggttggttcaggtttacaaagtatgaatttccacgaacgcaaggccgcacgaaccgattattacatgcggttcgtgtatggctggaaattacggaaatgtgttgcatgtaatggatcagggcggtatgataacaaccgttcccccaaatgcagtagctgtaatgggtctggtaaagaattttataaaagtgaggtttctaatgagcgtatcaaatgaactgactaactatttcaatattcgttatacctctggtattgatgactgggctagggatgacgaaatgactattaatcatgcatgtgcagttcatatgaaacgcttgcatgagcaagggaaattgaaagaccttaacctttacggcgacatcggatccggttactgctattcattctctatcaatgataaagagcgcatgaccgttactctcactaacttagttattcatgaacctggtaatgtcgttgcctgggggatccataacgggcgatatactgaaaatcacagcatgaaattagcgctgatgaatcataagttgtttggtggttgtgttcctgatatctttactaacgcacttctgcgtattttgaaatctatgtgaggcatacatgagtgatgaaattgtgtttgatgacgcaacattaaacaagttgcatagtgtcgccagtggaacctgtacagccatgcgggataaatgggcggctacaatcaccgatgataacaagatcggggttgttgatgaaatgggccgcacgtttacggttacgtataattcgtcttggtctgttgctgacaaccaaacaaaatccaattgcttgatgaaattcatcgacatgatggatccacacatgatcaaaaagctggttgaagagatccgccgccttaataaatttgaagcggaatcgaaccactggaaagcaaatcatgcttgtgaggttgaacgtgctcgcgtactcaaagagcgtcctgatatgcccttagagcgcatcaaagcatatgaccgtatggttgagttggaagaagaaaataaacgcttacgtgcgcgtatggaagttctcatgagcgcggaaatgatgcaaaataacctaaacatgatcagcgctatgttgcattctatccaaagcgatactaaccaaacaagaaaattgttatgtgatcgcttcaacgtacaaggatattattaatgtcatggttcaaacgagagtgtaagcacgaagctactggctatcgaggtgcagatccttacatattccagaaatatagtcaggtagatgggatcgggcgaattcatttacatttatacgctagatgcgacaaatgcggaaaagagttttcttacgctatgatgcacctggatcgggcgcttaccgaattgtgccagtattctacgatgcgttcggaaattcaacgggttatagataataccccgatcaaacgataatttttgcaaaaaccccttgcctatggttaggggttttgttatattacacacatagaaacgaaacagacaaaaaggaaatcatcatgaaacttgttcgcgaagcaatcaaactgggtaacgaatacaacggaaaatggtacttcatcatttatgacaacaacgcagaaaaactggaaaaagttgaagatgcgttacgcgctatggaaactggtgcttctgttggtggtgaagtgatgacctgggaaaattactgcgacggttgcccttgctacgatgatggttttggtgctggtttctgggttgatattgaagatgttccggcattcaaagccgcctggaaaatcgctaagaaaatggcataattagcacgaattgctaaaactctataaccccaatctgttattgtacacacatcgaaacgaaggaggatatcatggaaattatctacaaaagccggaactacaaaaaagaagatgttgcagcagtttacatcaagtaccggaacgtgaaatgtgagtacagcgggatctggggttacgaaatcgttgtcgaagaagtcaacgccgacaacaaaaccatttacagtttcacggtaaactcggatagttctctgttcactacagaacagcttgaaaaagcgtatgatctccggaaccaggcttttaacgcggtacgtataaaatgagattccgtccttatatagaattccttcgcggtatcagtgagatcctgaaccgcgaaatcaaacccagtccgttagccgttgagctttaccgactggacgcaacccccgaagatgcagcaaaagattacggagatcagttataatgttaacttttgaagagtacaaagcacagcgtgatcagttaagcaactggtacagagagatcggcgctgagttgagcgcatatcctaaaaacgaaatggggatgacgatcgaatcaatccgtgtaacgccggaatacaaagcgaaacgtgctttgtgtaacaaggttttccaacaacttcgtacccttaacgggaagtacgttaaaacgtacaaaaaagaactggctgacgaacgtaaaagaagattcaaataatcttttctaatttccatcctacggtattcttagatatatcgtagggtttatcacatgttgtgatgacttcacccaaatatgttttcagtttgcgcatggaaatatttctgtctttgcaaaactttttacattctccttcaactaaaaattcttctccagtaggggaagtaaatttccacataaccgcgcgggaattgccttttccacttcttgattcagattgcgctttacgtatagcttccgctctttcctctccgtgtatctcttcataagaccgatggtcgttgtatcgtgggttgttctctcctttgtgtgatgcaataccttccttgaatcgccttttatgggattctgagattttctttgctgcgtatttctgatgtgtttgagaaatcttctttcctgtttctggcgtacatgaaaaatcaatgctgttgtgtatgtgtttgttataaaaatgtgggttcttgtccaccttgtagatttcgtgtaaccttttctcaagtttcatcgctttttcccttgacaacccagatacgattattttatatttgtagtgtcctggattttccttctgatcctggatgaaatgactatcacgggaactgctgaaatagtgtttccctaaatcgtcggaagcaagcattgactttttgggttttcttgaaccataatagtgcttgttctctacaacatttgtgattctataaacgtaatacattatgaggttcctatgagacacgttaaagtaaacgccaaacatatcaaaacgcctgtgggtcttctactggaagcgaaaggaaagaaaatctatcgttccgaagaagttaattttaattttgatatgaaaacaggtcatatgatgacctggggcaaaactcctgctgacgatcctatttatagtcattttccttttatcctagatatcgagatcactaccaaatgcaacgggccagcgggtaaactctgcgggttctgctacaagtccaataaccctaacggcttcaatatggatcttgatacattcaaatctatcattgataaaatgccctggttaacacaatgcgccctcggtgctgatgcacagggacaaacaaaccctgatatgtttgatatgatggcctatgcgcgttctaaaggcattgtaccaaaccttaccattgctgatgtatcaaaagacgttgcagcgcgtttagcggctgttgctggggctgttgcggtatcagtatacaaacatgctggattcgatgtagcgtttaattcagtggctaatcttgcagaagccggacaacagcaaatcaaccttcatttcatggttagctctaaaacctatgatgacgcgtttaacgtggttgatgctgtaaagaatgatccgcgcttgaaacaagttaacgcgatcgtattcctgggtctgaaacaaaaaggtcgtgggaagaactgggataccgttacacgcgagcagtataaagcgctggtagattattgccttgaatccggtgtagggttcggttttgattcctgttccgctccggcctttgtagaggctatggaagggcatgaaaattttgaacagtacaaacagtatgcggaagattgcgaagctactatgtttagctcgtacatcaacgagaagggtgaattcttcccttgttcctttaccgaacgttgggtcgagggtggatggtcagaagggcttaacgtcctggaaaccagtgactttatcaaagatatctgggaacatccgaaaactaagaaattccgtcaggaattgattggcaacaaggatcataacggttgccgtaactgtccggcttatgctgtatgtggtaaagatatgcgcgtacataaagcccctgaattggatgtatacgcggtggaattgaaatgaaaattaatcctttaatgattgacattcccgtaaaaccgcgtacactggaatcgttgatcgagaagtatgaatattctctggctattccggcaacagcagaaatggcaatggcggaaagacaaagcattatctatgaatgtgatgcgaaaggtttccatactgatgaagatatggcgatgattgattatctatggaaagttcgcggcgcggtagtcgatttgattctttcaaaccaactgatgcaaaacgaaacgcgtcgtatacaagatcgtatacgctctcagttgtatggtatgagcaccgaacagaaggaaagaatgtatgcaagaaataatcgatgaacttatgtatgtgtacaaagagcgatgcaaaaatggacgcatcaccgaaccaaaggcaaaagcgattattgaaaattattgtgcaaaagtacaagcacaagacgctagttcaaaacttctgaacagtctgatgattcttaaacttttgattgcatccggtgatgatatgccgtatgatgtagatagtgcagaagcattccagaaaagttatcgttcatggggagtgatttactcccgctcactgggttcttatgattcggttatgtggaacctgatgcaccttgataaactgatctgggaagtactgaaagaagagggtatatcatgacattcactcataccggaatggttgaaacgataacagcaggtaagaagcgtatacccttgatgaaatcggggaaatactggaagagtgaagaacataagtttgatcataatggtaactcatttggttcttcttatgctaaactatacctgaaaaccattaaaccaatttaaaggaactgatctcatgtttgaacaatcttttgatgaaatgaaagcctctgtttttgttggaaataccgaagctggaatggcgtttagatatgggatcgcaacaataaatccaggttacaatgaaatcacaagcaacgatacattagaacttattcgtaaaatggatcgtttgcaagtaaacgtacctaagcgcctccataaaaagtggcaagcgttgaggggttcttttgttatggcatttgggcctgatatgctggaaagactttaaggaaactctatgttaactaatgaacttagcggggctattcgtaccattgaagggatccttcatgatttgcgtatgggtaatgaaatttgtgtaagcgacattgaagcaaatctggttgaatggcgcggcgctctgtatggggcaacacaaggaaaagatccgttgtttacggaatatgatatgtatacagtaaccattgacaataaaacttatcgttttcagtggcctgatgatgcatacgatcatatcaaaacattttacagtactggaggtgctctttttgctaccagtatcggtgttaacgaattgccttttcatcctgatggattgagaccttccgatcatttaggatgtacaactgtgttactgggtatgtgtggtaactattctgatcccgtgtactggattgaagccagtaaaaccaacttaaaaagagtttaacatgaaatatattattgctttggtgttagtcgttattgtcgttttagcacaatccggatgcaccgatgagaaagaagccgaacgtattctgactgctaacgggtttagcgatatcacgtacacaggccacgcctggttcgcatgtgatgagaaagacacctacgcaacagggttcgttgctaaaagccctacaggggtgaaaattgaaggtgctgtgtgctctggactatttttcaaaaatagcacaattcgcttcaaataagtgttgacgtagatacggggttatgagactatagccctgtcgaaacgaaacacactttaggagagaaaaatggacatcatgaacgaaatcttagctcacatcgaagccaacaaagaagcaatgaaagctaaagaaggttgggttgttgttgacgattgcttcaatcctaatatctggactccggttttcatcgatgagaacggtaacgaagcccacgggttctatgatgctgcaatcttcgatactgccgaagaagcatgtgatttctgggcctacgttagcggtgatgctccatttacaaaatacggtgtgtgccgttgctgtgaactctaattaactagccccgaaaggggcttttttgtaggtaaaattatgattacgaaagcacaaaggatcatcaatcatttagaaacagggttcccgtaccagggagatttaacccgtgatattattgatatcctttctgaacacgacggcatgaaggccgaaatcgaagaactgttacatcctgatgttaacgtgtttgcttcattgatgagcgatgtagtgaacattgacaccgatgaacttggatgcattgaaacaacaaatgatggtgataaaaccatactgaaacaggcttgtgaacggatcgacaaccttcatgatcgtttgttcactctaacttttccgtctaaaaacgataaaccttgttgacatccagaaaataaactagtagtctgtagttacaccaattgagaggaatatattatgaaaagtgcttttgaaaaacgtgctgttaagaaagatgttaaaccaggtgcgattatgtatgaagtattctgtgtgaacggagaaaatgcggaaatgggtagcaagatgattgttactggattcccatacattcatcgcggtattgggctgtttgctaaatgtattaccctgtacaaagactgggactgtcacacagaattctctcttgaagatcgtagtatgaacgggtacaacggatacaatttccatgcattctttctaacaaaagaggatgcacaggcttacattgatgaagtcaatgaaaaccgtcttcctcctgatatgaaagagcgtagaaacgagcaaattgaacgtaaacgtgaatttgaagaatgcttcggtgatctttacgattattaattatcgaacctcttaaaccataaataccctgtgtacccaaacagggtatttttacaagaggtgattttatgtttaaattcagtcaaaaaagccttaacaaccttaaaggcgttaaacctcaactggtgaaagtcgtagaacgtgctctgcaactgtctcctgttgattttggtgtacgtgaaggtctgcgtactgtagaacaacagcgcgagaacgtccgtaagggtgtatctcaaacaatgaactcaaaacacatcacgggtgatgcggtggatctgtatcctagcgtgttgcctcaaggctggcaaacaaaccctaaagtgtggttgcctgtcctgaatgctgttaaacaagcaggtgatgaactgggtgttaaactgcgttttggtatcaactggaaaaatgatccgaaccttccgatcgaaacaaaattcattgatgccccgcatgtggaattagcgtaacaaaggggctttggccccttaaaggtaaaacatgaatagtgaattttatgtaaagacaattgaagaatgtcgtaagatgcatcttatgcgagagttggaagaaccaacgcataattacggccctaacgattttatggtattcgaaaccaggctggatctgggcagagaaacgcaaaagactaaaggcgcgtttgattttatgaaacgttcccatagttcccttaacatttacgtagcgcatacgttaaatgcagcacaagacgccaaacagctaaatggtgctaccggatgtgatgtattgaccagtaaaggggcaattcttaatcatttccgtggacgtcgaatagagcaccaggcaataaaccttatttttgatgagtgtgatcttacgcgcaatgaacgcatggacattgtgtataatacactcatgcattgtgtacaaaagaaacatccattagcatatattcacgtaatttcgctgggtatgtaatgaaaagtcatggctattcatcaagaaccatacatgaagagattcaagggatcgaatctcttctgaattttgtagatgttgatacatctacaggtaaagtgtattggaaagttcagcgcggccctatgtctcctggaagtgaagccggaagcaaaaacgagtattcccaaattcattttaaaggttctatgtatttgcgacaccgaatagtgttttacgttgagaatggttatcttcctcctatcgtagatcatgtatatggtgttgagaatggagatacagcaagaaatttacagaaagcgacgaaccagcaaaatgcgatgaaaaagaaatgtaactcaaacagtagtacagggttgaaaggtgtttcttatcataaagccaatgggaagtacaaagcgcagataaacatagatggaaaaagaaaatttttggggtactataacactccagaagaagcaaaatccgtttataaccggaaagcaaaagaggttttcggtgcattttttaacgaaaccacataaggttaatgtatgtcaaaatacgtattagacaccaatgttttgattagtaacccctattcaatctattcattcactcaacctggtacagaaatcattattacctctgctactatgggtgaattagatcacctgaaaacgaaagaacgaacagcgcacgaagcacgattggcgatccggcttctgtcaaaagttattttcggtcagtcatatgatgcgattacgaaatcaggtattcctttaaacctgacaaacccagcactgtctgacaccatcacccttaaagtggttgattatgtcggaaacaaaacgtttgctcttgacaagcaagacgaacgaatcattgaaacttgtatgcaacaggatgcaaccttagttactcgcgatattatgatgttgctgatcgcaatgtcccgtgggtgtaaggtagaacagtatactggcgacgatacgttaaaagatagcgatgtgttgtattccggttatgtagagatccctgatttctgggataccgtagaagtgttgggatatacggataatgtagcccaaatcacttacagttcgcttcctgacgaagatttttatcctaaccagtacattacctcaaacggtgagttagtcgggcgtgtggtgactgctgatgagatttgcttgaatgtcttacctgttaagcatgaacaggctatgaaacgcaaactcatgaaagctatccaaccccgtgattctctgcaagcggctttcgttgaatcaattatgagcaatgaaatcgatgttgctaccattatgggcggcgctggttctggtaaaacaatgcttgctgtttccggtgctatgcacctggttaatagtggacattacgctaacttgatgtatgtgaagtcagatagcccgttatcaagtgaaattggcttccttcctggtacattgggcgaaaaactccggccttctatcgaaccttgtattactagcctgaatattctgtttaaggataatccggaatcggaaaaatacattgaaggtttgattgaaaaaggggtggttcaattccctagcctgtattacttccgtggtcgcagtatcggacatccggatccgggcaaaggttctgtgctgattgttgatgaatgtcaaaaccttagcaaccacgaaattaaatctatcatttctcgttgcggagagaacacacttctgatactatgcgggaacattaagcagatcgacaaccctcgaaacactgccgttaacaacgggtttgtatgggctgttgaaaagctgaaagaatacgaacactcaagccatatcattcttgatacagtgtatcgttcccgtctcgcggcgtttgtcgaagacaatttctaatgatgggggcgaaagcccccttttttgtgaggtgtatatgattactgtcatccatagcccaaaactaattactgtttgcagttgctgtaaaagtgggttagaatatgaactatctgatatacagcaaaagagagaagcgatttacaatggatttttctctgctgctgattatgttgtgaaaaaatttatcatatgtcctaaatgtggtaactcagtgaaactatttttgaattgaggtttccgtaaaatgaaactagaaaaacgttattatgtagcaaaattgagcgatcttaaagaactgacgccagaagatttgaaaacgttcaacgaaatttgcacgaaaatcgaaatcgggcgcgggattaatggtaagaaaccatttgatgcgatcgtgatcgagaatgattggcccgaatacgataaagtgttggaaatgctgacttctcgtattgttcgcgaagaaaccgatcgcaagtttgaaaagatgctggacaacaaagaacgcctcggatactttttcgttgtggaaactcaccagggaacttttctgatcaccagtgacgcgcacagcacgaatcgtctgacgaaatacagtggatacaaataccgcgctttgttcagccctgattgtggatttgacaacagagaaatctttactactagctggagcgtctactttaaacatgccgttatggtatcaatagatgaaatcgttgcactatacgatcctaacaaggctatttcaaattataacattgctgaatttatcaccgataaactacgcgacgcgaaaactatataaaatagttgcataaatataaagtggggtgtattattgcccctctttttgcaacataggtattaaaatgaagaaaattataattgctgccagcattttcttgtgctctttttctggcaacgctgcaacggatccgctaggggatttcattgcggatttgcctactcatcaattgcctttacaaaaggctactgtaaagcctccggcaaacaaaaattctccatcctatatcaaggatttggataacatcacaccgaagcagaaagaggttctggagtatgcttatcgagttggacacaactatgatttgaagactgcaaaacctgtagaaaaagataaggctaaacgtttaggctatcatttagcggctattgcctggatcgagtctcgcgcatgtgagaatgtcggtaaaggtaaaaaaggccatcacgcttatggatgctggcaagttaccgcaaggagcgccagcgcacgaatggataagtcatatcctaaacgcgtagtaatcaaaaagctcgaaactcttcaaggtggatcgaagtatgcgatctatgaactggagtattggcttgattaccacaaaggcgacttgaaaaaggcgctggcgagctataacgctggtttcaagtatacaaagaaagaagcccgtgattatgctcgtatggttaatacaaccgcgaagctgttagaagaaaaacaaatcatttgacaaaaagcccttgacttcggtcgggggcttttttattatggatgcatctaattgagaggaatacattatgagtgacctgatcctgaacgaaactaaacgcgtactgtttaaagctggttcctacatcgtagcgactccgaaaggcaatacttcccattgggcggttgctgattggatcatgtacatcgacaaaaacggggaatgggtgcaatgagaaatttagctttcgaagtgtccgtaattgatcaacggataaaagaacttcatgcgaagatagccccgctgcaagaagaaatttctaccttgatcaaggagaaaagagacctgattgaacttatcgatcaggatatcattaacaacgtcaaggacggggaaaagatccctgtgatgttggaatatcgttcttctagtgtgtcttatcacgcggcgacaaaatttttcgaatctatcggcctgggtatcgatggtatggatccggacattaaccaatactgtttgcggattgcgatggatgaagacggttcgaacattaatcgagtgttaaccgctttagaaatggttgaaccttttgtaaggccgcaagcaaatgggcgtaagcgtttcgatctgttcgaacatactctgtctgaatgggattgctactggctgacatacaatccagctaacaaacgttgggctgttgaaactggtagtgggatgagacgaaatcaggatccgacattctctgatatgtctctgaaaaaagttcttgcgtatatctgcaatgcgcattattatacccctatcgaagaggatgaataaggaatcatcatgaaaaagttagcactgcttttaactctggttgctggatttgctcacgcgggtgatgctcgcctggatgagttatgcaacaatcgtgatatcaaagatgtcgcagtatgtaagcaagtgatcgcagaacagttagatgttgcttatatgtggggagaggaaaatgctcacctgtataaacgcggtaagttgctgaaacaaaaagagtttttgcagtctgaaccaatgatgaatctatgcaaacaagcgccaaataaggaacggtgtgaaaagttccgcacttatttggttgatgaattcaatgctggtatagggctttactaatggctatctggatttttattattatggcggcggttgtggtgttcttggcgtacaatgctggtaaacatgagagtactgggccttgttactattgcggggatgatgactatgtttagtgctggatactttataggcgttgttatcggttttataatttttggtggtgttttatatatgtgtcatcaagaagatcgccgccgtgaacggaaaggtaaacaggtgtgacattacgtatttttcttacgttcttttaataattaaggttaatttatgaatgatatagacaaagcaaaactctataacaaactagataattttgctgatgctcgcgaaaagtttttagatgatggtgatttggctcatgctcaagaaactaaggattggtttgatgatattactgatttcatcgatatgctaatcgaacgcgaattatataggaataataaaaatgatcattaaagaagtgaaaggtaatgctgtcaatatgtatctgaatggtgaaggccatttgatccacggatgcaactgctattgcaatatgggcgctggtattgctcgcgaaatccgcgatcgtattcctggtgcatttcaagttgatgccaatacgttaaaaggttcccgtgataagctaggaacttgttctgtttacattggcgaaaaaggcaacattgttttcaatgcatatactcaatatgatttctggacacctgggccgcgtgtcgattatgatgcaatcggtaatgcgtttaaacaggctgtagggcttgctgacgccgttaagactggaaagcctatcatcacacctttaatcggtgctggactcgctgggggcgactgggaactcattaagcgcattattaatgaggtgactggtgattacccgatcattgtcgttcatttcgatcctcgtaaggtgaattaatcatgatggatcctatcaaagcagggcggcagattaagaaagcgaacaaacggatcgccgtaatcaaaggacaacgcgccgcactggttaaaacctgtaatgcattggcgcaagcgatgaaagcgaacaaaatcaacatcacccagcgtaaaacggtggttgacattctctgtcttgttgacagtgggcttgataaagaaatgggcgaactgaaaagcaaaatcaatatgtggtatcttgatatccatcaagcacaagatagcgaaatgggcggttatacgcatggctaacgcaaacattatagaaaatgttcgctgtcgggattgtcatttccctttaatttgtgtaatgaacattaccaaacccccttatgatgagtgggattggtggatctactgttcaaataaaacatgcaaaaaccatgaaggggaagggaaattccaaaataccccagattttgttgagaggataaatggctaaactatattttcattatgcatcaatgaatgctggaaagagtgctcgtttactcactgatgcatacaactaccaggaacgcggtatgcggatcctgatgtacaaaccagcaattgatacgcgagaaggtaaacagagtatctcttcgcgtattgggttggaagcaacatgcaccatgatcacgcctgatatggacttgtattatgatgttcacaacaatcatttttacagtgatagcgagaatctggtttcttgcgtgtttgttgatgaagcacaattcctttccaagaaaaatgtcatggatctgtgtcgggtagttgacgaattagatatacccgtaatgacatatggactaagaaccgattttcagttgaacttgtttgaaggttcttatatgttgctggcacttgctgatgagatcagggagttgcggggagtttgtcattgtggaaagaaagcaactaccgttgcccgtattgatgcaaatggaaaatttgttgctaatggcgaccagattgagatcggggccgaagacaaatatgtttcactttgtcgaaaacattacttgcaactaaagaacaaccctgatacagtggaagcataaacaaaaggagatcattatgagtcgcacttaccgtaagaaatacaatcctcttcgtgacctttcatctaacgaaaagatcgaagaagtaaaagagtattctcgttattatgctcaacatggcattgatccggatgggttgcgttggtactcaaccaactggaaacacaaatcaggatgtgcatacattcgatttgataataatctgtgtcgcgacggtaacaaagctcatggcgatctgaatgcaatgctttctattgcagtaaagaaaattgattcaaaagtacgtacccgtttacgtcaggaactgaaacgtatgaaagctggtgtgatcggttgggatgaaaacgtagaaaacgtgaacaaaatacgcgctttcgaaagaagtttgtgttggtatgacattacttgattgactttacagcaaaaatattataacgaggcttcggcctcgtttttgctataaatatatacaggagtagacctatagtgggtctatgagtaaaagagtaattgttatgaacattaaacgcatatcaatggctgtgctgttcggattgttgatgatgacacccacaacacacgccgccgaccgtccggttcagaaagaatttgacgattatattaatgcggcccttcaagtatacatcacaacgatccctcccagcgtaaatacaagcgaactattctacaactacatggaacgaaaatggcaccaaaaacaatgccgatctgaatccgaatgcgcaaagctaggaattagggtcgcgtatgagtttgcaagtatccatcgttcataaagggatcatcatgcaatcatttaaacaaattacagaatctgagaactcaagcaagatagatgcctttattggcatgtgccttatgtccgttacgtatatgcatagcgcacattttgcaacaggttcctactcacaacataaagcatatgagggtttttacgaagatatgcaggatttggttgataaattcaccgaaatccacataggaatcacgggaagatacaaacctgtgctaaaaaccgaaaatatgcttgacacggtagcgtatctccgtaaaatagccaacgaagcaaacgagatctacgaatcagtagatagttctttgaagaacatcctggacgagattaagggcttgtgctatcaaacaatctacaagctgacaaaactttcttaaaaatagtttgacagcgtgaaatgtgatgatagaataactatcgaattgaacaacaacttatggaaattatgatgaacttaaacactatcgtgaacaacccgaagaaaacctctctgatcgctctgggcgtagttgcagcactgtggttagtgcctaacatgtataccattgtgcaagacggtacggttaaaactgaaaccttcatgggtaaagtatcaccgaaacccgtactgcccggtttccacattgtaaacccgctggcaacgtttgatacgttcagcaccaaagacatcgcgatgaagttcgacaaattacaggttccgtcccaggataaatttaaatccactgtggatatgaccgtaatgctgcaattcgacggtagcaaagcaccgatcaaccgtatcaacgcgggtaatcaggatcaggcactggataagtatgtaaccgaaaaactgctttccactgttcgcgaatttggtaaatccgtaccaaaagcgcaagacctgtttgatgcgaagatccaaaaccaactgcaaattgcgattcagcaggaagtagaagattatgcgcggccttacggttacactgtgaaacaggtattcttgcaggatatcaccctgccggaagttatcatggaacaggtaactaacacgaagatccgcgaagaacaggttaacgctgctaaagctgaactgcaaaaagtagaacagacttcattacaagcagtaaaacaagcggaagcagatcgtcaggcgcgtgaaaacgctgcaatcgctaacgaacgtgatgctgatgcccgtctgtatgcagcgaagaaagaagcagaagccaacgccgccctgcaacgcaccattacaccggaaatgatccgctggaaagaactggatgtacagatgaactactctacccgctataaaggtggcgtacctcaaactgtaatgggttcggattatgctggtaaagtgattttcgattctcgtaaataatgttttaaagccccctctttgggggcttgacatctaaaacgagaatactataatgaacataaaacagatcgtactgactatactcatttcactattctttggtttcgttggtggattgtttggtgtgttgataattgcgtctgttttatgattaacctttaaacgtggagcacgttatgaaacacaaatatgataaagctgtagtaattggacgttttcaaccttttcactatggtcatgagaaaatggtaagggaagcccttgctgttgctgatacggtttacattctgatcggttctgcttatgcatatccgaacacattaaacccattgaccgctaaacagcgtcaagcaatgatcactcgctggtctatctgcaaacttgatgttgaagatgcagccagaatcaaattcgcgtacattccggattacctctataacgaggaaaaatggaaatcccgtgttcgtatggcaatcgatgaaactcgaaatgatcgaattgcgatcgtcgggtacgaaaaagacaaagattcttactggcttaaagcattcggatggaatcatattccggttgaacctgtgaaggttggagatcaggatctgtcctcgaccaatttacgcaaaattatctgggaacaccatgaaggctgggacgaagatttgttaaaatatgcgcctagcactacggtttcctttatcgatgaatggacacaaacaaaagaattccaacgtttgtcccatgaagatacacactggcaacgagagattgacaagttcaaaaaatatccgtatccggattctctgaactgttgcacggctgattcagtggtcgtatgtaataacaacgtgttagtaattcgtcgtaagtttgcgcctggtaaagatgcgttggcgcttccgggtggacacaaaaacggtaatgaaacgttccttgattgcgcgatccgtgaattgctggaagaagtacgaattaaagtacctgaaaaggttattcgtggttctatccgtaattcgatgctgttcgatcatccgaaacgttcggtgtacttctcaaaaccgactgtagcacagtatatcaagctcgaacctaataacgatggttcattgcctcgtatcatgggcggtgctgatgatgcagcagacgcgttctggctacctatgcatgaggtcgtgcaacgacaaggggaattctttgatgatcatttccagatagtaaacgcctttacgggggttgcttgaaagcacattcatctaagcaaaccttagaacaagaagccgcacatatagatgatcttttatgtgcggttattgtgaatccagatttatacgaaatttaataaaaagcccttgcgttctcgtgagggcttttgtattatacacacataccaagtgattaatgaaaaggaagaaaaatgaatacaatcaacgtttctaaagctgatgttatgaaagcaacgattattgctaccgaagccctttcattcatggctaagaaagcaggagttgatagtgctgttatcctgatggagattacaaacaacccagaaggcaacaccgcaaggtatttcaaagatcttacttcctatgcaatggaagaatttaaatgattaaacatccctattgtcttgttacccgctcggttagtccgggtggtttgcctgttacctgttggcagttgattgaaaagggtgatgcgtttttaaacaaacgtggtgagaatgttttcgtttacggtgttaactcgatcgagaatgaaactatggttatcactgacgaaaaaacaaatgaaaaatacacgttgacatccgatcatgattgtcgtaattttaacgtgtattggaaatctgatgaagaatttgaaactgtgaggaaatgattatgatccctgttattagtgttcgtgaacaagtagcaaaaccccgtgccgttaaagttggtgattttctggatgtgagttttacctgtggtgaaactcggaaggaaaagaaagaatcattcagtgtgatcttgatatctaaagattctgatggttcaacggtttacattctgcataaagtaggaaccgcccgtgttcagggtcatgtaatgattatctcggtatatcctggcggagataaagtgtcttctcagtgtttagataaagtgactgctcgatatctgagagatagtgttttcatggcggaaattagcaaaatttatattaattctcgttctgctgttgatggtattgttacccatgtagagaatgaattggtattcaccgaaaaatcccatgaatctgttaaacggaatgtagtccctggtgataaactcggaagccctcgccgtgattatgaggttgaatacatcacttcttctggtgatatcatcgcgaaggcagaaaaaggttctaccgttgttatttccagacgcgataaaaagctgattgaatcactcaatcaggatctggaatggattgatgaatcagaggtgtatgctgcatgaaacctcgcttgattatgtcggatatagtgattgtcaacaacgaagaatactatgttgcagacatgaacacgaaaggaacccgcgagattttggatctggagtgtgttaggggtggcgaaaatcgattcattgtgataacatacaacagaagcagtaaagaaacgttgggcgtgtctgttcccgttcactactgtgaaaaaactaattgttggagacgtaaatgattgatttaagtgatgtgaaagttggtgatacgttgtatgatgctgggatccgtagtgaccagcgacaaaatcgcaaccccaaaaccctttacgtacaaaaagttgcgcgtcagtacctgtatgcatctttccgaccggaagatgggtctgattgttgtactaatattaaaatcaagcgcaattccgggtgggctgaggggtggatgggttatcaactgtatcgtagcgaagaagaatacaaagaaatggtgtatcgccgcgatttgtgtgataagattaaaaaagtatttgggaatagctacggaacaaacattccggatattactaccgctgaattgcgcgggatcgcaaaaacattaaaggttgaattctgatgaaaatgattatggaaaccgtattcggttctcacctgtacggactggaaacaccaacaagcgataaagactacaaagggatctatctccctcatcctcgcgaaatcctgttaggcactgcgaagaagtctatcgatacatcaactggcgataaaaactcaaagaacggtgttaatgacgtagaccgtcagatttacagtctgcaaaagtttatcagcctcgcatgtgatggtgacaccgtggcgattgatatgcttcatgcagatgatagcaaactgatcgctaactctgatatctggcaatatctccgcgctaaccgttcacgcttctacactacggaactaactggcctgtttggttatgttcgtaagcaagcggcgaagtatggcgttaaaggttctcgcctggctgcactgcgtgaagttgtcgatgtgttacagacgattcctgattcctggtatggcacatcattgctgggtaacgtagatgaatctaactacggcaagcgcatcaaagttggtgagatttctaaccgattcccgaccaacgagttttgtcgattcgttacagacaaaacactgaaatcaggttgtcaggaattttacgaagttctggggcgtaaattccagtctacgatcaccgtagcggaaatgaaaaaatccgtgtataaactctgggatgaatacggggaacgcgcacggcaagcagaagccaacaacgggatcgactggaaagctctttctcatgcgttgcgcggtggtatgcaattgatccagattttcaaagaaggtgatattgtgtatcctcttccggatagcgcatttttgaaaatggttaaagctggcggtgttcctttcgcaaccgtgcaagaggcgctagaatcaacgatgtgtgaagttgaaaagctggcggctgtatctggttatccgaaagaagttgatcgcgatttctggaatgatttcattgaacgtgtgtattctgaacatgttgtgaggtactataaatgacatatccgaaattatctggcgctgaaattgatgttctgtgtaaactttacggatactcgtcaaaaatgttggatttggatttcaacgatgttcccagtaaatcagggcgtgattccctgattcaaaaaggttacgcatcaatggcgtttagttcgccaacgaaaaatactgatatgtgtttagtgatcacccctctgggcgttgacgcatacaaacacggaattgaaacggagtggcgataatgagtgatgttattttgaacgttaaagatgtagtattgggtgatactaaaaccctggattctgcaatggaaaaggctgttgttaaaattatgcgcaatagcctccgcctggaagttaacgagattacagaaacttgttatacaggtgggctttgtggtcaatctctttatcgtgatgcgaaaagcgtgaatattcagctatgggctgatattggcgaagaatcatacaaaatcgatgaggttgatttcgacgtatgaaaataattgacctttgcgctggtgttggtggcgtgaggctcggtttcgataaggcattcggcggggtcgaatgccttttaacgtctgaaatcgataaacatgcacaacaaacatatgctgataactggggcgatgaaaatattcagggtgatatattcgccattgatgaaaatgatgtgcctgatcatgatatcctgttagctgggtttccttgtcaggcgttcagtaaagcaggtttaaaacagggcatgttagatcctcgcggtactatcatctttgaaatactccgcattatacgggctaaaaagccctctgtgctgttctttgagaatgttccccagctattaacccatgacaagggaaacacgtttaaaaccatctacaggctgttacaggacgaaggatacgatatccattatcaggtaatgaatacaaaagattttggattgcctcaacgaagagagcgtgtgtttattgtctgctttcgcgatccagtgttctttagttttcctgttcctccacgtaccccaacaagggtcggtgacattctcgaaccggataatgatcaatacaccatatcagatcgtgcctggaagggctttagagagcgtaaagaacgaaacaaggcaaacggcaaggggtttggttatcaggccgttatggtggattctgtgtgtactgggacgataacagcccaatactataaggatggtgttcaatgtctggtattgcaggaaggtaagaaccctcgaatgttatcacctcgcgagtgtttccggttgcaaggatttccggattcattcaagatgcataagagcaaaacacaggcgtacaaacaagctggtaactctgtatctgttccggtgatcgaagcaattgcaaaacaaatcaaaaaagcgcttgcataggctaacgaagaatagtatagtgaccttgttgaaacgaaactgacaaaaggaacataccatgacttttaatgacctgtttaacggatgtactggtgctggcgcgaaattcaatcttctgaaagattatccgctgggttctaatcctggttatgtgatggttgaagttcgtaacggtgaatactataacgtgttcatgtgggatcgctctttctcttactgctggttcggtgcgaaatacaagccagattacattctggagcaaatcgaaacagtaaaagctaaaaatcctgaactgtatgcattcgcagagtctattcgtggtgtgttcggacattgattaatcaagccccttttggggctttttcgtgaggtttatattatggccccttcaatcgtgatgcttgttatttctttccttgcttttgtcagtattatgtgtttgctattgtcgttaaaacaaaatatcggaaccacttggttagttatccttttgataatgattgctggtttgttccttttgattgtttccgatgttgtgtctagtctcatgtggcacatcaactacaatcgttatgttcagtgaggtttatatgattaccgaagttattgaaatggttttatacgcgttaacgtttgttctcttgttccttagtgcggagtggactagtcgcggaaatgtagtaatggcccgtatttgtgcggttgctgtgttctggatcctgggtttactgttgattagcatcgttagggggtggtgatgatttacgtagcttcttatagtgctgattatgaattcactgaaattgttcatgtttctgaatcattacaaaactgtgttgatgtgctgaacaaagttcctaatttcccttatcttggtgatcatgttactattgatgtatgggaaaatgaaaaactcattgcaaaaagttcaacattcgggcatcgcgatgtatgggatgatgaatcactacagtacaacgaaatccccgtaacttttgaagaagttatgaaaaatatgaaggaagtgaaagatgaacatctatagcattgagttgatttttgatggccgttttgatcaaacgtctgattgtgtatgttctactgttgacctgaacgtcgcgatcaactacattaagcatacaccgcttccatctttgcattactattgtataactgtgtttgatggattcacaggaaagccaacacattgttgtactgttgggtatgacgaaagaaaacatttcacaacgtttgagtgggagaaattataatgaaaatccgttctggttttgtgagcaatagttcatcaagtagctttattgtacggttcccgaaggatccgactgatatcaacaatctccgcgaaatgatgggtgactgtgttcctaactgtggttatagctggatgacttgcccgacagcggaagaagttgtacagcaggtacaccgcgacctgggcggtcatatgggaaatagcttcgaatcatactatgatgataagcgttatgaatgggaaaccgaagatagcgccgaaactcgatatcggtctaatcctcaaattgcgcttgcttatgatgggcgtgactggtatgatctggaaacagaagagaaagacgctctgatcaagatgtggttgtatgaagagtacaacgctaaatttggcaatcaggacggtgtattcatttatgaatttacttactctgatgaatgcggagaattccaatcccagcttgaacacgggcaaattttccgtaatctggaacacactatgaagagtcatcactgatggaatacgaaatctgtgtaaaaatgcccccctatcaactgggggaagaaataacgtttagtcaaactctaccagtaccgattgatttattttctttgcgaaaatatcttgaacggtttgacctgaatgagtatactattcaaatcgtaaggattaaaaatcctgttgcctacgctctgtcttttgacgttggcgagtctcaaacaacaacgatggatgattttgtttcattgttgagtagtaagtttggatgcgatgatgcattagatataattagcaaaaaagtaaacgaaattttaatcaaatttacctataaatgagaaaattatgatcactaacattgaattcaaaaacgccgtagccaaaccaaccccgactaaccacgtttttgtttgtgacgtatccggatcgatgtataacgaactcccgcgcattcgtcagcacctgaaaaacaacctggcaacgctggttaaacaggatgataccgtatctattctgtatttctccagccgtggtcagttcggttctgtattcgttggcgaaaaggttagctctgtatccgacctgagcaaaatcaatgatgctatcgatcgttatctgcgtccgaccggatgtactggcttcgttgaacctctgcaactggcggttgaagtcgctaccgatctgcaagcggataatggcaatctgaacagtctgatcttcctgactgatggttatgataactgctggcgtactgatgatatcctgaaagcgtgttctactctgccgttgacgtttaacaacattgctttcctggaatatggttattatgtaaaccgtcctctgctggaaaaaatggcggaagcaaccaacgcattacacaaattcgttgaagggtttgatgcgtatgtacctgcatttgatgaaatcattaccgcgcaaacctccgcacgtgttgaagtcaaagttggcgatgcaacccatgcgatctacctggatgaaggccgtgtgtatgtcctgaatgctgcaaatggtgttgttctggttccggaacatatcaaaaacatttgggcgctgggtgaaaacgcgatcaatgacgttgacggcttcgatccggcaacagcagaaggcgaacaggttctgtatgtggttctgtatcatgcgcttcataccatgaatccagatctggcatggaaagttctgaaaaaactgggtgatgtgcgtctgattaaagcatacgataactgctttaccaaacaggattattccaacgctaaagatatgatctccgaagcggttgttgatccggctaaacgtctgatggatggtgttgactacaacatggttcctgatgaaaacgcgtttactttggttgatgctctcgaactgttggcagaaaccgacaccgtgatcgacctgtcttctgaacactgggcgtacaatcgtacaggccgtcagactgtccagaaagatgatgatactctggataaactgtcagaacagattgcaaacgcttctactccggaagaacgtaaagcactggcggcgcaactggtagcgcatgaagtatggaaaccggaatttacccaaaccacaacgaaagttgcagtgaaacacctggtgggtaacagttcccgtccgaacatttccatcaatacggatctgcaaggttatgtaaccattccggaaagcaaacaaaaagagtttggattgccggaaaaagtagaaaccaaacaagtgcgtaactttaccattgttaaagatggtatcgtgaacgttaaggtacttccgctggaaaccgatattccgactctgaaaaacttacgtgcttctggtctgactatcaaaccgctggctaaaattggtgaagaccgtatgtctgtactggttgactttacctctctgcctctggttaaccgttcgatgactcgcggtatttctggtaaggaatttgttgctgataacgtccgtctggaaatcctgaaaggccgtcagaaggtaatgaagttcttccgtgataacgcgattggtttacgcaacgcagaagggcttaaacagcgctttggtgaggcggctggtgaatggttgtctgagcaagggatccgtgattacggcttctctccgaaggttgagcgcacagaatcgactgatgtttacatgtcgaaagaactgaacgtgaaaatcaaaggcgtttcatcacttccggctgttgcggctaccgttgcaaaacgcgccgaaggtaagaagaaactcaacaatggcgacctgatcattctgtgggcttacgataccgtatctaaagagatcgaagcgcttgacaagaatgacctgatcgagtatcttgataagcagacaaaggaaactattaaagaggttcgcgcccttaataatcgcctgagtcgtgtaatgtacggtattgtcgtcggacacgcatggtttgcggatctggatttcgaagaaaccagcgtaagcgttaccgcaacagatatcgttgcagcggaattctggaaagatgtgaaatttgattgcacaatcgttctggaagaaaaagaagtcaaactctaatgaatttgcccccgaaagggggctttgaggtgacttgtggaattacttgaattggactttaaaaatcttatgaatatatgcgaactgaatcaaggcgacatcctttatttctccaatcgtgatgggtttcgtaattcccgtcctgaaaacatcggctttcattcacagctacctgatttcatcgtcgttgatgatgtccggttaacagataacggctggcaggttgatgtagtcggattcaaaaataacaatggtgctatcttatggcgtcatggttctattgatgaatcggtgtattttaacaacattcgtgtaaacatcgatgaaatcggaaccgatttgagcgaagtgcgggaatctccgtatgtgttcagcaactggtttaaagttggtggcgcgtatcgttctgataacacaacagttgtgtatgttgatagtttgatgtccggtatggttaacttcaacccgtcattacctggtaacaacggcacgatgatggacattttcagagattataatcgctctggtacaatgttaccttctgaaaaagcatatgtaatcaatcgttgcttgaaagggctgtaccaggatatgcttacctataacgaaggtaacgtaaaagatgcgcttcacgatctgaataagatcctgaaagaagtttctatgagaatggatacctgcaaatgatttatttattcgcgttcgtttcagttgttgtattgattttcgctggaggtgttatctattatgggtgtgaccgtcgtgaagataaggtcattctatggggtatcgtcttcgcgctaatccctctattcatgattggtaatatggtgatgcgatgaaaattcgttctgggtttgtgagcaatagctcaagcagtagctttattatcgggatcggacttgttcgccctggtaaagaaaaggaagttgctgatatctacggtgagaataatattgagtcattaatagatatgatcaccgatgatactcgttcgaagtggggtgttcctcaagtcgatagcgacggtacgatctcactggaagcgttcggttcccatagcgttgagatttcgtatatctgggataagctgaaagaactggggatggacgatattaaaattgttcacttcaacgagcgcggtgatgaaccagaatatgatgatgaatgcggaagatacaattatagctggtatgaagacgccgacgcgttcgggcctgaactcgaaagaaagtataatttattacgtgataaccgcgaactgttcattgaaggcgatgtgaattgtggcggggattacgacggttaaccactggggtaatgcatgataacgatagtatactgggaagaagtcgaaagcgaaatgatcgatggggaactggcggaggttgacggggaatccgaaatgcttactgctactgaaacaatcgaaaacgctttcgatcgaatcaaagcgcatcaaaaagaaatggaaggtcgtgatattcagtacatgatgagtttctgggtcggaggcgaggcgttatgtcatgccgtaattgcggaaagcacctcagttgatacatgtcgtgaaaagatcgaacagtacgtgaaatctttcttgcattgatgaaaaagcccttgacttcggtcggggctttttgctatattggttctatcgaaaacaatgaggaatacattatgaaatatctactacttgcacttagtcttatgaccacaaccgcaattgcttcggaacctccaaccgattaccaatcatttaaagcgttatcaaaagaagaacaatgtacgtatcttccatcataccaaacgatgtatgattggattacgttatcttctgattacgatcaggtaaagtcaaaaatcgttagtgactacttgtataacatatcgaaaggttgtattcttaaacttcaactacaagtggatacactgaaacttgaaaaaatggaaagagggcaataggatgaactgcgtatacattatcattgaaaaatttacttctcctgctggtaacgttgaacaaacaacagtctgtgctgctctgaatgaagaagaagcaaagcataaagtaaaatatctcaatgaaaatgcagtcattcctttcggtttcaaaggttatactgtaaaatacgaatatactgcaatttcgcttgaaactagcccttcctggctacttgatatgaaatgaggttgaaatgaatccttatacaaaatgtgggatcatgtccctgttattaaaagaagttgtgcggttctatagtcccgttggtaaagtgtggtgtgtatctatcgggggtagacaaattggatggatccgccgtggagacacaatcaaaggctggcaccaatacactgcaatttctattatgggctgtgaatatggtgagtttgataacttcatgcaagcattgtcgcttttcatagataacgctattcgtgaaatcagttcacagggttccaaagttacaaagtacatggatactctttatgtgaacgtggaaaccgatcgatattgcatcatcaaagaagcactatacgatgataatgatgaggtgtattattacatcgtatccgatcaaaaccagatgcaaagttatatctccccgtttgaattgcgatatcaaacactaatgggattcattgaattctaaaagaaagccccaaccgaaaggaaggggctttttgttatgatgcggaaagctgtagtttgatttgctctacgtcatccgggtcatcaatgatgctgtaatagatagttactgttactgagttatcatcatactgtggaatgacttcaacagaaagattatatactctaggctcatatgtccggatcgcagatacgatagaagttctaattgattccgctgtcagagggttcatgttctcaaacagcatatcactaattgcacaaccaaagttactatcaaatggacgtgtacccttgatcgtggttacgataccaatcaaactatttcttactgctgcggccccttttgaggccgctacgtcattattccaatctcgttgcatgttaggttctatatcgctatatagcaacctcagatttacacccatttagaccacctttaaaaattgctgtaagcctctcagagagacgatatggctatgtccacacgaacaccttaccggaatgtttgcgaccactgctggcttatccagggcggtagaaatcgatttataggttgcatagtcgattgcatccaacaccatttctttatctttgtcgctgcaatcactccacatgatctgttcgccgtctatcattacgtaatcgataagatcggggatttcttcatcaccagtcttacgagggtgaacagataacgcgatcccgtcattgccgtatagcttatcgtcgaaatcttcaaccattatttgattgcgtttaagctggaattctattctttcctgacattcttcacagttgatgaacagttgacgggtatcgatatttttactttccaaaagtgccagaatgaaaagatattctctttgatacaggtaaacatcccctttgataaaatctgcattgggggtaaactctgtatgtgtcagaggacgataatcaacattatatttctcaacgtgtttatattcatgctttctcatttaacagcaccttgttttttcaagtcttctgcaagcaatgcagtataaatttgcctttccattgggctactattcatgataggttccaagttcaggccgtttttatttagcagatagttggtcttcacaaattcatccagatccccacgactaaacaggatcttgaacagggttaacataccactaaatgatttaccgcgcatagacacatcaaccgatttcgttagcatagtaacgattttttcgacatcatcaagttcgacgatatcaagaatattttctttcgtttcttcggttagtgatgtccattcatagcgctgttcgttgtatattacataactaatacattcaagaaacaactcttcgcttgtattgcgtgtacgggggaagttaaaccctaatgtgatttcatcattcagcttgtattcattttccagttgaatatcattaatcaccatgaaggcttcggagtggcccccacctttaccacctatcacaaccttgataacgtttttaccgaacgaaccacaatacacccggctgaaaatgtattcctgttctgttttggaatacccagggtaaagcagatccaacacttcatccagtatttcctgttgctctttaaggggccgaccttccatatcaatacgggtcagcattaatttaaactggtctttaactgtaaacatagggaatcgtttgatccctgatggtaatgttactcgaataatatcaaacataagatcctcaaaaggggccgtagcccctttattgtcctgtaattgcggtacgtgctgcaatggctaaaccttcctctacggattgtttgaacccttcccagccttctttatcagcctcgacaacccatgatgttttataggcaaaatcaacagtaaatgtccagatttcgttgttgttctcatagctcaattcactgttactgattttgacgggcaagcacttctgaaatacgtatgttgtatgcggtgaaccatcacgatcgtgtaagttaacctgaatagtacttgtcacttcatcaatgaaggcgtattgtcctgttacatcatcgcgaatagcggaaatccattcgttaaagattttcaggttacgggcttctgaatcggttcggaacgtcagcgacaattccccattctcagggcgagtgaatctgatttgaggtacgccaccattataaacgtattcgtacccaatggatttaccggggaggttaactcccatgatgcttaaacccatattatacatcattttatcacggaattcagctaacaactgtccatacatgctatcaccaaacagggaagtaatcaagcgggggctaattgccccgatgattttgctaaatcctgttttgttcagcgacataatcgccttatcgacggtgtaactaaacaatttactcacaccgccagtgatagcattaatgaattcgttcgggttgtttgcgttgatagaactaatagatccatcaatcaaagtatctcgaatactaccgatcgtgttgtcaaggatacgtgatgcagggctggttgcaaatacaacgctaaacaggttgctacgctgaaaatcgcgattagccatacctgataaaaattcatctacgttgtaaaacatcatatctccttagtaatttgtatcaaaaatagaatcctgacgcatatcgatcagttccataaattgaatttcgacctcaagtgagatcggggtatttggtgattctcttaatgtatttacaatattatcaatagaacgaccaaagcgaacactggtaatacctgctggcccaaaggttgaatgaggtaaacgcaaggaatccccagactggaaatcacgaataaaccagacaggaggcgatttaataacctctacgtttgaaatgaaatcaaccacgtcattacccagactattatcaaaatctgacgctgttactgggttactggaagggctaattgcgttagcggttttagcacccagaacaccgtaatactgtttaaccaatgcagcaacctctttagcagtaccgccagaagttgtgccatatcccagaacagtaaacagatagtagattttaatcagttccagcaaatcattacggctttcaatcacgaatgtattgtaatacatctttgttcgcttgtcagaaccctggaaagcggctttagtaccaacatcaagggcttctcttcggtctgccataataccgcctgaaacggattctacagcgccccataccatgtttgaaacaacacggctcaaccctttggttaagaaactatcgtttgcatcttgatagcggtggctgtttacttcgttatcgttcaggcttcgcggtagcaggatctggcaaacaggttccatagtaccaatagaactattcaacacttgtttgtacttaacattacccgtcgcagatgatagtatttgttttgggttctgtgctgcctgacgtaatgaacgatagttgtctttactaccaacaccattaaaatcatatgcagtgaacagaaggccgttattatacagactcgaagcattataagcgttatcgatacctgctgcacgttgggccggaaattcggcggtaacgatagtttgctttaatactgattctgtgattgcggcacccccagaggggataccgcgatttttaatatttttgagagtgtttatactgtcatcaataatagaaaacttcattatatgttccttatgccagcgctacgagcggtttatgctctgtgcgttgtactgaatgagttacgttgttgttaacagttttgttgttaacctgaatgttgcttgctttatcagcatccggtttatttgctgctaacggtggctgtgcgtcgatcggggcgctggattctgtacgggctgcaatcttgttttgcaattgctcgataaggtcagagattctatccttctgtacatcgtccagattgccttcattacgacgtttttcaagctgatccaacagttcatcgttaatgtatttgatatcggctgcatccagattttcagagttagcatagttggttgctttacccaacagatcatcaccctttttctcttcaccttctggcggctgttttccttccttcctcgcttgttctaacctttttgcttcttctatacgtgcgcggttgcgtttgttttcctcatcggctaatttttgtgcttcctcttcgctgcttttagctaaatcgtattgtttctgcatttcttccgttgctttcttcatattatcaagccgttctttatcagcatctacggttttctgatttctttcttgataatcagtaggagcaactttatagatagaaccattaggaatttgagaaggagttattgttaatgcatgacgtgctgcaatagctttatcttctttttctaatgccgctttttggtcttctagttcctgtttcttgatcataagaatatcttctttagtcaattcaagaccaaatttctgtttatcacgtaaagcggtgatctgcattccgcgtccggcattggtaatgctgtctatgccagttgattcacccaatgattgaataagacgaccgataccctcagtgattgccgtttgtacagtttgccccaacaacttcataggctcaacgaacaaatcacgaagtgattcgcctaagttgttcatattgaagttgttcaaaccttcttcgatctttgttacgatagcctttacgttacccagatatgtaccaaatagtttctttgaggattccccttctttcaggatatcttcgaaccatttgcgtattgtgacgcgcaacacatcgaatgtaaagattaacgaaccaataaggagcgtccatttagcaaactttgccattgcttccagagagtaaccaatgaaacggctaaggatctgcgatgtaaaacctttaatagaaaccagacttttagcaatactatccagagttttgcttcttttgtcatcatcatcattgatgcgttttttcttagtgtctacatacggatcaggttcttccactggttcaggaagcggcttatgcttatcagtattttcatataaatcaacaagtttgttaatagcatgaaaaatagattcggtgttttcttccagtttaccgaactgaccattttggttaacgtttactgtattgtcaacagtttttgagttatcatcggttaaggatataggacggatcgggccgacgaaatcaggtagttgttcggctaatgattcctttttatcctcttcgtattgttctttgaaccccgcgaatttgtcacggaatttttcttcgaacgatttcaacccttctttgatatcaagagtattgattgcactttcaagggtgttatcgttgatttcctttaggtcacgggcgctttcagcatcaagggaggctgttactttggtgaccgctggttgtttgttgctgtttctgttcagaaactttttcttttgttcttcgttgaaataagagttagccattatcattcaccaatgatgttaagccctttgatggttttcccctcatgaataatgtatacttcctggaggacaccacgcgatacctgatcatattcgaatcggtacaggcaattaattaattcgtctcgtttatcctcagttaattctactggcttaccgtcaacatatgcctctttgatgaggaacggaaggtgagcatttaacaggctgggtttgtcaaagactaaccgcacattgtcaaacgtaaaatcatagcaaggttcggagattttgaggtcatcaagatttagcccaatttctttaagcgtattggcataatcagcgttattgtgtgcatacatatggatcaacacaaattcaatttccgctgctgttagttcacgcggtttgatgtcatcaatgatgaatcgcatgatcgcaactgggtcatctttcagagtcttaatctttacaaaatgacgatacgacatcttagggatctcaatggctgttccatccggaagatgaacggttttaacgttagtcttcttgatttcaagccgtgtagtcataaatttatcaagagttttatttttcattattgcctcaaattgaacctgggtcattatttactatttagtaaataggatatattaggagggatttttatggctgaaaaaatcgtcaatcgagtcacatcgattaaattatatacatcatacgaaaaatacattgataacgcatatactgaattgctacccgctcttgtctcgtttagtgaaaagacgatgattaacggctcatcggaaacgctgatgcagatatacgacgcacagttaatctatcagcaacttatccagccgatcatacaggtatctttccagtataacggtacacaggaacaacattattacggattgctttactctaacgtagatactgacgataagaaccgttctgtgctgcgtatgaacctctctccgctgcataaaacgttcagacgtaagtttgcccgttcatttagtaacaacgccgtacagacgattacagagtgtatgacggcactgtatagcaaaatgaaactacttacccccgaagttgacggcggtaacatacgtatccctcctggatgtctaaatggtacatatcaggatatatttgattatatcagggacaacgggcaaagtgtagtttcttctgacttctgttatctgtgggaagatggttccggtattttccttaaaagttcaactgacattctggcccagacaccgatcccagcatacaaatttaacgttgataacgtgtttgttggtgatactgtcatattcacagaagcccagtatattacccataaggataacacaacgctgtttaaagatgccagtttctttagtctgtcattgactgataaaaagatgtacggtgacatactggctgatacagacacagaaaatacatggatcttcacaaaccgtaatgcaatctatgataccaactttcagaacccagattcagaaggtaaacctttccaggcgtctaaaatgcaattgttatccagctatgaacgccggatccgattcgatataaagcagggtcgtttagatgttaaggtaggggcaatcattgaggtatttggggaagagtatgcaggaaaatatctgatcgttgaatgtgttcgagacgtatcaaaagatttccacctgcaaacacttgaatgtatacaggtgggggaacctaccagcgccgctactacgaacacaactagcagtacttaatcctcaaacaatccgaggtggagatcgaaaacattgttattgacctttttacgggcctttatgatgttttcgtaatgttcgcgtggtaactcaaccaaaaaacactgtctgtcttctggagcattctcaacttgtgcttccagaagaggatagttcttaggatcatcatagtcaatgttgttatcgagatccaggataacacaacgccaaatttccggctctgctgatgttttaacagtttgaaccaatgacgcgtttttcaatcccagacgatgtgaaagaatttcatgggcgaattcagggtcatcataacggatctcttcaccattccaacgaataaggcgaacggttgcactcaatttaaatttgctcatatttcattttccttgtcatcaattcacgtaatttcttggttggcgctggagggtttttaatgatttcctggatctgatcccatgtttcgggggatacttgttccttttccatcacaactatatttggattatcgcaacacttaccaacaagaacagaacgcccacaattaaggcaaatcgtatcagggcattttccaagtttatcagggtcgatagattcaaggaatcttcttgctaccgataaccgctctttaacttcttcttcgctaactttcatttgtaattttccgctattcataataatacccttatgcgatttcgtagcacttcatgacttcttcgaataccaacggcatttctagatcccatgaatcggcaactgggtcatatgttgcttgatctaccagggaaaccggaattgcagaaacccaaccagaaccaccctgaacatcaacgcgtttaacagtcatcaacgataaattgttatagaattcttcactgaatttttcgccgccattaccaagactctctaacatttcacggttaacgagtttgatgtttttaccttctaaatctttgttgatatcgatgaagttcatgtgatgttccttttgtctgtttcgtttcgatgaacacaatataccaaacaagaacaagatagttttagcaaaaagtgctattaatggagaatttcagcagtcatcacgatccacatagacagaggaaacccgtgaatgaatacccacaacccaaaatcatcacgtttattgtaaatcaaagcagttatgaatatcgaagccgcccaaagagcagtaaacagaagataatcactgagtgtgatcatttcttcacctcaaacaaaataccgtcttttgttgccagatcgatttcggtttccaacactgccgcaagtgtccactcatcggaaccaggtaagcgcctttccacttgtccgttatccagcttccgccactgtgcgccattaacgcgagattcataagaaacgttaactttcataatcagcccatccatttacggtatttgattgattggttcattgcagagataatgccagattcttgcatgttagaagcgcaatagacttcggcaacctggatttcgcggtcatagaggtaaacactaccacgaaaagttttcaagtgagcgaatccgcaatctttaaccaggttaaggaattctgctttcttcatcatgtgagccattttgtttatctccgtgtttcgtttcaatgaacacactatacaaaaaagccccctgcattgcaagaggcttctttaacaaaaagtgctattaaacggcttctgttttcacttctaaaccaagtttagcaagcgcttcaactgccatgaaatgattttcaaacggaacttcaacagaaattcgaattgttggcggtgttggatcagtcagatattttgtcatttgacgatctttctggtttttgcaaaggatatccgccagcgcttctaccgcgtcagaattgaaatcgtatgcataatcaagtcgggattgcacataacgcatgttgcgttgaacataatccggatattcttcaacgatcggggttgcaacagccgcttcgctcatgcattcaaagttaggttttcggaaaataccaacacacttatcatcggattcgttatatacgaaaataaatgcgttactgttcatgatatgaacgcactgatacaccggatgtctgtaaatcactttcagtactttcttcacagaaggtttgataatgtgatttgtttcgaatcgggaaccttcggtcactgtcagcagagattttacttcgtcgatatgtttaccggacaggtttgccataagggttttgtgtttctgataactactagtcataatatattctcttagtgatttacgtttcgataggcccaatataacaaagcccccgaccggagtcaagggctttttattaaaatagatctgcaaagacaacatgaatatcgtctggttcggtcttatcgcgtcttatcttcttgataataggaaggaagaaactgtattccggttcccctttcttacgcgttttcgacttctggaggccgtcaacttccatttctacaatggccccaatgtattcatctttatgcgccatgatgtattcgcgatccagttcaccacgttcatctaatggaatgtatacacgggtaataccatcatcatcgtaacgataatcggtatcagttaacccagatccggtattcgttcgagccattccggataaatcttccaccacaaacccgccgaccttatggtcttctttagtgtgcgcgtagatatcaatgatccgtagttcaatcggggttttgtttttcagcttaacctgatcggctactcgcgaatctttccatttgaagtttctgtttttgagaatagaaccttctttaccgtcattgcggtaattgttatagtcctgcttcgcttctgcaatgttattaaccagcttagactgaatcaaacgaacagaaggcagagaaagatccaggaggatatcacgcaacaggctaaaccgctcatcataagtctgaacactttcagcttcgccgtaatacacctcatatggaataatatcccaaacaacataaacaatgtttcgctgttcttcttcggtgatcgtccctttcagagatttgtttacgatcccgttcccttcttcgcgttttgcttcggcctgttcttcttctggggtcgatactttgcgaacttcttccgcaaataacgcaatgtcgttatcatcatcgtccatgaaagcagataaagaaaaaggcatgtctgtttcaggttcaggtaatgttggtacggttccggaaggaacataaatcaattctccatccagaactacatcatatcccagataatcgcgaatctttttcagatcgatatcaagctgagttaacccttcgtactcgttacccgctctcgataccttacggtttaatgcttccagcaaatcagccatacaacgcgcaccatcggctttaagctgcgagtaagcagggaaaatgatgcgacgtaaagccttttcactaaacggcgtagcgaggcattgaggctgttcaggaatgagtttcttccataccctgtttggtaaggttgtaccagcaccacattccagatcgcggttaatgatacggcgtagcacttcacgatcgttaatgttcactgatgatacaatatccagtaaacgatcacgcgctgcattgcctgtatatttccggcttgctaaatcttctagcaatgctttgattgcatcggaaagcggtgttgttcctggtttcccttctactaaagggaactggcgcacataaaacataatttgttttgtatacgtaatgcggaaaacttctttcaacaattcattatctgcattacgttttaaaattgcttctttctctttagttttcagagtagaagcaagttcattaaggattgacaagatcatttagtttctcttcaatttcaaaccacgattttactaactggtgaggtgcatttgtttcttcacgttcaccacgtaacatatggaataacggcaactgactaatgacgttatgacattcgtttaagtttatcgcgagatcatcgacaaagcaaaccagacgattaccatactttgctttcgcttccaggtaacgatgagtttttgtttcaccgtggcccacgaccatcacctctttaaacgcagaaggaaaaagagtattcaggttagcaattcggttaaggcttgctgttggtgttgttcccagagcggtaacggcaacgaaatcatattgcgttttcagacggttgatcacaatcaatgcatcatcatacgcgttcagataacgaatgaaagaactgttattgtattcttccataaggattttagccaactgctgatcacatccgaagatttcagtcatatcacgaaatttttcatccgtaaccatttctaatgcaatatcagtaggcatgttgtgcttagacaaaaagaacgggaggccgctttgccattttacggcgatcccgtcaatatcggtaagaataacaggtttcaagatataacctcataacgatcaaagaaaagggtacttttgaatgcgttcaattcacccaggaaataatcacgctcaaatgtccgataatattcaaattcgatgcacaacatatcatcatttgttacaccaatgccaacgacatcctgatgatatttctttgcctgttgaagaacaaacggatcgagatccgaacaatcgaaataaactacgtaactcatatcaacccttatacatataaacagcatctaccccagcatcaaaatcgactttatcaaagacaacgccgtttgatgcacattccttaacgtaggattcaataacaaccatgttatttgcgccgatggtaacataatacacacctgctttatagataacactctgaatcaacgttgaacgtaatgcatgttgcgcatacattaacgctaatggattaatcgcgcctttgaacaggaacacgcattctactctttctttttcactcataacagatctctcaatcgggttaaatttcggacaaactcacgttcagtgagcaccgtttcattcatcttattctttcccattgaatgtgtcaaggtactttttccggttgctgccagcgcacggcgaaacccttcattaaggaataacgcattatatgcgttttcaatcaggatttgatacgcctcagaggaacgatgaatagggatacctttccagtataaggtctggttagtccaccattttttctttttgcctttgaactttgcggccttgcctaccagagtacatacatgggcttgcatatctgggttgctgaatttaaggctttgtaaaaagccctccattgatgcacattctaccccgtcaaacgtaaacggatgcggagcgaagttgcttaacgcgcatgatgggtactgactacccgaaccaatgtccataatgaacccccgccgaaaatattaaatcatacaaaccgcgaccgatgataacaccaacgataattgatacccatgttttccaattatccacgatcttcaccttctttcttcccttcctggcgagcgcgtttgcgtcccgcgcgtactaaagaatcatagtacggacgtttgcgatcgatgttttctgtacgatacgctttaccaaaatgactcgttttgaatccgtagtatttcacacttccacctcatgggggttattgtgcaaaccacgggccggatcataacgatcataagttgtttcgtactctgatttaatggatacatcacaacgagtgttccattgttccagagcgcttttaatttctttcactgagtcggtgaaaaattttacaatactcgccatacactaccaccttcataaaatgcatttagtttatgtaacatttcgacacgggctgattcttttgcggggctgcaagataatgttagaaccaacccaacaggacaatcaaacgcagtatcaatcgttactctttccagacgttgcccgtgatcacgaatcattttcaaaaaggtatcagataactcagtattttcgtattccactttatatatgaatcgtgccatagttaaccccttgcacatgaaagataagaacgcttcttgaacactttaacttcgtggcccctaccgcttgcagcagtgttaagagtttcggcgtgacgcgcaccaagtaccagagttttaaccggagtaaccggagcagcgataacgataacagcggcccaacgagcaccaacagctttatcagtacccatatcgatagcagcagaagtatttttaccagccgccagaacgtaagcacgtgcttcacgacgagttttgaagaaaaccagttcattcatgttgtaagagcgtttcataatgtcatcctcataaaagtgttttcttgtctacgggattaactataagggaatgtgagaagggagtcaacaactttttacaccaaaaaagaaaagccgctacctttcggcaacggcttgatttttaatacttttcgtcaggctgaaacaccgcacgacacgcccacatagaggcttctttcagtcggtctttcgccagttgaatttgatggatacgttcaagcacctcatctaattcttcatctatcagcgaatcaatatctgaatttgataggcgctgttcgatatcttccaggattgcacctaatgcattttcagcatctttgatacggtttactgtttctacttttttatcagtatggggtttataacccgtaatatcagaaattgccattatagactctctgtaaaggttcgggcgataacgtcgcgttgctgttcaggggtcagtgagttaaaacgcactgcataaccagaaacacggatcgttaactgtgggtatttttcaggatgttcaaccgcatccaggagagtttcgcggcgcaacacgtttacgtttaaatgctgtccaccttccaccttaacagttggttgatattcgatctcaatctctcgcttttcaaacggagtaacgcgagctttaccgatcacagaatccatagttaatgtttttgatactacgatccgaacgtcgttaccttcttccagatagatcgtaccagtatgcaaaccttctaaaatttgaaatgctttcattgtattacctttacttgattacataatacctgaacgggttgaaatgaaacgccagcattgcacgatccaggttaactgggtcgctaacttcttgtttcagtttccatccagcataaacgcgcaaacagaattgcactttgtggatccgtagccacggtttgtaaacgtacaaaccccatgctgattcgttccacatgagcagatatccatgatttacggggtttggcccaccttctgtttttgggttgcctttccagttgaatttgcttgtcgcttcacgtcctaaaacgtgatatgcgaagttataagccttgtttctccacaaccagccaacacgctgcatgtataccccaaaaccccccagatgatagcgtatagacgcccaacggcggatatgtccaccatcaccatcaatagggttatcgaaggtttccatccaccggaagcctttaggaagatgccctgttttctcgttgtagaacggtacaacaaacggggcaaacagaattgctaatactccagtaataatgtcaagagggacgagtacgatccaacttgcatactttaaaaagcgcatagacaccccaaaaataaggctatccgaagatagccatttgattatttgtttgtgctgatgtatacaaatgattcatcaaattcactgctaactgcttcatttgtaaacggaatttcaggatttttgaaaccaccactgataagatactggataaagaataccgaagtatcaagagaaatcaattggtgattgctcggagatatatttgttctacgaacgaggttgacaatctcccaatcaaagaatcgttcgctatactctttcttactattcacttgcggcgatgcaaagaacccttgtttggaatatgcctcaagcgctttatgaagttcagaatcaaaatcatcgaactcttttacaaaaagttccatcaactttttattgcgattcgttggattgctttctccgatgatttttctaattgtcggagacattttaaacagtttttgtaaatttttcatgttatctctttaaatttcgtatgcagagtcaatacaagattcgtaaagctgttctggcgaattctcaatgagaggcgttgttttaccaaaaatatccagatcgtaaggatcatcatccacataacattcattgaatttgaagttttttcggtagtccccatcgggcaatccatctttccattcattaaatgtcatgccataacgttctttgaattttgcgggagacatatcaacaaaaatctgtgtatattcgaccgcgttatggtatttcacagtttcacgaaatttcatataaacctcattaaaattagtgggctgggagtttctttacttcaccccgcattccggggaacctattaccggataccaacagagcctttcccgtggataaggttgcatattccgaaccatttaacggcattgcgctacgcacccaaatttggtggcaagggtaggatttgcacctacaaccaacagaatcagattctgttcctcccgcttctctaagtgccttgccttgtttggtggcccctcccgtgacttgaaccgggaacctaaccattatgagtgattagctctacctattgagctaaggggccaatatttttagaactgtttgcggtagatttcgcgaacagccggatcaacagctttggcgtatttgcatacatcctcgaactgtacgatgtattccattacttccgaagcacgggaattcagttttccctggtgagcatcaatgatcattgaagtcattacatcgatgcgggtcggtgcttcgaggatgtcgcctttgtcgaaaagttttttggattttgcgacggtatcggcgatgattgcttgaatttgtttagccatgttggatctcttattcgtaaattgcttgaatcgctttatagtgtgcggttacatatttaaccggatacttgcgagcttcttcttttgttgcctttcctgcaatcagttcaggatccggcacgtttgccatttgtgcatgaggaagcggtacgcgcttacccataagcagggttttatattcttccggtacatccggcccacatgataacactgtgccgtagatcggttcctcgccgtgttgacgaacaccagtcacaataccagaaggtgatacaatttcagttccagccgctttagcgttggtttcaatcagaacatattcaaaggatgcttttacactcagttcagacatacatttactcattggttatttgatccggaaatgtttattcatttcttcggggtcaagttgtactacttcggcaccgtattgctgtagacgccatatccactcgatgccaccacgatcgtatttatgtagatatactacacgcttaatcatacctgttgcaacacaaaattcgatatttttcgcacattgtgagcaaggggaatgagttgtatacaaagttgcgtctttgatttgttcatgagacgccgccagcataataacgcgcatttctgcgtgtacttcgttgcgatctgaccattgtgaatgttcagggcgcttttcttcactcagtttcccgttatcatctaataagtgattgcactgatctgtacaacgatgactaggatcaaccgtattatttgcgcctacaaacacacgcccgttaccatttctcaacgcagcaccaacattaacggagacacattgagagaacttagaagcgcttattgctctaagcataaacataatatcatcaatcttcatgatacaccacgtgataaagaactttccagtaaacttgaatctttctatcatccaacactcgatgatgtgcagaaacagaactaatcactactttttctggactcggacgaaaacaacttgtgaattttcgaacaagacaagcaatgaaagtatttgggttgtcgatttcgtcaacaatagtattaacatttacttcaccgaaatgacaagggatatcatatgcctttaatgcttccaggagaaccatgctcatagagccaggatgatcaagcatctttcatcacctttagtaactgtttgataaaatcaggagtcgcttcaacgatatattctgaaccgttgattgtagtaacgcgaacttctgtttgatttttgttgatatcatattcagcgatcggacttgttactacatcaatatcagttcctttgatgtatccgaaaacgccgccataataacgaggatccgggtatacagattcgtccgtgatcatcgctctatcaataatttttacgttcataatacaaccgcccatgtaacgtagccagtaataggatttaacaccagcccgaaagattgggtgctgttagtatccacgtcatgaatatacacaatgtacgagtactgagaaaccggagtggcgctaacttcaaacccgcctggtgcttttctctgttcctggattttgttagcaattttttggcacaacaaacgaactttttgattaaaatcgcccagattttctacgcgaatgcgatcgccaagttcaaccatgatgcctttatcttcacgaataacgttcataatgtaatcctcttttgtgtgggtactttaacatacccacattatatgtcaatcagaaatcaccataatcgacttgtaagcacggaatcccgtttgctcgccacattccgaccggagtgtctctatcgtccactgcaataacaggataatacttatctaaaatcttgtcaaacaaaatttcttcttttacttcaaaatctgtcctggtatcgccttcttgacgcataaaaatttcatccggttcaacaccataacttaacaggctaacccatgtatcatgtgcgcattgcggattaccttcacgcccagatacaacgatgcatttataccctgcatttttgtacaggtgaaacagttgttgaatcgggatgtttggcggatcattgatcactttggtaaagtcatacgggctacgttgccctacttttgttagcgtaccgtcaacatcaaagatcacacacttctgattgtgggtattgacgatttccattgctggtacgaacccacggatcttacgatactggttaaacatttcccaaacacgcgaaacgggtaatgcatcacgaccgcgtttgtggttacggcgaagcaattcaacaatggacacatcaaaatattcaatatgaaaatctgccttgtgttccaatgcaatttcacgccagtgatttttatcactttctttcagatgcgtgttgtggatgatcacgtttttaccatctttcagagtggagataacaacgtgatcctgcatttctgcaatcatttcttctttcgctttggtgtatttgtatccgccagcacctttaccagcattatacaaagagctacgcagatcatcgcgagagatcgtaacagtattacccaattcacgggctttctcatgcgcccaggtagtttttccactacccggaacgccaatagtcataaacagattcatttcactatctcatattcaattagttctttgttatactcattcgtaagattgagccacatatcacggttccaatcgttttctatccatagaccttctttatcctttttcgcagtataaacttttccttctgttatgtcacgaaaaaacgttttggttattttgatttgcatttctcagggtatcccaacgtacacagaacattatcggtttgatccttttgtcttttaacgtcattcatccagctacgtaaaatcaatgaatctggatatgtcaatgcaacataaggattaccatcatatggcattacgaggtattgtttcccgtcgatttctctaacgtctgcaattactttccattttaccttcactgggttaacctttgcgggtagcgtaggaagtaccttaacaggtggctgttcagcacaaccaacgagaaaaacaccaagtaatactatcattgctaatttcatttttcaaattcctgcatgtattcgtcgaaggatttgttgattttgatttcaatcaatccaggtttctcaaacaaaaggtgtttgcgccctgcatccttgactaactgctgatctttggatttttgttccacgtagataacagtattgcttgtatttgtctcttttactttcttcacatcatcttgcaaagatttgatatccttacgtaacgatgcgttttcgattttggtatcgactgcaatgtaaaaaagggctatcaaagatagccccacgattacaggccatacccaagatgatatcttaggcattatgaacctcatttatattgttcaggaatgaactgatcgtaatttttaaccatcatttcaatgatgcgatcgaccagtttttgtggatcggtttcttcgaagtacttcataagaggcccgaagatgatccgaccgtcgtttgacaaatccgcgcttagactgatagcaaaatctttacgcgatttccctttattatcttcaatggctttgaacgcttttgcactcaaacgattgagactatcaaggaaaagtttttcgaaatcgtcaatctttttcagagagaccagatccgaactgaatagctgtttcaggtcatcgaccgtattctcaacaatatttaggaaaagatccttattgttggtaatgctatcttttgtgcgatgcagattgacataccagtttgttttgatttttacaaaccctttcgttgtcagaacaacatagccttcgaatccttcattctgatatgcttcttttgcgaatgcatccagatccagtacttcgatattctcacgcttaaccagatacgcacgtaacagcgcgtcagcaaagagttcatcataagggatgtattcacccgtgatgttgtgacgaacgttcaggatacgcagatcaggagaatcataaccaacgacaatacggtttttcggggaaacgtattccatgttcaccgtatagttttcttttgcgatctcagttaagcgggtcagcaattcacggtttgccattaacacactttgtgcatccatagcttgttctgatttaaccgaacctttagacttgaccgccagaaatccaccgtcaaggaaagttgagatcaaggaaccatcttctttaatcatcacgtctaaaacttcgcctaattcaataggagactcgttaagcgcttcccatgcctttacctcggcatagttaaaaaacttctccatagggcggctgatgattgatacgggggtatctccatccatttcaaacatgataccgcgacattccagagcaccaggctttagccagtctgtatatgaggccatgcgatagttaaagattcgaacaggtgtacccatcacggttacttgatcaacgaagaaaaatgtttcggattcaccacacaactgcatgagttgtttgtaaagggtattgataattttagtttgtgcctttgtcatagtgctgtttattccattcagggttgtattttcgtatcatgttgatttcataatcatgatatgtattttcatcgtgagtagtcacgataagtttcacagtttttcgttttttgatagccatttccaatcgacacgtttttaagatgttgctggggttggcttctctccaatactttgcattgcgatatgtgtctaaacgcttccacatatcccgacatttaccaacatatactatttcatcgttaattgcaataaaataaacacaatgcctaagttcaccacacttaacaaaacttcgatcgatgcgaccacatttatcaagggttaagttgaattcagatttcatacattatatatccaaaaagtcaagtgatcttttcttaccacacaaaacattaaccacatgcgcgatgtaatcaccgtgacagggaagaggcgcacaagtacaaccaagcctcttaccatcaagttctttcaattcttcaatcgtgatcgccccagtacgaacctgattctggaaccaggggataaactctaaaatgttttctccccttgttcctgtgtgataagggttgccgaacttcgtacctctttgaatatcgacatcccaatcagttttgtacttgtttactacccgacaatcacgcgtatttgctggcccattttgcatacgcttcatcactgatttcagtattcaagtttccgacgaggtaagaacttacttcaacctcttgcggggcaacctgtacgttatcacttttgagccatttattcatccacggatacgggttagggatcggggtgaatggtgaatcaagccctaccgctcgcatacgctgatctgtaaggtgttcaatataagcgatagtgcttttcagcgatacaccttctacatcaccaacagagaataaatgttcagcccattctttttcctgttcatatacttccaggaaaatcgccgttgcttcttttttcagcctacgggagatttcaaccatttctggatcatctttacccatttgccacaaacggattttactctgagtacctttctgatgcaatgcttcatcacgcgcaatcaggcgcataattttagcgttgccttccatcttgccctgttcagcaaagttaaaggtgaaactaaacgacacatagaaacggatcgcttccagagcgttcacagcgtgcatacacaggtacagcgcttctttgcacttagtggcctgtttagcgtattgctcgttataatacacgacagccggatcatttggtttataaccgctaacctgttcctgtagcatcatgatggttttcagcttatgacattcatcaatcagagtatcataataccgtgtcattgatgcggaacgtttcataatcgcttcattgcgaaggatttggtcgaactgtacagaaggatcgatgtgtaagttacgttgaatatgcgtgtaactacggctgtggatggtttcactaaacgcccacgtttcgatccaggtttccatgctcacatcggatgcaattggcaaaaatgcgaggttaggcccacgtccctgaatggtatctaacagggtttgatactgtaggttagaatcgaaaatgattttttcatgttcaggaagttttgcatactgcatacggtcagtagacagatcgacttcttccggacgccagaagaaagaaagttgtttttgcgtcaggctttcgaaaactttgtgtttctgcgattcataacgtgcaacaccagtatcttcaccaaaaaacataggttgatctaagtggttatgatctgggtttgtattcattactgttaacatgtctttacctttaaaaagcccccgaaggggcattaatcaaatcttacaacccgcgcaatcgtcggcggcttcatcttcatcaccagcaccatcacgcgtattatgatagtacagggttttaacaccgtagtagttagcatacagcagatcatcaatgatgtcttctgttttaactttcccgtcttcatagtttgccgggtcatagttggtgtttgcagaaatagactgatctacaaacttctgcataactgctacgtgagacagataccctttgttaccgcgtttagccatatcccagagcagatcatagaaatcaatctggttattctggttcggcacaacctggttatagtgtccttctttcgaagatttgatactcactaaaccgcgcggaggttcgatcccgttggtagagttactaacctgtgaactactttcacaaggcattaaagcagaaagagtagagttgcgcaagccgtatttcttaatctggctacgtaaccattcccaatcgcaattataaacaggtgctaccagttcatcaacggttttgcaataccaatcgataggcagtaacccgcgagcgtatttggtatcgttgtacaatccacatgcaccacgttctttcgccagttccatagaagcaacgagaaggttaaactgaaacgcttccattagctcatgaactttgtctgtatacgcttctgagtagtcgcaatagttgcttgctaaccatgatgcatagttggtgataccaacacccagagagcggcgctgtttagctttcagagcggcttttacagggtagttctggtaatccagcaggttatcaagcgcacgtactgcaatacgtgtgagtttcgggaattcgctgatatcagcgttatccagaacgatagccattagcgtacacaatccgatttcaccagccattttatcatcgtcatccagcggcgacgttgggatcgcaatctcacaacacaggttagacatacggacaggaaccgtaaaactaccctgttggttgacgtgatgagtgttgaaaatgtatttgcgtcctgtctgtgcgcgttcctgtgctaaaagttggaacaggtcaaccgctttgatgcgttttttacgaacagttggatctttttccaggctttcatacagttcttcaaatgcagtctgatcagcttcatagaacagatcatacaggcgatcgttagcaacatccggactaaacagcgtaatgtaatcacgattcattaagcgtttatacatcaactggttaagctgtacaccataatcaagatgacgaacgcggttttcttctacgcctttgttgttcttcaacaccagaaggttttcaacttccagatgccagaaaggataatacagtgttgcagcaccaccacgaacgccaccctgtgaacaggatttaacagcggtttggatatgtttccagaaaggaatcacaccagtatgaacagcttcaccaccacggattttagaacccattgcgcgaatatgtcccgcgttaaccccaataccagcacgttgtgaaatatacttcacgatcgcagaggttacagcgttaagagaaccaagagaatcacccgattcaattactacacaactggagaactggcgcgtaggagtacgtacacccgccataattggagttggtagagacagtttgcgatcggaaatcgcgttataaaaatcaatgatatgcgtaacctgtgctaacccagtttcttcctgatgcagacacattgcaataagcataaacgcatactgaggggtttcaaagatttcgccagtatcgcgatcctgaaccagatatttcccgattaactgttgggaaccagcatacgaaaattcaaaatctttatcatgatcaattgcacgttcgaaaacttgaatatcttgtttgctgtatttttccaggatctctttatcgtatttacccgcttcaaccattttaacgatgtgatcgtagaacgggataggatcgaactgaccgtaaacgtctttacgcaatgcaaacatttcaagattcgatgctacgtattgccaatctggttctttaacagaaatatgatctgctgcatacttgatagcgatacgttgaatttgtttggtagtcataccatcgcggatcagttctaatacattttcaaggaatgcacgaacatcgatattatgaccatcacaggcccacttgagcactttgtatattttttctttgtcaaacggctggcgtacaccagaggattttactactactttaatgtcattcattctcttaccttgttaagaaaggggccgaagccccatttttcatactgccatttcagcttttagagagccgtgattatgatacccttctaaggttatcgagtcaaagaattcttgatctaaatcaagtaagctatttaccttcggcatttttagaatcggtaatggcattggtgaacggttaggctgtaaaagttcttttgcctgttcaaccgcatttttatagatatggacatcaccaccagtccaaaccagatcgcccacttcgtacccgcaaatatcagcgataatatgcgtcaggagagcataggaggcgatattgaacggcaaccctaagaagacatcaactgaacgctgataccactgtagagacagtttaccgttgattacaacgaactgaaagaaacagtgacacggacgcaatgccatatcatcaagatcaacagggttccatgccgaaacgatgatcccgcgatcgtctggggttgatttcagttgttcaatgacttttgcgatctggtcaacaccactaccgccataataactatcatcatccccataaagagaaccaaacgaacgccattgatgaccgtagattggccccagataaccagaatcgtatcctaaatcaatagcttgtttttcatagttatcatcccagattgtgcgcttatcgctattttcaccccaggtcatccggcgaagttcttcaacgttggttgaaccggacaggaaccattgcaattcatgcttgcacggtttgaagaatagttttttacaggtagttgcggggaaacctctgtttagatcccatcgggcttgtgcgccgaaaatacgaatagtacctacaccagtgcgatcagttgattcaacaccgttatcaagtacaagtttaataatatccagatattgtttcattttatacctttttatatcgttcaactacgattttttcaatgcgttcatgttcttttatgtactgagtttttaaatcagaaaattcatattttaataatgcgccacccagttcagaaagagtaaatgcaacatcacgtttaaacgctggtgcgttatacacatgatgtccgtaaatgtttgtcaaaattacttcatcaaccattttattattgattgaatctaaaagcaaccccttaccaccgatgacacatacatttttatctgggtgtgttgcttgcattgtaccaatagcagcagacaacccgccaccgtggatcacgtaatcagcaacgtcgccttttttggttttcaaaaaactacctgaaccagacagaacacaatggatcctaccaggaagtttacccggaagagaggtaaacgtatttgcacccatgatcaaaacgctatctgcggtttcttctttgaagttctgcaaatcttctttacagtggccccacggcaacccttgctgatatccaaaagcgaaatcatcgtgatagatatcaattcccaatgcaaacaccgcttttactatgctcatattgcgatccacattttgttgtcttcaacagttacaatatagcctaatgcttcaatcataactttcagtttttctttgtacttctcatcatatccgcgaatcttctcgaattcaacagagaaaatactacacccctgatattttgcattgatcacgcgagattcaatatcaaaaatcatgatatccagaggacaccaatcaacagagtgaagtttttcgcgggttagtagtgttgtgttcttagggagtttcattccgtttcctgttcattcagccatgattcgatacgagatagttcttcatctcgcggggtaaatccatatgatgcgtcgatcatcccaatctgatcccaaacatcaatttccaggatctcagtcactggaggattttgtgagatatggtcacgacatacagcaagagcggtattgatggattcggtgacagtcagagtgtcaccctgtacagatacttgaataatcattcagaactccatgcatttttcaaagtaaatctttgttgggaattaataatcgtagcgcgaataacagcaagtttcatttcttcaaatttatttcgcgtcatatacaaaccaatcaaaggaaaatagagcctttcccattcgtaagtgtcgcttacttctttaacagcattgattaaaatctcagccatttgaaaatcggtaggaggaacccaaccaagattaatataaatccgtttttgtgtaccttctttcagattttccaaacgtaaccatgttggacaactcataatattttcctcaaataaaaagggaactgcgttaacagttcccattatagttcatttgattaataagtcaagcgccacaattgaattgctgcatcaacttccttcttgatatcttccggagtgtctttgcgctgtgctttgactaacatagtcatcattttacgaatagtgttgttcatattcgctttctcacgtgctgcatgaacagcctgtgatttttccacttccggtgtatctttcttagccgcctgtggtttggtaggctgtgcgccgatttcgtctttctgtttcggtgctttttgctctgcttccttcttcacatgaggtgcggagaatttacccgccttgaagttagaattcatttgatctaaagcgctcttaacagtgttccagtcagagatcccacgtaaagatttcagagtatcagtgagtaggctaatgcttgcgcctttggtatcttctgcgatatcgattcctttcaaccactcaatgtgtttctgaccagagtacatgaaatcaaagctactgaatgagtagtatgctttacggtttacaacaatacgcttgaagttgatagtaacaccagcgccgttatcaaattcaacataaccgctggtaggcattacacgagcaccaatatctttgagtgctgcgaagtattcctctttaccaatacggttaactgtgcgcttcggcttctcttctggttttggtgcggcttcctgagcagctacacgtttaacaaaagatgctgaacgatgtcccgctgcaaactctgcgttcatcttatcgatcgcgttcacaacgccttgaacactcggtttcagtttctgcaactctttgaacgtatcaacgatcatatccaggcaagcgccgtcctcatcttcgaacatagttccgcgaagttgtgcagccggacgatacttagatacagcaggatcatacaccgcgctaaacacatacgcacctttacgcatgaatacgtgacgatagaaacgaactttcagtgtaccaacttcaacaaagatatcgtttccgctaacgtcagcgcctaacagcttacggaatgacgccaggtagtcagcacgtttgtatttgatatttttctgtacagggctgaaaatgctttccagttttttagacgggaacaggctttccggagtgatcttgtctgggtttttgccccattgataatcacggcttgccattttatgttttttagttccaaccagtacaaaggtactaacagaaacgttacccagtgcagatgaatccggagcggctaacccttgtccattcggaggggtgcagttgaaaccgaaatcaaagtaagcatcaccagaagtgaaacggaacgaagcataaacaccgtgactaccttttgttacttcctgtttgaaagtggtaggcaatccagtgtatttggtgaagtattccgcaaattcctgtgcgttaaatttggtgctgaaatagtttttcgccactacaaagtaagcatcaactttttcttcccattctttcttttgacgtgcataacgtgcgcgaacatcaccagcagtctcagaacgtgcgccactaggcccagtttttgtaactacgtcgtaagcctggttaattttctgcattaattcattgctaccaccacggtcggggtgattgcgtaaggatgcacgtttgaagagtctggacatttcagcgctggtttcgctaccagttgcgcccaaaactttcagtgcttcctgataagtcattttggattcagtgatcatttattgttcctcaaataaaaacaaagcccacgtttcgttacatgggctactttactgtatttatggatttcggtcaatagattttttcgaggaaccaaacagaacttttgttgttcttgattcgcgtcaactctatagggttatctttgaatgcttcttcaacatctttcatagtaactatatgtttttcttcaagaaaattgttgtggagataaaaccgctctatttccggagcggtttctaattcaaaagatttttctaataacataatttcatcctcttaaataggggtatctaacggcccatcaaacaagagatatgtttatgaactataacaaaatttataactctatcatagaacatgctaaacaaacgcagtatgatggatatacagaatcacaccatatcatacctaagtgcataggtggaacagattctgatgataatttggttaatcttacagcacgtcaacattatattgcacatctgttattagtcaagatgcacccaggaaacaacaaacttgtttttgcagcacatatgttaacagttggttccaataggtcaaaggaaagaacagctaaccgtcgctatgaatggttaaagaaaaaggcgtcagaagcacataggaacagagagttcaccgaagaaaccagacagcgaatgagtaaagccaaaaagcaacaagaaagggttgtatgtcctcattgcggaaaatcgggtataattggaaatatgactcgttggcacttcgacaactgcaaactgaaaccaggtaatgaagggttgaaacataagttcgagggtatcccgtgttcccataagaacggaaacgtacctaaagaacggggcaattgtccatattgcggaacagaatcgtcattacattatctgcgttcacatataccatattgcagaaataacccaaatagaaagacgccagcaaaaaggaagcagttgatttgtccatattgcaataaatctggtgatgccagcaatatgaatcgctggcattttgataactgcaagtttaagacttcttaacttccattttagagaatcgaccgacttttgacataacaatatgtcggtcgaaatcttccggatccaaatcctgatgactgataacaattacgttaccatttatcccatccaatagtgcttttacagcaaaactaccatcacgatcaattgcaccatcgtacacttcatccaggatcagaagggataaatcaacaccagaaattttactggttacatcgcgccaggtgaacaataaagcaaggttaatacgtgctctttcgccttgactgaacgatgcgtaactaaaatcattacgacccagcgatttaatcgattcgttaaattcgtcatccagagtgaactgataatcagcacccaacagatccagatagtacgcaatctgtttattgaagtaaggaatataacgtttaacgatgctcgctttaacgccggaatctttcagcagatccgtaacaatacctctaaaatatttttccttgacaaatccagaacgtttagaatcaagttccttttcatcttcacggagtttttcaactggggattcgtcgatcaccacgtcttcctgtgctttatccatgacagcccgaacacgtttagccgctgcaacttcattttgaagtgtaccgcgtagtgattcgtatttggatttcagcccatttagtgtacgttgttgtgttagtaaatcatccatgattttctgtagctgatcttgcttgttcttaatcagcgtaagtttctgagtaccgtttttaatgttctcggcaatttcttccatgcgttcaggagtggggctaattggctgtttacaggccggacattcaccacccttgcgatacatcacctcaagacgctgcaactgttctacgttcattgagaggcgtgtatagccatcacgcagtttttgaatatttgctgtttggtcttcaccattgatcacgcattctgcgatctgggtttgaagttcaactaattgcgctttaatctgttttgctgtttctacgtgggaatcgtagatatcctggtaacgcgccgtattctgatttgcttttgcccgttgttcgtcaatgaacttttgatgtgttgcgatctgctgttgtacgtgtccaatctgcattgaaagcgtatccagttcacggttaacaccacggatgtatgatttgtttagtttgtccatttcactgataatagacagagaaagcaaatcttcaaccaatttacggcgatctggtgttttcagttccatgaaaggtacataaccagcagtacccagaacgataacctgtttaaagcccaccaggttaatattcaacattgattcaagctgtgactgataatcaccagcggctgaatcttccggcagtttttcgccattcttccagatctcaaatactttcggcttttgtccacggatgattttatattcatcattgccgtattcgatcaacagttcaaccagacattttttcttgttgatactgttcaccagttgcccgactttcagatcgcgaaatgacttaccaaagagagcatatgtaagcgcttcgatcatggtggatttaccaccgccgtttttacccgtaatgagggttttctttgctgaatcaaaatcaatgacgatcggtacgttaccgaccgacaagatattttgataagtcaatgttttaaatttgagtttcatcaattatcctttgggatatatcactaatcatgtttgtaatcgtgctatcaaagcagtatatcacggaatcttcatccatgctattcaggacagtaaatgtccaaacctttgtttcgtgatagttgtctttaatcagagtgaaccccaatgacacatactcattataggaatcctgctgtactgcaacaatcacatcaaatccaaacattttataaagggctttatatcgcccttcttcgtttaaaatattaacgtaatcaactatttccattgctcgtaacctctgcatacaatgcactcattattgcagatacttcggtcttttcttctggagtgatctgcatgttgttgatgtactcactaatcaatccagatacgcttttgatttcaaagtcagtatcaacttctgaatcagtgatcacacgatcgacaatgttcaactcataaactgtttcttccagttttgtttgaaacttaggcaaatcgttatcaacttcgcgaacaatcaaacgaacagagcaatttttgtaatcggcaacatcaacatctttttgatccggataggtgatccggcgatggtggcatactgggttagcaatgaaagttaattcacgtttaccttcgccataagatagctcatagaagcccctggtttcgtcctcatcgttcgcgctcatggtaagaggtgtaccgatatagaaaacgttagcgccttcgttagcgtgatgatagtggcctgaatacacgatatcatatttctttaagaaatccggttcaagcccatgatccgctttactgttcttatagaaatagtatccggacagttcaaagtgtcctaagcagtattgagattttgactttttgatgaaatcaaaaatctgctgtgtattttcttgacaaatccacgggatcaaatcgattgattgtagcggagaagtatcaagatttactgtcatcggttcatcaacaacagtaaagcaatcatactgatcaagaatctctcgcggtgagttagggcggatcttgtctttaaactggcaatcgtggttcccaaccagaacatagatatgtaatccggcttcttccagtagtggcacaatacgttcacgaatgaatttcatcgtggtttgtgtggtggcctttcgcacatcaaagaaatcaccagcatggaaagcctcggtaatgccgtttgctttgcagtgttctacgatttgcacgaatacattgtataggttttcttcattccaggggttgtcctgacgcaagccagcgtgtgtatccccgatcattaagtactttctcataagaccctcatagcccctttcggggctacttgtttgttagtgcttctgttgtgaagctacgatatttcgaattgatgccagtgaagtgttccacatcgtatcaatgaaatcctctgtatacggctgtttgagcatatcacgaagtttcttaaccgcatacacatactgaaccttattacccctgaatagggcttcctctgcgtgtctacggaggcgtttgatctcagtccggttcttcttaatgaatttttgtgctcgcttcaatgcgtcggcttctacacgtgcctggatcttttgtctaatttcctcttccggatccacttcttccacactggttagtacttctttctcttcatcaatcataagtgatctccatgatcatagtttcggcgtttatcatataagacaaaaccccttcttctacttcgaaatcggggtttcttacgtcagttggatcgatgataaccgggattcccacgttttgcaactccaattttacgaagtagggtagcaagtcaatttcgtaatcgatatcagttaatattttgtttaagtcaattattgctttcatagaaaatcttccaatgttgggaatacttccgcttccttgtctttggttttggtggcggaagcctcgtactgagatagtttgtcatgtagatcttgaatgaaaccttcgtctgcaatactaaccatatctgaatcttcgcagtcgtaaacgtgctcaaggaagaatttatatttcttcgcgttctcttttttctcgtacagaatacgtgttacgaatgcttgccaacatgctttgttaatgtaaccgtaaacgttggtataacgagtttcatcgaagttatgcagtcctgagattgcagcggaaattccgtcatcgatcatatccattttccaatcttcggaataacggttgaagttgtaacgacgtgatagcccgtttgcaatatccataatagcagcccccaactcattaggcattttgcgatcacctgtttcggcgatttgctttttccatgcacagaggatagggtatagtttttcattgtctgcgtagatattggttgtttctttagtcatagtattcatatttcctctttgaagttaagaatattatataataactgtagacaaaatcaaatttcattctatattatttaaggttaaagtagatctaatgatctatagatcagatctaaattatataaaatttattgattttagtacttgacctacaatgatcattgtagtaaaataattattaattaataaattatagatcataaatttgatcagatcaagtattattgatcaaaatttttatggtcttttgtattgacttcatttcgtaagttactacaataaccccgttctttgaaaaattgaggtatgtatgagcagttttgcaagcatgtttaacttgaacaagctgatgcaagatgaaggggaacccgatgatactatggtcatcgatatctctaacatttccatcgctacactgatgaacaacttcaaaccaaaggaacaagcatccatcacgatcgaaatgattcgtcatctggtgcttgacactttacggtttaacgttgtaaaatttaaaggtgagtatccagaaatcgtgattgccttcgatgacagaaattactggcgtaggcaaaaagcctggtactacaaaaaacgtcgtcagatcgaacatgaagaatcagaatgggattgggatcgtctgaacaacttcctgaacccagtgttcgaagaaatccgtcagaatatgccttatcttggattaaaggttgaattcgcggaagctgatgatataattgctgttgttacgaaaaaagctgttggtgaaggtagacgagtattagtggtttccgctgatagcgactttacacaactacagaaatataacggtgttcgtcaatggtcgcctccccagaaaaaatgggtaacgcctaagtacggttcgccacgtaacgatctgcgatacaaaaatatcaaaggcgataaaaaagatagtatcgcttgtattaaaattagaaatgattatattgtgacgaaggttgaaggcgaacgcgccccagcggtaaaatcctctgagttagaggcatggctggaggcagacgacccgacaacgttgatgacccctgaatgggccgctcgttacaaagaaaatgaggaactacgcgatttcgaatttataccaaaagatattgaaaattcgattattgaagcgtataatactccaaaatccggaagtaaatccaaaatggaacgttacttcatggataacaaactttcccgtatgttcgaaaaactgagtgatttttgaggtaacaaaatgagtgtagaatttttacaaacaaaccctgatgtagcaaaacaggtaaaagaactgatcaaagaagcatccaacgtgaaaactcaagttgagatcttcaacggtactttcaaggatattaaatccaaagcaaaaactgatttcggtatcgacggaaaaaccttcgggaaactgttcaaactgtatcacgaacaggcccgtaccgctttcgaagaagaaaacaacgaactgatcgaactgtatgatatgatcgataaggcgtaaagcatgatcggaaataagaccgaagtcggtttgtatatcgaaaatctggttgcctctgagggggcaacatacatggaagcaacgctacaatggatggatgaaaattccattgattatgcgatgctgaataaaacggttcctcgcgcgatccttgataagattagcgacgaagcgatcaaaggaaacatgcttcgcccatcggttgcgcttgaacatagttcatcaaccactctggacggcttcatgtgagatttaaagctccgtttgctgatagtgaggcgaattcacggcttgtgcctttgtctgtatacaagttatatctggcgatgaaaactcatttccaggggcgttttgatgtccttcaatacaactggcagatcaaagttagtgaaaacgcctttaacaagcgaaaggatagatatttctttgtaaaattagctcaacgctttacattcaaagaaatctattttatattcctctccaacttcgtagccaatccggatttctgggtaggcgatgttgatgaagatagtattgtcttttacaggcagtacataggaaagttacaaagactagataacgtgtttgtggatgacgttaaaaacgtgtacgaattcgccaaaatgaaagagatccccgtgtctctggtgttcaagtacagcgaaaaatcatcaacgtcctacataagcaaacttgtcctgtcaaatgtgatatcttacgaatcgtttttgatttttgactcatttttaggtatcataaataaacacgatcaagtagctgatgatattatttggtctgactttagcattaagttaaaggcatacagaaaaatatttgaccttactgaaaaagatatcataaaatatcgaaacttaatgaaacaaacgttaatcaaactaaactaaacgagaaaacagaatatgagcagcatttttaaacgtcaagatcccgctaaactccaggcacaggtagcaaatctgaaaggtggttccggcttccagaaagatgagaaagaatggaaactgaccctggacgcacagaaaaacggttccgccgttattcgattcctcccagcacgttccgatgatgaactggcgttcgtccgtatcgtgagccactctttcaagaaaaacaaccagtggtacattgagaactgttcctctacccacggcgattatgacggctgtcctgcatgtaagtacatttccgaaaacgatctgtatgagaaggctaaagccaacaaaaacgggccagaagataagctactgagccagatcggtcgtaaacaaagtttctgggctaacgtcctgatcgtcaaagacccaggcgctccggaaaacgaaggtaaggtgttcaaataccgcttcggtaagaaaatcatggacaagatcaccgccgcaattaacggtaatccagaacttgatgaaccgggtattgctgtaacctgtccgtttgatggtgctaacttcaccctgaaagcgaaaaaagttggtgattggcctaactatgacgatagttcgtttggtgttccggctaagatcaaaaacatcgacgatgaagaagttcagaaagcaattttcgaaggtatgagcgatctccgcccgatcaccgccgaaagcgaattcaaaccgctggctgacctgactactcgcttcaataaagttatgggtagttcgatcggttctgctggttccagcgcttccgctgaccttgatagcgaactgagcaacttcgataacgaaatggctaagtttgacaatcagacatctgatgtgaaatcatctggtggtgtatcatcggttccggtaggcgaagatgacggcgtaccgttcgacctggatgattctgttagctccggtgatgacgacctggataaactgttagacatgtaatacaagcgggggcttcggcccccacccaaagaattctaagttagagaagaaatatatgaatgaaagtaatgtttttgttgactacatgaaccgcgtccgtaaatcctgggttgctaaactctcggacgaaacaaaagaactgtttaaagctatgcctcaagaggaacgttttaaacattatcgtgacattgatgaaaaagtggttgcggaacatcgtaaacttaccagcgaacgccgcgaagatcctaagcgtacaaccgttaaagaaatggctgatatgcttgacacagcagcggaaaccgttgtaaaatcacttattaagtaacacttattgaaaactaaaggctgaatatgaaattctctaaacaaactattgatatcctgaaaaacttttctcaaatcaactcttcgatcatgctgaccaaaggttcattcatcatgacgaaatcaatcaacagcgttgtatacgcagaagctgaaattgctgatgtgattgatgaagatgttggtatctacgatctcaactcattcctgaacatgctgaacatcgtcggcactgacgcggaaatcactcatgatatttccactggtgaaatcgtgattcgcggtgacaagatgaagatcatcgaacgttcagcagacgcaaccacgatcccgaaaccgaaaaaacgtctggttatgccagtagcagatctgattttccagattacggctaacgatttcgaaaaactgatcaaagcgtctcgcatgatgaaactgaccgacctgtccgttgaaccgattgatggtaaactggtcatcaccgcgaaaagcaaagaaagtcaatcaactttctctgttgaagtcggtgagtatgaaggcgacaatgttttcaattttgatatgaagattgataacatgcagttcatcaacagcgattacaaagtagagatttcctccaaaggggccgcaaaattctcttctgataacggcgttgcttacgtcgtagtacttgaagcaagtagcacattcaagtaagatagttttaaggggctacggcccctttcttttacaccatttattttgaaggtatattatggaacttagtgaaaatattgaaatcatcgaaaccaaatacggtaaaatctctcgatctcctgatgaatttgcatgggatcagcgctatcgaccaacaacgattgaagagtgtattttaccttctggcgacaaagccgctatgcggggcataatcaaatctgggcgcgttgagaacatgacccttgtatctgattcccctggcactggtaaaacgaccctagcgcttgtattggcccgtgaggttgatgctgaggtgttctttgtcaacggttcgaactgtggtgtaaacttcattcgtaatgaactggatcgttttgcttcatcaatgacgcagaaaccaggcggaaagattatcatcattgatgaattcgatcgttctggtatggcggaagcacagaaacacttacgtagctttatcgaagcatacagtaaaaacgtgtctgtgattgtaacggcgaacaacattaacggtgtgcatagtgctctgctttctcgttgtcctcctgttaaattcggtgttccgtctgatgctgaacgtatcgaactgatgaaacagttaatcaagcgttgtttcggtatccttgaaatcgagaatatcaagtatgatcctaaagtcattgcagcgtttgttaaagagcattatccggatgcgcgttctattatcaaagcgatcgggttctactcgaaacgtggtgaaattgatgcagggatcctaaatgagatcgttggttctgatgtgtctcatatcattaccctgttgaaagaaaagaactataaagggttgcgctctgaggttattaaatatgcgtcagaatacgatacctttatcggaaaattgactgatacgatttaccctatcgtgaatcaggattcgaaaatcgcactgatccagattgtaggcgaaaacaacgcgcaatacgggctggcgatgaataaagaaattcatctgcaatatctgttgatgaacctgatgctttctatggtctgggaggcgtaatcatgagcctggcggaatttctggatgaagaagagttatccccgcatgaatccgcttggctttctaaagattgggataaggttgaagaactggtcaaagagtacggcaaggataaagaaaacaccttgtttaacatcatagacgaaatcaacaacggtaaaactccgttggttatcgatgatgtgtatgataagtactttgtagacaacgcaatgagccagcacatagacacgatatataacgcttatgtgatgaatctggtaggcggtagtatctctgaccaaatgcactataactattatctcaactctgttaggaaggctaaacgcttcggtgcatgggctaaactatcggaagattttgaagagaaaattattatcgaaatccttcgcgaaaaatacagtgtaaatacacgtacagcgatggaatatttgcaggaacttaaagacctcggaatgttcgaggattggaaaagaaaacacgcaaaggtcgctctgtctttgttgggtattgtgaaaaacaaagctgaacaaaagaaattggaaaaattgattaaacaatggtgatgtatgttagaaattcaactaatcagcgacgattcttttttaaagatccgtgaaacgctaacccgtattggtattgcgaacaacaaaaagaaaatgctctggcaatcgtgccacattctgaaaaagcaaggtaagtattttatcgtgcattttaaagaactgttgaaacttgatggtcgtcaagtcgatatgacggaagaagacgaactacgccggaacaacattgcgcgacttctcgaagagtggggcatggttaagatcgtaaccactgggttgaagtttgcagaagaaaacaacttccgcgtactgactcactcgcaaaaagcagattggatcctcaagtacaagtaccggatcggtcactaatcaaaaagcccttgcattcgtgcaggggctttgttatatttggtgtacaccattgagagggatatattatgactattaacgaaatcatggattcaatcaaatccaacgaaactttgatcatcccgattgtaaaagatgacatcttgttatcgttaacttgcaatctgtcagatacccgcacttacagctatgcacaacactactttcctggattttacgatcgtaacatttcagagtacacattgttatgcaatcaagttgaaaccactcatttctatgagcgtattaaaaaatctctgggcttgatccaacaagcaaaagaagtctttatgaaaagaatggaggacgcgcaatgatccgcacttacatgaataagattttcgcggcccgtatggataacgttattgaccaacgtgcttatgatgatttggtttcccttgcaacctgtcaactggatgaacatacagtaacggaaaggaaactaatggttaacaaagctatcatgatggttaaccagggaattgcagaagcaaaatatcatagtgtcaattccagtattttcagcatgttattcgacgggtttaaacttgaacgccagcttgttcaactgagaaagatccgtgacttgttagcagaaggtttgttggttttagaacatcgagtaaacttgaatttgctgtaggtggtgttacaatggaacattatattaatggagaagacaagatccaatgaatgaattttacctatcagttgaacaaatgggagataccatttatgagcgcttcgttgactctaacggcaccgaacaggtacgtaagacgaaatatgcgcccgtaatgtatcaacacgctatgaatggcgtagaaaccccatacaaagacatttatggcaagccttgcctcaaaaaacagtttgacagcatcaaagaagctaaaaactggatgcagcgtatgcgcgatgttgggatggaagcgctaggtatggacgattatcgactggcttacatttctgacatgtaccggaatgaaatcgaatacaaccgcgaacacattcgcattgcttctatcgatatcgaggtgaccgccccagaatttccggatccgcgtgaagcaaaatatccaatcgatgcgattacccattacgatagcattgaagataaattctatgtatacgatctggttgagggtggccttgcggaatggtgcgcggcaaacgttgatcgaaaagacattagcgaagaagatttaaacaaaattgtttatcggtctttccagaccgagaagtcgttattgtctgcgtatatcaaagattggaaagagcgaacccctgttattgtaaccggatggaactctgacaaattcgatattgcatatatcatcacgcgatacctgaacattttcggtcaaaacgtggtaaggcattttagcccatttggtaaagtaaccgccagaaccactaccgacgcttacggcaacgaacaattaggatatgacatttccggcgttgctcaaatggatggtatggcgctgtataagaaattcagttttaccccacaaccatcttaccgtctggacgcgatcgcggaatacgaaactggtaaaaataaagttgagtatgaaggttcactgtctgaactacgccagcgagatcaccaactgtacatcacgtacaacattgttgacgttatccgcgtacttgatattgacggtaaacgaaactttattgaactggttctgtctgtagcgtactatgcaaaaattaacttcccaggggttatgtctccgctgaaaacgtgggacgcgatcatttataactctctgcgtgaagataaggttgttattccggaaaacagacgccatactaaaaccccttaccctggggcatttgtgaaggatccagttcctgggccttacaaatacatggtatcgtttgacttaacaagcctgtacccttccatcatccgacaggtgaatataagccctgaaacgattatgggaagttttgcggtacgtgctcttgaagagtatattaataagaccgcgccgcgccctagcgatgaatttagctgttctcctaacgggtggatgttccgccgtgatatcaaaggcgtgatccccgtagagatcaagaaagtatttgatcagcgtaagatgtggaaaaaacgaatgatggcgggtgagcgaaatcttgaactcatcaagcacgaactcgaacacttaacagacgcacataaccaaatggttgatcctgactttgatttctatacagatttcagtgatgaatcgaaagcagttctgaaaactcttacaaaacaaatgcttaaagcagttaagcgcgtgtgtgagaagaagatcgcacaagcgaacacagcacagcttaaccgtaagatttctatcaactccctttatggtgcgttgggtaacgaacacttccgatacttcgatctacgaaacgccagcgcgatcaccatgttcgggcagttggctatccagtggattgaacgtaaggtaaacgaataccttaacgacctgtgcggtactacggatcatgcatatgttcggtactgtgacactgactccatttatgtttgcatggataacgtgattgcaaaagttggtggtgaggctaaatttaaggataataaccattgggttgacttcctggatcgctttgctaaagaaagaatggaaccgatgatcgataaagggtatcgtgaactttgcgaatacatgaacaacgtggaacacctgatgtttatggatcgtgaaatcatttctgggcctccgttgggttccgaagggttgggaagtttctggactgctaaaaaacgatatgcggctaacgtgtgggactccgaaggaacccgctatgaaaaaccgaaactgaaaatcatgggtatggaaacacagcgatcgagtactccgacctctgtgaaagtattcctgaaagaagcgatccgccgtatcctgcaagaaggtgaattatctttacacgaacattataaaaagttcgaagaagaatataaggaacttgactacagggaaattgctggtgtatcatctgctaacaacatttcgaaatatcgtgatggggctggctatccaatcaagggaacaccaaaccatattaaaggggtgctgttctttaaccgtttcactgctggtattgatggtgttacaccaatcatggaaggtgaaaaggtaatggttctaccactaagggataaaaacccgtggcaagccgattgcatcgcgtggcaatccggaaataaactaccgtcagagatcgaaagtgatattctggcatgggtagattatccgggtatgtttgaaaaacatgttattagtccattgactaatatcacggaagtatgtaaaattgattatgaaaaacgtgccagtttaaacgatctgttcggtgactggtaaactctaggggcttcggcccctttcattaactagtgagatatatagaatgagaatgaataaatcggaaaaattaaatgtcaaacaaagcactactaaaaaaactgatcaaaaactcgaatagccaaactgcatctgtactttctgaaagcgacgtattcaacaatattaccatcacgcgaacccgtgtgccgattctgaatctggcgttgtccggtgcgtttaacggtggcctaacttctggtcttacccttttcgctggcccgtccaaacacttcaaatccaacttaggtttgctgactgtagcggcttatctcaaaacgtatgaagatgctgtgtgcctgttctacgattcagaaaaaggtgttactaaatcctatctgaaatcaatgggtgttgatccggatcgtgttgtgtatactcgtatcacgacggtcgagcagttgcgtaatgacgttgtaagccagcttaacgcgcttgaacgcggtgataaggtgattgtattcgttgactcagtaggcaacactgcaagtaaaaaagaacttgctgacgcgctttctgataacgataaacaggatatgacgcgagcaaaagcattaaaaggtatgttccgtatggttacgccttatctggctgatctggatatcccgatggtttgtatctgtcatacctacgacacacaagaaatgtacagcaagaaagttatttctggtggtactggtttaatgtattccgctgatactgcgatcatcctgggtaaacaacaggtgaaagaaggtactgaggtagtgggttatgatttcatcatgaacatcgaaaaatctcgattcgtgaaagagaaatcaaaattcccgctgcatgttacctatgaaggcggtattagtatgtattctggccttctggatctggcaatggaaatgaactttgtacagaccgtaaccaaaggctggcgcaaccgtgctttcctgaataccgagactggcgaactcgaagttgaagaaaagaaatggcgtgagtcagaaacaaatagcgttgaattctggcgtcctctgtttactcatcaaccattcttgaaagctatcgaagaaaagtataagatccctgatcgtgaaatcagtgatggttccgcgctggaagatttatacagcactgatagcattccagatcctgatctggatgatgacgatatcccagaatcatttgatgatatcgaagaaaacgacgaaattttataaaaaatatggggcttcggccccataaccgaggcaatgtatggatatcgagagcaaagcaaagaattatattgatgaagcgatgaaagatgttattcaggaacttctgattaacgatgaaaaaggtgttgcgcatctggtttatattcataaggtgttttgggatcatgggctgaaagtagaattcagtaccccagacgaagacaaagaagcgttgatcccgctggtgcatgatgcaatttatgcacagattaaagagcttgaaaagggttcagttgtcccaaagcctaaactgacattatgggatgtattcaaacaaaaggtttacaactttttcatgatgttcagcaacctggtataaggcaatacaatgatcgttgatacaatattttctaacctgatttataacgggacatattttgtccaagcatggccccatctgaaaaaggaatatttcgaaggcaatgcgcaagttttgtttgacctcattgataaacatgtacaggaattcaacggcattccgtcaaaaactgctttagaggttgcgcttgacaaacgaaatctaagtgatgtagtctacgaagacacgaaaaaggcgattcagtcgctgaaaaatgcgccagaagatttagattggctaatgaaggaaacggaaacatattgcaaagataaagcaatgtatcgtgctctttctcgtgcaatcgaaatccaggcgaacgcagaaaaaccactggcagaacagaacaagaaacttcctggtgttggggctatccctgaaatcatggaggaagcattagcaatttcattcgatagttcggtaggtcatgactatttcgaagattatgaaaaacggtggatgctttaccaatcgaaggcgatgaaaattccgtttggtatcccgatcctgaacgcaatcaccaaaggcggcgcggaacgtggtacactgaatatcatcatggctggtgttaacgttggtaaatcactgggcttatgttctcttgcggctgattatctgcaacagggtaaaaacgttctttacatttctatggaaatggcagagcatgtttgctctaagcgtatcgatgctaaccttcttgatgtgactatggatgacatcgacgaagggaacattacatacgcagactataagaacaaaatggagcgccttaaagcaggtaaggttgggcgtttggtggtcaagcagtaccctacatcgggtgcaggtgcaaaccactttagagcgcttgtgaaagagcttaaattgaagaaacagtttgttccggatgtgatcattgtcgattacctggggatctgtacttcaacccgtgttaaaggtgctgagaatacctatattctggttaaagcaattgccgaagaactacgcggccttgctgttgaaactaataccgtaatgtggacaggcgcacaggttgggcgttctgcatgggatagttcggatgtgagtatgggtgatgttgcggaatccgctggtttacctgctacggctgattttatgttagctgtgattgagacggaagagttagctgatcagggtatgcaactgttcaagcaaatcaaatcccgttatggcgataagaacactttcaacaagttcaagttggaagttcgcaagggtaatcagcgctggatggataccgacaacagcgaatacgggtttaaatctgactaccacggcaacactatgcctaaaacagtagaacagacacaaagcccgatgattaaacaggctgaatccacccgacgtgataaaatggcgcagattgcaaaatctgacattcaattttaattgactggggcgaatagccccataaagaatgtaaggtaatgaaatgactaagactataacgattccgattccggctatcaaacttctgactggactgacactgatttttgcagcggctaaagtatttggcttctcgcatatgtcatggttctgggttctcttcccagttctattacccgtctacattgtagtaggcgttgtgttggtgggtgttgcgatctatctgctgttctcactgattgccagtgacaaggccgaagatatgtatcgctgggtaaaagccaaatacgaaaaacttttcaaaaaatcgtaaaaaggtattgacctgaatctccattgtggtaatataactcacgtagacaagatactgagttaaacaaaggagattcaaaatgaacgtattcaacaacccttacaacgaaatgctgaacccgaatgttgatttcagcgatggttattttgacgcaatcgtaaacagcatcaaaaacaaaggtttactgttagcgatgctggaaaaaggcaaagatgacgttgaaggaagtgttgatttcctctggaacttcctccctatcgaacctggtttcaaagttggttgtaatgaggaacaagcaaaaaacgttcttcggtatctcatcaataacgcataaaaattaagccccgaaaggggcttttttgtatctgtaggtattgcattctttcgcaaaagatgataccttaatcataacaaaggaggacattatgaaaatcgcattcgttatcactttcttacttgcagcactcaacatcgtaactggtaattcttttagttggtgggtggtggcaatgccttacattttcgtgtatagcaaaatcatggtgattgctggcgtgaatcttgtccttgctatcttactatttgtattcgccgccctgaatggtgaagcgggttctacctggaaagctatgaaagagggtgttaaagagggtttgaaatgaatattgatttttgtaaggctgaaataaaagcggatatggacgaagaagaaccgaagttcgatagtcctcatagttcgcgctggatcgtagctgttgacgatgaaggttatgttacggtattatctcgaccattcattcatgatgcattctttgaatgtggacgcagtgcggaagatatcgggcttcctgattctgtcgaaatgcctccgggtgtatatgaatggatctgtggttttgaacaaactactgattgggaaaccggatatgtagacggatgggaattctatccaaataaatcaacattattgtatagctgggacaatggcaaagttaacgaaagcggaaaccaagaaacacaatcagataatggatctggttcactctgacaaagcgctaacttacgaagagaagttgttcattattgaaaactttcatgaaggcgcgtttacaaacaattctgaattaggggcgttctttacccctattggacttgctcgcgatttcacaatcgatgcttgcacaggtggaagtgttattgacctgtgtgctggtatcggtgggttatctttcgctatggttcattacatgatgtacaatacgccgcgcgaaatcgtctgtgttgagttaaatcacacatactatgagttaggtaagcgtatcgtaccagaagcctcctgggtgcatggagacgccttaacaactgaatttaatcaggtgtttgatatggcgatcagtaatccgccttttggtaaaatcaaaacatctgattttaagggtaagtatacaggggcggaatttgagtataaagtaatcgaacgtgcatcacagatcgcgcgtcagggaactttcataatccctcaaatgtctgcaaatttccggtattcgaaaacacactgtttccgacaagatgacagcaccacatcaagtaaatgcaaaaagtttcttgatgaaactggcctcgttatgaatcctggatgcggtatagatactgggtattacctggaggattggaaaggggttaaaccactatgcgaggttgtttgtatggagtttgaacctgaaaccaaatctgatttattcactttcacaatagagtaataatcatgagtgatcaattagttaaaaatatggatttaacatatagcgtccggatgatccggctactcaaaaagccctggactgaatggactgcttacaagctggggatccttgatggacaaggcgaagtaattcgcaaccccaaaacaaaagaagagttagaagcgtattctccttttcatcgttcagtacgccatatcaagcgtagaatgaatgctgttccgtatatgagtgggtttatgaacttaaccagttcatatgataccctacgcaatcgctacaatctgacagaacaagagcatgaagaaatcatgttgaacgttccacgcctcaaagaatattatgataaggggcgcatgttagaggatatggtcgcgggtgattctggcggcgatacagaaaagattgcttctggtgtgactactggagcagtaaccaacatcgggccgaaagtattaggcgttacccgtgcagggaaaaggaaaaagaaatgataattcctccgctgaatatcactatctgggctactgctaacgattatacatggtttccaatttgtatcatgtatatgagtgacaacgcgaccgtttatcagaatcgtcgaaaaggttctgataaaattgatattgcaataaattattcgtttaaacaagcatttcgtggttggaagttaatgcttgacggaacagaaaagcaagtaagttcttgacagaaaaatcctcttagtctatgatattgaaatcatttgattaggaggatttacaatggcggttggatttggccctgctgacggtgttcaagataccattcaggcaacaatagacaatgcgatagattttgcacgttctcaaatcagaaacggagaatcattaacgcattgttttgattgtggggatccgatacccgaaaaacgtagggttatcgtgaagggttgccgttattgtattgaatgccaaaaagaacatgacgaaatgatcagcgcggggtataatcgacgaggatctaaagatagtcaactgaggtaagaaatgtatcttgatatagaatttgcaacccgaataatgggatcattgcctcaaagcgaaatcgttcgtaaatcgggggcattaagcatcaatgcgcgttgccctatttgcggcgactcaatgaaagacaagtacaaaaaacgattttggatctacccttctaaaaagggtgatcatatgaattgtggttgttttaactgtggttatggtgtaccgtttagcgtattcctgaaagaatattatccagacgattaccgtgattatctcatggaatcgtttaaggatcgcaattcgttaaagccaacacatacagaaccaccaaaggaagagaagaaatttattcctactcttcaattctgcgaaaggttagataccttgccggatgaacatccgatcataaaatatgtgcagaatcgttgtattccccgtgacaagtgggaacggttgtggtttactcgcgaatggcaacaactggttaatacggtgaatccggatacctatccgatcgcaaaaccagaaccgagattagtgatccctatcttcgataagaaaggtaaaatagaatctttccagggccgtgctttacgtgacggtgcaaagtcgaaatatatcacaatcaaagcctgtgaggaatcaaccaagatttacggacaggatacgatagatccgctaaaaacggtttatcttcttgaggggccgttagatagcctgtttgttgataatgctggcgctatcactggtggacagcttgcactttctgaggttccgtataaaaatatgcgtgtctgggttcttgacaatgaagcacgtcatccggatactactcaccgcctctttaaattgattgaggctggagaaaaggttgtaatgtgggataaatgcccgtggccttccaaagatatcaacgaaatgataaaaacggacggcgcaactaaacttgaaattatgcagtatttgaaagataatactgtttctggactcacggcaaaacttcgatttaagtcgtgggacaaatcaccgaaaaaatgagattgatatgactactgataaaactcctgtatttaattcatgtgcgcacctggttaacccggaagatctggaatttgtagattccgaatatcaaaaggttctggcccgtaatggcgatcctttacaatccatgctggatttacaaaaccatgcacaacaaagcctgtctgataccctgcattgggttccgcgtccggataatctggaaacttgcggagaaatccttgattggctgaaactgcaagacgacgcgatcgccgatgaaacccgcgaattgtataccgctctgggtggaatgtctcgcggtgttaaacctgcgtccggtgtttggaaaccgtggaaagcaaatcaccaggaattgcgcaatactaaatttgcggatctgagtgaagaggatcgtttagaagttatgtttgaacttatcgatcaatggcatttctttatgtgcaaattcctggcgctgggtatggatgcggaaactatctacaaactgtatgcactgaaacaagccgaaaacctccgccgttgggctaacaactactaatggatccgatcatcgcgctagtagctgttggggttctttcttatggtgtttgcgcgatgatcacatatcttttcggttggtgtgtgtttcacgtaaatggcgttgaaagaaaacttttactgattatactatcagtgttttggtttgttggaatattctacgtttgttatgaggggcgagaatgattacaaaatattatatcgtcgttagtaaggataaagacgggtttaaaattcccttcattaaggaaggagagttaacacctttgttgtttctatctccggacgatgctaacgagtataaaaattcgattatcaaagaatatcatgataagatgaatccagttaaacaaagtggtcttagccgattctttcgaaaggaagaagttgaaaccgtaaccgaaaagaaaaagaaagatatgcgttggtttattgaacacgcaagtattcaaggggtattgattaaagtatgagcgaattaacttttgacgatctgagcgaagaccagaaaaatgcacatgatcgagtgattaaaaatatcagaaacaaaatccatactactatcacaggtgggccgggtgttggtaaaactactctggtaaaatttgtgtttgaaacattgaaaaaactgggtattagtgggatctggttgacagcgccgacacaccaggctaaaaacgttctctctgaggcggtgggtatggatgcaacgaccattcactcagcactgaaaatcagccccgtaaccaacgaagagttacgagtatttgaacagcaaaaaggcaaaaaagccgctgatctgtctgaatgtcgtgtgtttgtggttgaagaagtatcgatggttgacaaagaactattccgtatcatcaagcgtactattccgagttgtgcggtgatcctgggattgggtgataaggatcagatccgtccggttaatacagaagggatcaccgagctttcaccgttctttgatgaggaaatttttgatgtcattcgcatggataagattatgcgtcaggcagaaggaaacccaatcatccaggtatcacgcgctatacgcgacggtaagccgttaatgcccctcatgaatggtgaactaggggtaatgaagcacgaaaacgctagtgacttcctgagacgttattttagccgtgttaagactccggatgacctgaataataaccgtatgtttgcttacactaacgcaaacgtagacaagttaaacgcagtgatccgcaaacacttgtacaaaactgatcagccgttcattgttggtgaagtggttgtgatgcaagaaccgttagtgacagaaggccgtgtgaatggggtttcgtttgttgaagttatctataacaacaacgagcaaattaaaatccttgaaatcataccgcgttctgatactatcaaagctgaccgatgcgatccggtacaaatcgattatttcttgatgaaaacagaatcgatgttcgaggatacgaaagcggatattcaggttatcgcggatccggttatgcaggaacgtttaggcgattatttgaactacgtcgcgtttcagtataagaagatgaaacaggaaactggatacaaagccccctggtattcgttctggcaaatcaaaaacaagttccagacagttaaggcgcttccggtttgtacgtatcacaaaggtcagggaagcacgtatgatcattcatacatgtatacgcgcgatgcatacgcatacgccgattatgaattgtgtaagcagttgctttatgtaggaactacccgcgcacgattcactgttgattatgtctaagggcttcggccctttgaggttcttatgaaaattattgttaaagtcaaagatgtagaaaagattttgcgagaagttgaccgtattggtagagaggggcttgattatctcgaagggtttaattctatcgacatcaatttgctgtttgcaaaattgcgctgcgttgtcaacgcaaacaaagaagttgggttatactgtcctaacgggccgacctacacatggggaaacatttcacaagatatcgaattcacttttgaagagtatgcagtgatcattgataccttgaaaatgggtcgtaacattcgtgaaaacaaaaacatgcttgaggggttttaaatgaatattcaccttccgcgcctttatgctgaattggttgccgatctgattttgaaaagtgatcgttctacaatggaagattaccacgattgggaacatctggacaattttacagaggctgtagaaaacatgatccgactggaaaaatcgattgctcgttgtgggcttcgtcagttcgggatgatggcagtaactccaggcatgatcgaatccgttgatgttactccggaagtcgctctatcattggcctatttcatggaatcatataagcggggtcgcgaatgagtcatttacccgtagatttcgtatttgattatgaaagtattggcccgtttccaaaaggaaaactagctgaacttagctatgttccttttgttgatgatccttatgatccgcctacctttcaggaactgattgctaaaggaagaaagtataaattcgacatccggaaacaaccagaacgcatcaaagatgaaaaaacgatcgaatggtggaaacagcaatctaaagaagcgcaaagggttttgttcccttctgatattgacatggatttgtacgaaggtcatcgacaattctttgctgatttagcggctgacggtgtgagtcgttggcagtcatacgattatacgcgcggccctgaattcgatcgttctatgctaaccgacgttgtacgaactatgacagggaaacttgacacgttcgaagatatgccgaccgtattctggaatagccgtgatgtgcgtacagctattgaaaaccgtttactgactcgcggtgtgaccacgtgtccactacgtaaaggcatgttagatggattcattcagcatgattcaattcatgattgcgctaaagatgcattgatgctaatctatgctaaacgttatgccctggggctggaagaacctccatccttagaagagacagacgaaaacagtataggaaagaaacgatgatcacattaactattatggatcgccattactacgggaacacgattaacgaagcaaaagcaaaagcctttgaagatatcattaaccaggatctggttaagattgaatcggatcgctatgtcgtgcaaccgggtgatagcctgtattctatagcaaagaaactgtatggtgttggtgaacattggcctgatatcgccaaaatcaaccgtgatgctattccggatgcacgtctgatccatcctggtatagttcttcgattaccaaaactggtaaaaatttaaaacaaagcccttgacttcggttgagggcttttgttatattgggttctaagaaaggagattgatatgaattttactaaatttgaaatccggctgttgattacgctggctatttgcggagcggtatcattgattagtttgttaacgtatatcgcggtaagaacaacgatatggcttcatgactggtttactgtacttgacacaattaaggggtgatttatgcgtatagcgattattggggcggctttgggtgtaattggtggtcgtttagtaaactgtgtgatcgaagagttcaagtcacaaccttatccgttttcgatggaatggaacaaccaatttcctaatttggttgaggaagaacccacgatccataaagtcaaaccataccgaaatccggttgtgcctaaatcattgcaccgtcaatcagtaaacaggggtaaatgatgtcagaattcgcgttagctatccttgtcgtgattgctgtaatgggttcgatcctgttttgtcgcatgtatcagttagatgatacacaggaatggttggacattaacgaaaagcagttccgtaagcactttgcaggtgaatttgtttttgtgaaatttcgtagtgactacaaggtcgagtttgagtttgacggaaaaggtaacaactaccacataatcacttctgttattgatgcaaagaaaatctttgataagacacagggcggcgggatccgtaaattactcaaagaaataaaatagcattttttgttaaagaagcctcttgcattgcgggaggctttttggtatcttgtattcatcgaaacgaaacagagaaaggaatacgaaaatggttaaagtaaaatatgcagcacacgttaaagcaggtgagattgttggtttgactttcggcgctgaaattggttctcagtgggcgctggttgaaaaggttgaagacctgggcgataaagtagcaatcaccgtgaaaatgcaaaaacgttttactaaccgtcctgtaatcactaagaaagtgaagaaggaaaaacgtgttaatactcagactttcgaagaattcatgaactggtgcaaaatgtataaactggatacctactaatagcactttttgttaaaacattctggggtagctttggtatagttaccccatcgaaacaagggaggaaattattatgatggttaacggttctctttatcaacaagcagttgcacaatggaaacagaaagttcaggatgcagaacgcgggatcgcttattgtgatgaagcgttggcaagcaatcttgaaaactgggaacgcaaagagtacgagaaagttaagcaacgccatttgaacgaactccctgcattaaaagaacacttaaaatatttgatggataacgaaaaaagccttgcatagaataaccatctttgatatagtacttacatcgaaacgaaacacactttaggagatataccatgaacactttcgaaatcctcgcagaaaaagcagcccctttcatggaagcaatgtataaagcgcgtaacgctcgtttccaagattctcctttcgaaactgttttctttctggagaaaggccgcaaatatcatcgcgttgttcaggatactcgcaacaaagaaactggtgaaatgttcaatcagcgttctgttgccgccttcatcgataatgatggtaatatcctgaaacctgcaagctggaaagcaccagcaaaaggcattcgtggtaatatcttcaatgacgcagaccgcgcgattgaccaaagcggttatgtggtttatcttcgttaacaaaggggcttcggccctttttcttaaaaggaatatagcatgagtaacaaaaacgaagactctaaaatctggaaagctgtaggggttatggctgtaatcgctgttgtgggttactatgcgtataattcctggcaagaaacgattgatgcgcaagtacaggaacaacaaaaagccgatgcaatcgaacagcataaccagcttatgcaattgcgctctctgggatacaccacgaaggaagattttaaaaattcctttggtgactataccggatccctctacaccgtgtggggaatggctgacggcgattacatgtacattgaaacagaccgttataatgtcccacaaagtgtatgtttctatagtacaccgagagacaacggcaaaatcacgtcatacgcaccagaattcaaaacgatttctgttgatatgaaaattgacgggggagaaaccctatcatttgccgctaaaggaaacaacggatccgagaggttgtgtcttctttctcctactcgtttcttacgcaacattcaagacgcgagtaatttaaaaattgctttaccatacatcaaccattatgatattgttgatgacgtaaaagaatggaacgtatctcaaatcggggtgaaattcaaatgagaaaagcacgtaaaactaatgcagtgttgatggttaacggtgaagtaggaaaaccttgcaccaattctaaattcatgcacattgcagggcttccgggcatgacgcttaaaacgtcgtatgatacccattacaacgaagaaactacttcggtatacatgggagaagatctaatggctgaacgcatcatgcaatgcattcacttccctggtgaacgtccttcgattgattgttatatttttggctaccataaaggtattgtaaatgaatctgtataaagaaaatgatctatatgttcctacttttggtctactcacttataacagtagattggatggatacgggaaagaatttgattttgtagcaagcgttaaacggcatttggaacgcagcggcggtttgtctattccgcgccaaatccattatgtttgtaaagaaggggtgtttttgaatggtgttcctcatgtgatccctttcaacgtgtttgaaggctattttacgaaatatgttgttcaacacacggcttcaacatccgagaataccgcaacgcgagaagaaacgacgatcgtacttgataagtttttcgaaattgcacataaagtgaagaaacgcacgaagagtgatgtggttcatcacctatcagcggaagttggcgagatcagcgaatgtctcattcagcctcaacgcggcggtaatatcgttgaagaaagtattgatgcgattgtgtgcgcacttgatgtgatttacctggaactgggtactactcacggacggtacgaaattgcaaaaattatcaacgatactcttgcagaaaaattagataagtggtatcgtacttgtaaaccttgagtttacttgtgaggattatatcatgttcgtatatcgtgtggaattttcttgttctttctggaatgattgtacagaaaaatggcaaacaaaaagtggcccatatgtcaatcgttatttgtcgatggataccgctgaatggcttgatcaattctgtatgaatcctgatatctatattgatatggatgatcaccgacatccagcgccggatgacgataatcgattgatgcgcaaccttgaaaaagataacatagactttcaagcggctgggttatactttggttttcagtcaatacagcgcctttctcgttggttcaatgcatatgaacgcgagtacatgcacaatgttggtttcgtctgcatggtatacgaagttgaaaagttgtatccgggcgcacgtcaatgtgtttttgacatagacaaagcccgtttagttaagatgttaagtttaaaagagatttattaatgcctacctatacctataaatgcaccaagtgtaataaagaatttccaaaaatggcaagcattgctacccgtgatgcaccgaaagattgtgattgcggaggcgaagcaaaacgaacggttgataaacctcaaatggttcgtgatggtttcccttataacaagtaaaccccgaaaggggttttctttttcatagaaccctatataatgtcagtgattaaacaaagaggtgaatatgagtttagattttcttctggcagatgatgaaccagaacagaaaccacaaccagccaaaaaaggcgcaaaggttgacgaatcattttgtatgagcgatcgcgatcatattcggttgcgtccaaatatgtacgtcggatcggttaacaaagaagcgcatgaacgtttcataatgggccaatatcgcaaggttgagtacgtggaagggttggttaaaatcatcaacgaaatccttgataactcgattgatgaagcgatccgaactgaattcaaacatgctaataagattgatgtaaccattgatcataatctggttaaaatctctgataatgggcgcggtattccccaggatgatgtaaaaaccccagacgggaaaatagttcctaaaccagttgctgcatggactatggcaaaatcaggttctaacttcgatgataaaaaccgcgtaacgatgggtatgaatggtgttggttctttcctgacaaactgttatagctcgatttttattggtgagactgcaaacgggaaacgcaaagtaaccattaactgtactgacggcgcacagaacatcgattaccgaaccagccccagtaaagaacagggtactactgttaagtttactccagacttctctatgtttggtgtaactggtatcgatgaagaaaccaaagaagtgattaaggatcgcttaatggcccttgccgttgccttcccgtctgtgaaattcacgtataacggagaaacgctctctaatcgcttcccgctgtacgcttccatgtatggggataaaaccattgtccagacaaataatcgcctcagcttcattctggcgagcactgaggacgggtttaaacagaaatcctttgttaacggtctggatacgaaaaatggcggtgttcatgttgagtgtatgatcgatggtatctattctgaacttgaaccgatgatcaagaaaaagcatagtatcgagatcccgaaagcacgtgtaaaagaatgcttaactcttgtggtattcctgcataactttaatgcacctgcattcgatagccaaacaaaagagcgattggcaaatacagcaggtgagtttaacaatcatgcgaatttgaattacaaaaagatcgcaaaaatgattatggataccccagaaatcattactccgatcattgaatccgcactgattcgtaaacaagcagcagaagccgccgcaatcaccaaagcgaaaaagaaagcgaaaaaggcaaagattgctaaacacgttccggcttccggtatcgatactccagggatagaaacaacattgtttctgacagaaggtgattccgctgttggtcagttcatcgaatgccgtaacgaagaaacacaaggcgctttcccgctacgtggtaagcctctgaatacatggggtatgagttttacagacattatcaaaaacaaagaactgtttgagctaatggctatcctcaatattcatcctggtgatacttccggaatgacttatgataatatcggtatcatggtcgatgctgacgttgacggtggtgacattttaaccctgttgcttgcattctttagccgttggccttctctgtttgcagaaaaacggatccgatatattcgaaccccgatcgttatcgctaaagttgggcgcgaggaaaaatggttctattctcttgatgagtttgcaccgttccgcgataaagcaaaagatgtacgatatatcaaggggctgggttctttacgcaaagaagattacgaccgtgttctgggtgatcagttgaagtatgatgtcattgtacttgacgacgaatacaaagaagtgttagaactatgcttcggcgacgaatctgatccgcgtaaagattgggttaatggaaaacacaaattttctaaggttgactaatggaaagaagtattaaagatgttgtacaggtggaagggctaacgtttgccctttatacgatttattcacgtgcgatcccgcacctggtagacgggtttaaacccgttcaccgtttctttattcactctgctatgcagggcggaacgggatttcagaaagtagcttctatcgctggcggtgttgctatgtatggatatcaccacggggaaacctctgtagaagaagcgttatcccttatggcggcgcactggtgcaataacattccgttattcgaccgtgatgggttctttggttcccgtttggttaagaaacctggcgcacctcgttacatcaagtgtaaactatcgccaatattcaaagcaatttatatggatggtgatttaacgccagttcatgaagatccggaacatgtaccgccagcgtactatctcccgatcattccgatggtactggttaacgggtttagcgggattgcaaaagcatatgcaacaaacattccgcctcatgatcctaaatcggttgttaacgggtgcattgcatatctgaatgataaagatttcactctggatctgaaatatccttactttaaaggtgaaatcacagacggtacgatttacggcacctatgaactacaaggtaaaaccaaattggtgatcactgagatcccagtgaaatatgaccgtgtgaaatacattgcaatccttgacaagctggaagaaaaaggcgttatcgttagctacaaggatctatcgaaagaagattttcggtatgaagtaacgctcaagcgagagtatgctaatgggctaacccgtgaaaagatcctgaaagatttcggcttgattgaaaactcaaacccaaacattaacgttatctttgagggcaaactatactcatacgaacgccctgaaacgcttctaaaggatttcgttgatattcgtatgaatgtatatcaacagcgtatcaataagcgtatccaggaaactaaggaagcgttagataaagcactggcaaaggttgcgtttattgctcaaatggtagaatctcctgattctctgcgtggccttagtcgcagcgaagcggttaaatttgtgtctacgtggataggttgcgagaatcatgccgaaatgttagtggctatgaacatctaccatctaaccacggacgaaagaaaaaagctggaagacgaagccgaagaattgcgcaaacaattgaaatactgggaagaaacaacccctaaaattgagtatctcaatgatttaaaagaactttctaagaagttgaaataattacaaagcctcttgcaatgcagggggctttttgctatattggttttgtaccaagcaaaggagattctaaaatgttgaaaactcgtagtgcaatggaagtaacccactgggcgcgtaccatgatggaaaaacacggtttgatcagtaatggttggacattccggatcaatggacgcattacaaaaactctgggccgttgcagttataccaaaaaactgatcgaactatctggtcgtcatgttgcggaagatatctacgaggatattttagacactcttttacacgaaatcgctcatgctcttgtcgggcgcggttatgaacatggtaaagtgtggcaagctatggccttgcgcctgggtgctaaaccttcaccaagtaaaacaactacaaaggatgctaatctagttgataagaacgagatcctttattgtttgttcatgaaagattatcaaggccgtgaagtctatcaggctaaagctgataagaagttttacaacgatgtgatgaacggtgttaaggatatgaaaaacatttggatcagcgggcgcaaggcatatacaaaaggccgtctgtatatccgtccagtaacccatgaagaacttgcatacattcgcaaagaggggtaacgtatgacacgttataatgcgcctaagttgggaaaatatctgaccatattcggattttgtgcgttcttttctgtcattatcggggctatcgtgtggggtatccttgatatgaagaaacagcaggtcgaggaagaaaaattggtaaaattccttgacacctattgtgaagtagtagaatatggtctgaacaaaaagccaacgaagtactcttgtgaccaagttatttttaatgttaagtgagaaataaacaatgaaattacgcgaagatacaccgcaaaccatctaccgtgttggtacagataccagcaagggacgaaacaaactatctctacgcgcaaacaagaaagcgtataagatcctttcttcgacagtatacaaatacaagatccgcgcaatcattcgcgaactgtcttgtaatgcgattgatggacacaaagaagcgggaaatcagaacccgtttgatgtccagttgccaactgctgttgatcctcgttttgttattcgtgactacgggatcggtatgtctcctgatttcgttagtgatgcgtttaccgtttacttcgaatcaactaaaaatgattcaaacgacctgatcggttctatgggtctgggttgcaaatctcctctttgctattccgatgctttcacggtggaatctgtaaaagacggtatcaaatgcggttacacaatctatatggatgatggggaaccgttctgcgatcctctgtatgagattgaaagcgatgaacctaacggggttactatcaccgttccggttaaggttgaagatatcaaagaatgggaaaacgaagcagcaagggtatacgaatcatttactgatattcgtcctaactttgttggtgcttctattctcaaaatcaactatcagccgaaagaagcaaccaacgatagcggggtgatccgtcataaatcagcatacactagcggtgtatatgctcgcatgggtaacatcatttatcctctggataaagatttgtatgatacctcgatgttctattgctatacagaaagccagtatacgtatattattgacttcccgatcggtgaacttgatttcatgccttctcgcgaagagttgagtatggataaaatgacagtagggattgttaaagaacgtctgaaacaaatcagccgggtatatttcaatcgagttaaatcagaattcgataagttacaaaccgtgcgtgataaactgacgtggttccattctctgccttcaatggtacaaaactttgttggtaaagatgctaattttcgcatcaatggtgattctattggctggatccatagcgaactagtcaaaccaaacaaatataatgatgattatgttgctgggtattgggcgaacgaatacgacggtaaagatgcatggtatcaggtaactggtagcggaggccgctggagcaagtataagccagaaacaaccaaacgccaggacatcacacgcatttattatccgtggaaacagaagaaactcattctgttaaaagtggataccaacacggttaaaccgtatatcgtcgggtatgctaaaatgcataacctaagccgtgttagctttgttgcatattacgatagtgattcaaagcgtgagattgttaatgatatcgttcggaaaggtcattttgatgaatcggaaattgtgtatctccgtaccagtgaaatgacaaaagaaaaagagatctatgatgcagatcgcgaaaaatcaaaagcgctatatgcaccgaaaaattcagaaccgcgcccaaaaaccccgaccgtatatcgttatgagttggatagtaacggcaatctggcaaaaacttctctgtttatgacaaaatcagagtttttatcactggataaagccccaggtgttcggttgtatggtattgatgaatatagccgcttagatggtgaaaatcccaggttgtctatggattcagcaatgaaagaatctactttatcgcgtatcatgcgccatactgggatccctgttgtgtttgctatacgtaacagcctctggaagtggatcccggattcaaatctggtatgctttgatgatatgctgtgcaagcagtatgttaaatccgaaaaggcattgaaagataactgcttgcctggatggattgggaaggatcactcaacagaaacagacgcattgcatagccgtttcggtgtatcgcttgatcggattgtgaaaaaccgatataatgaaaaactgtataagattgttgataccctcgaacgtatagtgtgtctggaagggtatgagaaagatggtaaaaatctttccagggtgcgttgtccgattctgcgtgaatccatagcatcaatgcgtgttaaacgcagcaatatgaaaaaacgtgttgatcaggcatgggaaatctttaaatcactaaacccgttactggcttcacttgttgaacatagtgattcttattcaattcgtccgatttacaacaacgaaaagaatctcagtgagtttaagaaattaatacggtggaaataatggtcaaaattcttgacgaagtacaacagaaagctatctataatggatggttgacgggggcaagtaaaacagcactggcccaacagttcaacgtaagcgcccgaaccattgggcgcgttatcaaccgcaagttagcggagttccctaagaaaaggaacgtaaaacaaaagcctaaagtatcagacactgtaccgcgtatgatcggttctgaatcgttcattacggttgtatacgaagggcgcgttttcatggcgggtgaaacacatccgaactttaagaaagcgcatgaaatgctgaaagctggtgatgttaaaggcgcggtgcgttgtttggatacccaggaagcgatccgaacctatagcaaaggcaacattaaaatcattggtcatcagcttctatataaagatgtagtgtttgattctgatatcactcaacgaatcattcgcgaaatgtataacgatcgtccgtatgaacacctggtaaacttctttgaacggttgatgcgaaacccttcacgcgatgcggtataccagctttacgggttccttgtacataatgacattgaactgaccgatgatggttgttttcttgcctggaaacgtgtacgcgataactataaagatctcgcgactggcaaatttgataatagtcctggtgtgactgtatccatgcctcgaaacatggtagacgaagataaaacgcgcacctgttctactggcctacacgttgcggctaaatcataccttccacattacgggggcggtattggtagagtcattcaggtaaaggtggatcctgctgacgtagtagcgatcccagtggattacaataacgcaaaaatgcgtgtatgccgttataaagtcatgattgatgttacctatggttttagccattactaactaaacaaccgcgcctggagagttctgggcgcataggagactatcatgaaatttaaaaacatgccttcggctaacgaaacccgcgcgagtggtgaatctattctgaaaactgcccgtgaaatgtgggccgatgaccagatcgaatctggaaaaggttacgtatttcgtaaaggatttggtgcattttatgttgcaaccacctttatagtggggtatacttgtttaggaatcgcgtggatgcaacgatatcttgaacgtgctgttctttttgtgatacgttttctgtttacattgatcagcgtagtgattagcatcccatttctgagcatcgccttgtttgttaacgtaaaaacaggcgaaattacaaaattaggcaaactggtatctaaaaaatatgaaaagaattctgacaagacttgacattcacaaatatgcaattaaaattggtgacatgaaacgcggaaccttcaagaaattcgaaggcgtggatctgaaagaaaacgggttttacctggtagttgatgataaaacagggcgcgtagtattccgtttctacgtagcaccaaatcaacgccgtaaaactggtgctagtcgtactctgttacgtatcaagcgccgcgaacacgaaccgtctgcgatggttgcgatgctggaaagtgcttctctgtattatgtagcacatgacaaaatcaaaaacctgttcggtttcccgaacctcaacggatcaacgttcgaaagtgctattcaaatgcgttatggtgctggtgaaaactacaccgagtggaatcgcgcactgaatgacatttatgattttgaatttcaaccatattgatgtatactgattaaaactaaccaattgagataaattatgaaactgtttaataaaattcgttctgtagatgaaatcgtagcaactttcgacaaaaccctgtctgaactggaagcgcgtattgctcacgataatgagcaggttgcacaggttgcagcagatcgccaagcagcagaagaagaacatcagcgtaagctggcggaactggcttcaaaagaaagcgatcatactgcaagcgcaacccgtgccggacgtatcgcagacaagatccgcaaactgctggattgatacaggggcgaaagcccctaaatatttttctttaaggggcttatatgaataatttggtagcgaaacatgcatggattaaccgcgcttctactcaccgcgatcgcaagcgagcatttaaagaagcaaaacgtaaacagaaacacaaaggtaagtgtgatgaaaaccgctttgatcattcttgaagaaattcctgaaaatacaacgctttacaaagtcgaaaccgacgatagcgaagtaattgagatcctcaaaaccgcccacgggcattatgtaaacggttccggtaacaccaaagagcaggattatgctgttgatgttgttaaccttatgttggggccgaataccgatgacaacctgaaatgggcgcttgaatctaacattcctgaaaagtatgttggtatgttctatcagtgtaacatcgatagcaaatcaccgtttgaaccagaaaagaaaatcgatctgattgttcgcactgggttcttcttatgagtacacaaattctgttcagtaaagaagatccattaggtacggaatcatcggttcaacgcttattctggcatacggattatataaaaaatcgctgtcgtggcccaaacaatacatggggaagcaacaacgatattgacaaagcaaaaatttatcctcgcggaaaggcgtactggaaaatttttgatattcatcttcataaagcaatgaaagattcgaatgaatgattaaaaagcccttgacttcggtcgggggcttttgctatattagccatatcgaaacgagataccttttaaggagaaataccatgactaacgcaaccgtagttactacaacttacttcatttcttctggtcgtaaaaatgcaatgtataccttgcgtgttgagcgtagaggcggcggttatacttctgataactatatctgcaacttatctaccgatccggagaaagcggaagcgaaagcgcgtgagtatttcgaccgtgtttcagcccgtttaactgaaactgatactttcaaaatgatattccagggctttgcagatttcgatctgttcgaacgtcgcggtaaactgtcagtcttcgatactgaaaaactggaactactggaacaagggatcatgccgattggcaaacgtaaaggcgaagtaattgcagaaatgccaatgtttactgttctttggtgggctgaccagtctaaagaagacaacaaaaacagccctgtattcgatgctgtgtgcgcttactgcatgggtgttgcactggaaaaggattatatcgccaaacgcgaagaaatccgcgaacagtgggaacaagagcgccaggaacgcatttctaaagctaaccacatcggtgaaatcaaacaacgtctggaaatgaccggaaccgttgagaaagtgatttcactgggatatactcaagtttcttactacacttctgtagaaagattcatgaccaaaattaatgttgatggtaatgttgttgtttacttcggtaataacattgcaaacgaaggtgatgaaatcactttcaaagcaaccgttaaagagcacggagaatacaaagacgttaaacaaaccatcgttcaacgtgtaaaggttttataatgacatacgaagatatgcttaatgaagtgtgcgcgggtaaaaccgcgtaccgtactaccaatcctgatatgattgtgtttcgtgaaggggatacaatcatcagacgtacacaccgcaagtgtgaagtaaaccaggtattcattgccacggtagaagaacaaaaggctactgattgggatatcgtcattgacgaagaaaaccacgatgagctagatcatccgatattcattttgagtgaaactatcggaattcgaccattcatgcatagaaatttttgggggaatccatgacgttcgatgaggctatgagagccgctaagagaggttgtaaggttgcgccaataggtaggccattcttcgtgtattatcacgacagcgctggatacaggcgggttacattgggggtttcggcaaggaatgaagattatgttccggatccgtgggacaaattgaaagtttgggatatttacgagaaaaatagcccggtgatgaacttctttaaagcaatcaaacgggctattggaagatcacacaatttaacaccagcattacgttaatcacctcgctcgacctaaaatacgcgcggcctgtccacatatgatgtttatcttcatatctggtatatcaggccgctttgcataccattccatcaaaaccgatccagaatagtagttatcaagattgaaataagggcaactaaaagtataagctactggcacaaaatcacgtgtcggtaggtaggaacttgctgtagttgatgaatagtacaagccatttatatgattcgtgtattcttcggatgttttatcgatcggataaccaccgaggtttttaggatcgatctgggatggtaattttccctgatattctacaatgtcaacaaaatagtttatattctttggtctgaatgccaataccgccgaaaaatccgcgttggaagtaagatgaactatgctcaactgttccaacgcggattgattaaacttttctgttctttccatttcgatagcccttgtatcgactacaagggcaccttttatcatcgggaatatatcagtccatttgtaccaagttactaccataagaaacataaccattattagaattatttttatcagcaattgtttccatgttttcacacccatcacaaacgatattacccgatcaaataaggctagtttatctacgggatttctctcagccattttataagactcttcttaggttactataggtatatttaggatgcaacaaaaaggctaccatataggtagccttttaatatatttaatagtatgaggtgagtttgttggtttatctatcaaacatattctaataaagcaccgaactgattatccattctagcttcaaaatacccattgaggccaccagcgttttcgcatctatatcttctccaaccgtcactcatagtagttccactgaaataaacatcatactggtctccgccagatgcattaaatatagacactttaactcgtcgatcagccccatttaaaatagacaaacaataaggatcccctttaatatttgtaatggctactaaagaccctacttcaccaccaggaaatgcatttaatgttggctggtttgctgagtctcctatatttactgataaccctcttttaaagaatcctctatatctagatggatcgccagaagaaccttgtgcatagttaattctgaaaattaaatggaatacgctttgtccaatcatattagacatccaaaacggtgtccctattcttaatttggccccagcttgcaccatccatgcttcgccagtttcagcctttgccgaacttccgacccacggccctgttactgccatagttatttctcctaaaaggggccgaagccccttacattatttcagttgagatttaagctctttaacctcagcagaaagctctttaacagattcaacgagaagtgcaattactgagttgtaattcagacgcaataaacccccgtctgcttcaatatcctgagtaactgcttccggaagaacttcttgaacttcctgcgcgattaaacccgcagaacgagtagtaccaccggatgtgttgtgaagctcataagtattaccggttagtttttctactttttccaaagcattttcaataactttgatatccgatttggctctacggtcagaacgaatctcgacgttatcgaatgaaccattacgggtacatatgaaatcaccaccagcccggaaataaaagctgttatcttgcccatagccgttaacattaagaatagcttggtgatagcttcctacatattcttggaagtataaggaaacataagcaccattactaaatctgcttgttaacccagccgtgtttaaataagccccactaccgccaccagtgtagttagtagtactattaattccgttaaagttactaatagcacctgggaattggcaagaaccgctgttccagaagttccacgttggcccagagacaccacctgctcttatactaacgttaccaggctcatcagcccaaataagtcctttttctgtaccatcagctttacggaagaccaaatgactgttaccagtgttctggacgttaaccgaagttgatacaatgaactcttgattaaatctagcccttccatcaacagttaaaacaccattaacagcagcgtctcccgtaacccaaagtgatgtagtttttaactgatcgcctgtaattgttaaccgcccagttacagtaccacctgctaacggaagatacgtgtcgccagcattactaatagcagaagcaacccgatcatcaacgtattttttgttggtcagatgcgagttatcagtaggagcttggcctgcaataacaaaattaccagaagcaacgttgatgtttccatcaacaactaatccgccgaacttaacgctctgtccttcaccaacaccgaggttattacgagcagcagctacagaagttgctccagtaccacctaaattaattggttgaacaccagcaacaacctctttccatgcagaccatgtaccgttttggcagtatcgaacatatgtgccttcaacatcaccgttctttgtagtaaaggtctgcttacatgtccaatcggtatcagaaattttacgcaaagatagaacttcaagaacaaagttgccatcagaggtaggtttgttcgatatattgtttccgccaccagatgatacacatttatacaacagacgagtacctaaatcactgcctttaataaccatgttgttaaggtcattagtcttatcagtaatatcaactgcgtcctcagcaccacgatatgtctggttaaaaaccaagtccccttctacctcaaggccgctagatttaactagaatatatttactaggagctggattagaaaccgcagtttgataaccaaattgcacgtatccttcaggagtaattttaagcattgctacggtagcaccgctgctaccaattttacgtgcaagggttaatctgctgtacttatcagagttctctgaacctaaatcaatcattgatccattagggttttcgacttttaagttagctttaatagtcaagttaccggtcatggtgtcaccggttttacttacttgcttattatcgccagaaacgatgtcgtttttaatagaattcaaatagttgttaaggttaccgccaaacatcgagccagatgtaatattcccgtctttggttagcattgctgctccaccgactttaactgctacaggaacatcaagtcggccatcagaacggaaactataatcaccagcagaagtacctccagtggtttttgcacggatattaatttgtcctaagtcagcagtatttggagttgcccaaattacaccacgttcgttaccgtctgttctaaaccatacatgagcgtttccggttcctgcgttaacatatactgatgcagtaccagtgccggaagcatgtaaattaggaacagttaaatcgccagtcatggtatcgccggctttcttaacttgggtatcgtttgtcagattaccaagtccgacgtcagccttagatggcttatttgctgtaccgtaaagttcgttgtagttgacatttcccgcggcaagacctgtgttgttaattgcgtatacacgaactttagcactggcgtagtcgatattaatagctgacatggtatccccagcattcataaaaataccagagccatggctataaagaccattttgaacactaaccccagatttaatagcaccgcgccagaaagtgccaccgtatgcttttaagcgggtcaacatatccgcattagagataatgtcgttgatggatttaccaccattaccgcctaagccataagcgccattttctaaaacattaccagcaccttcgccgacatcacgggttgcagccgtacccaaacctaagtttgtgcgagcagcagaggctgtacttgcgcctgtaccacctttagcaatagacagaataccatcagtaccattgtcaaggttaggtttattaatttcgtcatagatacgaatagccacactctcaactaaaccttccggagcagttgcagaagttgtgtaaccagtaggcagataatattcagtaacagcaccgccagcgatagacagcagagcaactttaacaccaccaataaacgcgcgttgagtaaaccacagttctaaaccctcagaggtacgaaccagactataacgcatttggttagtgttatcaattccaggatcgccgattcgacgaatttgcagataagaacgtatgttactgcttgttaatgtcgatggaatgcttcgagcactacaatcgataaagtcgatagaactacacgtagaaccatagttaccgccgttagtcaccatcagttgcaagcgactctgacctgagccgggatcttttaacagagcaactttaatccaacgagattcgttgcctgtagttacagggaaattatcttgctcaagctgacgcgcgttttctacattagtcagaagagtaccatctttaccagggcctcttccatccgtggcataataaacctgggaatttctgaatgtcagattgccgtcattagttaattgaagaacgccagagcctctcaagtttttaatgtaagcgtcattagcacctacacccatttcaaggacaagagagcttccgttgttaattttaacggttttattagtggataatcttaaatccccaggaagagtagtattaccagagctatcaagtaagactaattttatggcttctacgttaccagcaccgcgttgtacaaactggattgtttcagtaccatcgtcaatagtaccgatttcaagaatgccgttattgcttgtaccaccggaaccgatgtaccatccatcattgctggcacatttaccgacgatatgacgagttatttcaccacttaaattctcgttggtgaaagtaatagttttaccttccgctacggtaacggtatcattaagagcactaggcccatcaactgttaattttttggtatttgtttctgggatacctttacccgctaactgaacgatcgaagaaccatttttcgtgtaaatggcataatcagccatgttgatcgccagttcaccatctgcaagctgacttgtagtaggtgttttccccgcaactgtgctacgtaggaattgaattttttctaaatcagccatgtttcaccttaataagatccaaaatctatgatagtccctttagtaattacctggtcgagccgtggtacgtgttcgggacgggaagccgcgcctgtgctcgcgaattgcggggcagttaacagccctgtcattgtatcgccagcgcgtaataccctgctattagcatttgttgtgacattatttatctgtccatcaacataactttttcgtgttgcatgacttgcgtcagtagggttagcggttgtaatactgatttgcttttcaaccgtaatattaccctgagtgtttaaatcaccatttcgagcgttgatgactaatacgcgaccattagtaccggaagatgaacgaataccaataccataccatgatacaagatcaatgttggcttttgataatgtcgcgccatcaccatcaccagaatataaaccgttctggtcacttccgcctgtgaaagtagcgttaatttgtagcccctgtttaaaggcaactacacccaaatattgaccaccgcttgctttagaaacgaagtcgttatttgatgcttgcggtttatcgttttcagtataaaccttatatccgcgataggttagagtattaccaaccggaaccagcggaaatgtgccggagtgccaaataggtaaacccccgactgtagaaccagcttttaaatctgccataataacccctttttacatatttataaggcccgatgttccgggcctttgtttatgcatcaacttcacggaattcggaagcagaataatcaccacctggataaaccttagtattaggcaattcaaatatatacggtgttccgccatcgatcatgttgttcattctgataccgttaaccccaaactgtgcagcaaagttttgatcagcttcggcagcagatacctgaaccatcacaaagttacggatcgcagataaactatccgtagcgggtttaggataacgagatacagcaacgttaaatccatcacaaccactagggatcgtatagaactgttcaaatcgtaaccactcatcaggtttatttgcaggaacttcaatcaccgatgatgaagtttgagcagtacccgtaaaccatcgaacagtaacccttgttgttgatccagcatccaataatgctttgctggcgtaaaaatcaccagcaatcatcatagctaatccaggagccataccataatcagccagtttagagatcactgggtttgcaacaggatatactttatattcagacccattggttgaattgtattcttccgtatcttcaacagatcggaaaggtacaccagttcgcccaacatcaccaacgttatcatagacaagatcgattgatgcgcgtgaatcttcttttaaaactccatcgttcgcgtaaaacgattcaatcagtatacgagattttgaagccccatacaatgcaacatatgcagaatttgggaatctctgagcgaaatcagcgccttgccacataacggatctgtttttagcaaaccaatcatcaacgatttggcttgttttgtattcaccgttagtcattatcaaatacagcccagaaggttgagcatccatatattcaacaaacgctttgtttgcagttgctgaattatcattcgataatgtgaaggttttaattggatcaactacagcattgttaattctccatacgttgatcccaacactaggcggtgtccctaccgccttttgatttagtgtaaactcatactgattaggaaccgcattgggatgtgttgcctttgcggttattctgtaagttacgctgtttgtttccgatagaatttgcgtttctacaaaatcggggccgaaccccgccattaagtttgacattatgccacccactcaaatttaactgtctgagtaaccggatctgggtaaatcttaacattaccaactttgatccaatcggtaacagtcatgtttttaaccgtagtaccaacagcagacgttgcaccaatctcaccagcagtaggcgggttgttgctagtatacatgcggccccaaccatcaaatttacccgtaattgggttcatttgacggatccagaaggattgcgccagcgcattaacaccagtaccagaggtcggacgaggtgcccaaatctgataagtgaatgcagttccgttaccaaactgcgttaaagtacccggtgctttaacataggtataacgggtcacaatcatgatttctggattaatcggatctggttcaagaaccggaaccgcataaccaggaagcaagttgtattgtgccgatgctgtgatctcagccgtccagttgcccctggatgcttctgttactgcatccagcgttgaccaagccgcttgacctgcaatgataattgaactgttgcttaccgtcaagcgcccagacatcgtatcacctgctttacgtacatacgtaggattcagcaaggtttgcgcgttcttctcagtaaagactttataagagttccctgattcttctgccaaaatgttaccagcgtccgaagttaggatcttagttgtcttgttgttcgtacccatagagagaacagaaccagcagccgtgatcactgtatcattacccagagtcactttgccaatcgcctgaatttcaggagcctggaatttaacgttagctacaacgccgcgagtatcattatacacagaaagatgaactgtgccagtgttacccgttgagatcattgcaatacgcccagaggatgaacttgcttgaattgaccagtcgttagatgaaccgccattcaaacgaagtttacccatcgatgagccatcaccaacgttcagatctccactaacattcattacccggaaactcgcgtcggcggttgagttaatgttagcctgtacagtggtttctttcgttagagtcaatgccccgttaaccgtctgatcaatatcacgacgaatgaactgggaagaatccagattatccagcttatcagcatcaaccgctttagcaccgatcggtagatagtgtttcagtgttaagttcagttcatacggagaaacagcaacacctacagcggcataaccatcatccggaagagtagaaccagccacatcattaccagaccaagtaccaagccccttagacagcttcacagtaccacgtaccagatcggtagcttgccatgaagtatcaacctgaattgtatttttcaagttcttaggagaaacagctttgtttgcaacggtgccagcggtagtttcagcagccgtagccacctgaatgataccttctgcgctctcagtcgctttcttagcgtgtaacttcttaggggtgacaaatactgtatctaatgtccctgcgttcgtctcagactgcgtagcaacgcgtaaagtaccacgttgagtttcagttgctgattgaataccgatgttaaccgtagtccagatagtaccagattgagttaacccgtcagcagtagcaacggtaatatgacttgtattgtccagataacctttcagtttagacggtacgatcgctttattcgttacagtacctgctgatacttcggcagtggttgcaattgcaatgatacctgtcagcgtttccgttgcagcacgatcgttaagcgttttaggcgttaccgctcgcgtgtaatcagtccctgcgttggtttctgtctgggtagcaatctcgatcaaaccaatacgaccatcagtagaggttttcttgtgcagcatttccggagtaacaacggtcggaacgtttgaacttgcaacagtaccgttaataacttcggtttcagaagccagccatacaacaccagattgtaactgagtcgctttatactcacgaagagttttaggcgttaccgctttctgataatctgaatggtcataaaccccagtaccagcctgagaacgatccgtgttggtgttaggagcaccaccagtagcaacaagggcaaggataccagtcaaggtcggcgatgcaatacggttatgcaactttttaggggttacaatagtaatatcatcggtgcttccgttggtttctgcctgagttgcgatttctgccaatccacgacgggtttcagtcgctgttctttcgttcagcttcttaggggtaacaatcacatcatccagatagctatcggttgaaagtttgttaacctcagcagttgttgctaaccgtgcaataccacgacgggtttctgtagcagttttatttgctaacgtcatcggagtaatagcagtttcgtcgttcgggttgtcttccaagtttttgtttacttctgcctgtgcagccagagcaataacaccagtacgcgatctgttagttgcgtcaacacgttcaacgatcggacgataattagcaacaacccattctttcgtagctttcatgtaagaaaactcgatatacgggaggtaatcactagcagcattaaatgctaatgaagttacactaaaccaatcatcaggcggatagtctttgcgctgcgggaactgcatcatatttttgttggtgcggatcttgtccgttgtaccatctttaactttgattgtacagttctggtttttacccatcatataaagggatacgtaaacgcgatcaccatcagcaacatcagttggaagggtaactgtaacgtttggtatagtcccagaagggtttgcagtaacaaaaacgtaatcgttaggaactgtgtttaaatcactatagatacgacgcagacgaacacgattatcagcatcatatactttccattggctattctgtgcatcaaagatgaacataccaaagccagatttctggctagttaccgaagtaacaccagtaattgcaccgtcagaaatagtgtgtccactacctggataaatctgcaaaacggctacgttgatagagttcattttatcagcgtcataggttgtgatcacatcaccatcatttgcatatttcggcaactggagagtgattttacccgtagcactgttacggaaaactgtcataccagattgtaactggaatgaacctgttccggttgcgttcacgatctcagaatcgcggttatccagagtttcagcaacacgccatacgttaccgttatagataaacgttgcgatcatgtacgggtgggtcagtcgatactgtgctgattgtacagtacgtaaacggatctgacgggtgttagacttaacaaggatactgttcacacctactaaaccaccgcaatctttaaacgtgattacgtcgccctctgtcgggttgtccggcagcaggtacagaagttcagtaaagcgtccatcagccataatgtaactaccagattcaataatgctaccgtctggagtggttacgttactataaacccatttcgggtcattacgagttgcgatccatttggattcgtcgaaagccccagcaggggaagcaatattctgttttgcgtaccagatacgacgcgcataaatgatcgccatgtcttgagaatagccacgggtctggtcatactgctggattccgttaaattcattgaaaaagtcaacgttaacgccgtcactcagcgtattacgatcagccttcccaacgttgataactttttcaccagcagcatcaaggccacttcgtgcgcggaatgatttagctaccattatcttttttcctatattgtattcaataccaatatttatatacaaaaaatggcccgaaggccatttaactgattatttattacttccgaaccatctttttatatttcttgattgtttcgtctgtaatctggtttcgcttatatagaggggttacaccgaacgcctcaacaccacgttcattaaggatcgttgctacgatttcctgtctgataaaccagcgcttaaccttttccggaaactgttcattgatacttttaaacagtttggcttcccaactatccagcgtttcaggatggataatatgatcaaacccttccagaaaatcaatcgttgttgcgtgaatagcgtttgctactttgcgaatgtattctttattcatgcttcacccaaatactctttcaattgcatataaccgccaataaaattaccatctacaaagatccgagggtaagtaaatgccatgcttcgactacgaacacgtttcgctaactcttcaatgcggggtctatcgtaatcaaaccccacactgttatttgctggctttagaacagaataaaattcgtattctaatccatgctcatcaagtaatttccgagcttcaatacaaccataacatttatgaagcgattcgggaataccgtaaatctcgattttcatcaattgctttccttcgtgccggagtgattttgctaatgatatctttctttgtatcagaaagcatacgctcaatcaattccaccgcttcaagttgttgatgcagagaaagaaggttgatgatttcctttttctgttcatcaatagcagcttccttgtcaatcgcgtacagcttattatcaccgaaaacatgctgtaatgcaaattcaagtgcctgtgaatccgtcggcgctgatagtacagaaatcgaagtgatccgcttgacaaaaggataatcaaatcgcagatcattgatatcttgttgaacaggttttacagtcatccacattttaggatcggaagatacgaaatttaaatcaggcgcggcgatttcttctttagtagcaatcttcggttcttcttccggtaaatcatatggtttgaagtatttccagatatggctagggatctcatattcgaaatcatcttgcagaacataagcaatgtcctcagtatccccaatcgcaatacgatcgattgtaatatagccgttgtttttgatcaattcagctaaagcatttcgccaggttttttctgcaaattctttagcgtcgatgttcagggtataagatttaccttctaataattccatgtgtcacctcataaaaaagggtgccggagcacccagtttaatttacttgcttacttcggctacttttcgagcagctttgctaaccaggtcggaagcagtacgcagattttgaagcgcgtcgtcatgggctttaaccgcttcttcaagctgtgccattgcttttgcgatttcttctttcttagccgcttcgtctacattgatagcgatagcgctattaccggaaacgctaacaggttcatcaacagttccggtcgccagttcacggaagaacgaacgttcagaatcaagcagatagtaaccaacaattccggtcggggaatcaatggtttctaccgttttgctcaattgatgatgaccgagcgaattcgtatggtaaacggtgtatataccattactatgttcatcggtatatgatttgatcccagggttagcgccacaacgatttttaaattgctgcggtttaaccagaacatacgaacggccttcaacaaatttagtcggatccagttcaaccgacattgccgaaccgccatcaagcatttgatcaagatcttcggttgttggtgcaacaggcgcaaccggagccgcaacgttggcttttttcggtttggctttctttttcttagctggagccgcgccaacttcgacgaaataacgagcttcccacgaacgcagagagatataagtcatttccggaggatgttcaattttgaaagtatctgaatgggttttcgagataatttttacctcgttattcaggaatttttcgatctgcttcgcctggatagtgtttgctatgttagatccgccatgtgaattggtagtaaacccttcacggtcaaccagtttgtaagttttaccaaccacgaacgttttcagttcatttgcttgaactgtccacgggcaagaaccgcgccctgtattacggatggttttcaggggaatgttccacttccagcaatagttacgtgcttctttacgggttttgaaattcaggatcatgatattatctctcaattaaagttaatcgtcatttacgatgtggtaagattaccatagttacacattaggtcaagcaatatttttaatttctatcgaatttttagcgaattcgatcatacgttgattatctgaaccgcgaaacggttttttagttggtaaatctttttcatacttaccatcaatcagaacatcaatgtaaggaagtagcttagaacgttctgggtcggcctgtaaagcctccagggtatatcctgtccataaccatacgtttttctttggaagttccttagaaacgcgctcaagcagttttaggatagtaggatagttgtcacggtaaagcggatcgccgccagttaatgtaagtccatcaacatgcggattactcaacagagaaatcagatggttttctgtctcttccgtgtacggtgttccgttgcaagggttccacgtcgatttgttatagcaaccttcgcatttatgattgcaaccagtcacaaacaaaacaacacggatcccttttccgttgaccacatccatattatagatgcggtcgtaattcatgctttttcaccaaacagacgttctctgatcgcttcgtcaataatgtctgggaactgagtgttaacccgttgcattactgctttgcgtacagtaacttccaagttattcgagacgcgagcgataaacgcggcttcgtctgcaataatgttttctgttgcatgagcaatcgcctctttctcgatatctttaagaatggtttggcattgctgttttaccgattctttgattttaccagacagttcgcgaatattgccatagttgacatcaaaaacattggaatacccataacgtttttcgacgtaatccgagaattcagatttgatgatctgtgtaatttcggatgagttcggcattagaacagctaactgttcctggatctgtttgtttatttcttcgctaacacgcttaccaactacgctattcaccacgtttttgatgatagcagattggagatctacgcgagcggttgaaccttccggaaacaggcttaacaccgcatttgtgtctaatttcagttgaatcatttcatgttacctttcttcacgaggatcagttctttgatccgttcaacaataacgatgtattcccatttagctaacttttgggtatcacaccacttttgaaactctttcatagcctctaagtgacctttactccagtacatttctgcaatttcgttgcaaagagtttcagtagcagtgtttttgattttcataacatcctccttagttgacaagaaggatgttactacattcagatatacaggtcaatacttttatggataatatcgaatgaaaaatgaaggatgtccttcgtagttcacatcaacagcaccaattttaacgattgcatcgcggcgggtagcctcttcgacaatctgatcggttaggcttacaatctcaccggatacccaatgcaatttgtgttccggatctgtagccccacagaaaaacagttcaatttcgttagcttccagttcacagcgtagatagttcaaattacgtgaatttgttttgttgaaaatcataatattgcctcaaagttaaattatcgtatatcatctcgaatcgaatcaagaacaatgtaatctatcccattcactcgcttaccacttggtttacgatagcgaatgttacggcctttcatatcagttgcttttgaaatgtagaatgactttgtttcgcgtagccattcactccattcctgatacgaatcaccgacatttcgacgcactttagcgtataacggaaacatcacaaagcctttagtttcgcaagggtggatttatggatttcagcctgtttttctgaatttttcagattgcgttcagcttcccggatcaggtaattccggcgagagcgcaacaagttgagaacatctttcgctttacgggcgcgtttaccgaacagatgacaagtaccgagattgtcaagcatgttcaggagatcatagatttcctttgcttcatcctcttttggtaataacggtttctctttaacaacaacgtgttttttgaataattcacgatcgctattagtaaaaatgtaagattctgattcaaactttgtaccaaagtaatcagtaaatcctttaacaccgaatacgtcatactcagtaactttaatagggaatactaccttagacaaatcattagccgaaaacgaaccgccacgaatagctaagtttcggtatgcagtcccaaagcacgtatcatcacgaaaaacaaatttatcttttgtccaatacatcataaatccctcaattttgcgccgctaatgagaacatctttcatttgttttgcggtgcggatagtagttgccagttctaaagagacatcattacgatatgctgtaccgtcttcacacagaaccaaaccaggacggcccttgatagggttgatgacttcaacgcgagttggatgattttcaactttgtagcctaatgcaaacgcacatgccactacatcggtcattttcttagtcagtttcataatatgtctccttttcgataggcccaatataacaaaagccctcaaccgaagtcaagggctttttgattaattttgatgcttagtgcgatgcatcatttctttgttcttaccttcgttgaacccacggacagcaggagcacccaaatagccgcatgtacggcgcgtgacgctcattttttccggatcatggttcccacaatgggtacaatgaaaaccgtcttctgttggcttaaattcatcatccgagccacattcaaaacatttatcaaccggaaggttagttccgaagtagtccagtttatccattgcataatcccatactttttcaagggcttctaggttgtttttcatatcagggaattctacatagctgatatgtccagcagttgcaatgtaatgataatcggcttcatagtcgattttctcgaacggtgttaccttgcggtcaacgtccagatggaaactgtttgtataccagcccttatccgtgatccccttgatacttccgaacttctcaaagtccagcttacagaagcgatggcagagagattccgcaggggttgaatacagactaaacccaaatccggttttctttttccatgcttcggtcgcagcgcgtagatattccaggatcagtctacccatgttctgagaaccgatccggtcgaatgggtgctgtccagatccgaaaagcatcagggtttcatgcaatccgatgtatcccagactgatagaactacgcccatttttgaacagttccagaatttcatcatcgggtttcaaccttacaccaaacgcaccttctgtataaaggatcggggctacactggctttaacaccgcgtaggctatcgatacgagtcatcagggcttcaaagcacagttccagacgttcatcaaggatacgccaaaatgcatcatgcgcgtcttcatcttcctgtgcttcggcttcaatcgcaatacgaggaaggttgattgtcacaacgcccaggttattacgtccatcaagaatttcattaccgttatcatcatgccacacgctaaggaaactgcgacaacccataggagatacaggaacgctagaaccagtaatagcacggttgttagctgaactaatgatatctgggtacatgcgtttcgaagcacattccagggcaagttgtttgatgtcatagttctgatcctctggatcaaggttgattcctttttccatgaacataaccagtttagggaataccggagtgataccctctttacccaggccgcgaatacggtttttcaaaattgctttctggatcatgcgttcgtagtcgcttgtaccagtaccgaaagtgatggtaacaaacggggtttgtccgttggcagtatgcagggtgtttacttcatattcgtaggactggaacgcgtcatacacgtctttttcagtcttctcgattgcatacacataatcgttatagtgttcgataccataatgttcagcatcgcgcagatgtttaaagaacgtcatttccacgtatggagccagcaccttatccacgtttgcaaaggttgtcccgccgtactggtgagaagcaatctgtgcggtgatctgcgccatgagagcggtagcaacaccgatcgatttaggcggttcgatatccgcgttacccattttgaaaccattctcaagcatacctttcaggtcaaccagacagcagttagtgtaaggggtgaacgggctgtaatccagatcgtgataatggatgtcaccggaatcatgcgcttctacgatgtgtttcggaaggatatgattacgggcgaaatgcttcgccacaatacccgccagcaaatcgcgctgtgtcgggaatacccttgcgtctttgttcgcgttctcgttggtgatctctttgttggacagattcaccataccggagatatctttgaacagcttacttttctgttcacgggcaatatcgcgatcgtggcgatattcgatgtatgcacgggcgaccgctgggttcgttttcatcagggattcttcaacgagttcctggatacgggcgatcttcattgcgctaccatcgcggatctgattgtactgaaccagcatgattgcggcatcagcatccgtcatagtcccgccagctttatacacagcgttgcgaattttttctttatcgaaatcgacgtttttaccgtcgcgtttttctactttcatttcgttgccttatggataatatctaaattgtgtccaatctcgttaagatatttgatcagttcaaccccgtcaacaggtatatcccgtcctacaatctcaaggagttcccacatatcaataacggtgataggagaaaaattagtcaatgtgcgaccgcgatcatcaaacatcgttcggtctttcggtttgacataacacaaatcagagtcaccccttccaagcatccaatcatgtagagatatgatctttttgtcagtggaggatatcaacatcatcagctttttcttctgttgcgttgataatcgagcgtttagatatttcatttcgttgccttcattaattgctttctatattttgcggttaaggctttgcgttcgtctttgtcggcgtactcaaagcccatagaaatcatttcggctatcatatccgatttagtaaggcgtgtaaaccatttaaccttatcgggtataaatttgtcgtgcatacggttttgtgaatagtcgcgtttgaggtatgctaccaggctttctagccattcgatataatcaacatcacgggaaaccagaccagaacgattaaatttgtgctttacaataccttctgtaccgttgcataggttacataggaggccgcgcacacgtccggcattagagccagatagagcatgatcatggtcaaggtgatgtttttcaaggtcaccctctaaagggcgaccacataacgcgcacaagccgttttgctgttcaaaaagagcttgtttaatggatggataatctttcttagtaatacgtttagtgagcataataacaccaatcaaataaaggtgttaatatttatcccaacgtgcgaacgtactcacgcagttggtcaaagccgccgatgtgcttaccatcgtggaaaatttggggcatggtcagtctacgagtacctaacaggctttcgagttcagaaatgaccgtttcattcaggatcggtttgccgtctgcgtctttttcatcggctacagaaacaaactcatattcttttcgttttgcgtccaggagacgtttagaattcaggcatggagcgcaattataaacagaagggatataaccaaaaatcttaaacatatgttaccttacattaagtcatccagtgtttcagggtatgtatttacgtcgcgtttctggtagttacacacgtagacttcttgcgttttattttgttcgtaagaatcagtatgctggcctaacagatactttttatcgaggttatgcacattatatttttgcatccactcgatcaggatatcattttgctttcctgcatgatgtgtcacgtttgataaaccaaacttgataccccgctcatgcagggagtcaaggaaagcatataactcgcgttcgtgatctgcgttccagaatttgttatacaccgcatcagtgatcagatacggaggatcgcaataaacaaaatcgttatcgttgatttcaatatcagagtatgaaccagaacgaaattcaattcctgtcacattctttttgaaatgttcgaaacgtttttctgtcataaagttgagggttcgttttcctacagcagcgttaaaatcgcctttgtcgtttgtccggttaacgttgctgaatgaatgcaggatcaggacatagagccataaaggatctttgttctggttgtattcatcacggaatttcagatactcttctttattgtctttccccagccccttcgatgcaatcaattctcgcaccggagacaggtcaggaagcgttttaagacgctcatacatatcaatcagcgtcttatcataatcgttgcttagaacgggtttagggacgtttagcgacacactaaggccaccgcaaaaacaatcaatgaaacgcatgtatgaacttctttcggggaacagcttgaatagttcaggtaatagcgattgcttgtttcctgtgtatgggatcacaccataataactcataattcacaaagccctttttcaaattttgcaatggtatcgtacttgtaaccacgattcactataaagcattgagtttcacccaatttattgatcatgtcaatagctttctgttcgtctttcttacctcttaattgtaaggcaattcttacgatctcttttagtgtttcgtcgttgacttcttccagtttaaaggaatacccagcgattttagcaaaaagccccttgcgagctacaaggggaatgttgtcatagaaaatcacggttcctttgttgtttttgcggatactaaatcccggcacggttcctaatttcctctaaagtgtcacgggaagtaatctttccgttgacatagtatgtgatcatagcatctttccagccttccggcactttctgttccagagtatcaatggttttaaagttaacaccatcagtgatagtcatcaacaacccttttttactctttttccattcagcgccttttggacatttatacacaccagtccacacaccgttaattttgattgcgcacattttcatcgcatatttttgagtgtcgcgggtaacttcttgaagcaatccgccgcccataccaaacgcgatgttttcagacgcccaacggttagactccatccagttcaacacccgattgattgtttcagggccatgaatttcatcgccttgaatgatccttactgctgggtgtagtactttatacccttttgagttcactgtatagccaaagatacggcccagttcttcaagagcgtacatgatattgtctaccatatcaccagaatccggacgaactaccagagtaccgcccttagaaagaatcgaatctttatattctgcgatacggcgaaccgccgctttaaaatcccaggaatcatacacacatgcatacatcccttcaccgaagatctcaatactgtttttgtacgcaaggtcttcgttttctttgccgtaagaaacggtagtggaatgttcgcgagcaggaattgaaataccagccgccatttcaccatcatcaaacgctttctgacaatcttcaaacagagagatagccataatcagcgcttctacggtatcagtaccgaggaagttatacaggtgcgcgaggccaccaataccagcggattcagcagaagaggttccacgtgcgccgaagtcatgcaaacgggtacgtaacaccatatcaaatgcttcaccttcgagatcggaggttttcttgagatatttcttcaacacttttttacattcacgggatagagttgctacggttgaagggaaccatactcccctgatcgccagggtttctacgtgtcctgctaaccacagcgcatttttcccagcatggaaagttgcaaccggatttttaaccgctactggggttccttccggaatcgctctgaattcaagagggatgtaacccagttctgcaatttctttccaacctttgtagttgaagatttcgcgcccaaagtgcattttgtacaaccgattagcaaaatccacgttttccatagtcaccggacgtgataggatttgcgcaaggcggttacagccagccgtaactaattgatcaaatttaccaccacgagattcaatataaaacagcgcctcttcggagccagttggatattgcgaccagtgagaaaccttataggaatctacggaagtgatgatgctgttcagttcttcgaaagttttgttgttcataaacgtactccacgttttaggtttattttaaaatacccgatccagtcgttcgggatggattgtattgtgatatttagacttacaatccttactggtttttctgccattcgaacagaaaactttgtgatacgttgtctttgtgtgtttttctttgcacacagggcaaacaatcacagaacctattttagcagccttagccacttcatacaagttctttacatcaatttgtctttcttttgtgataacccgaccacggaattcagcaacaacagtttcatcacgtacagaaccatcactatactgaactttttgtttactactttttcgtttggatcctgatatttgagaggaacccgataaaagtttacggagttctaaacggtctttataagcaccacgattaacgcagaaatattcaccgtcttcttcgtcatcaaaatcagcccaatcttctaaagcctcagcttcatcgctcatagtggttccttagaaataatctttgttgctcaacaggtaaacccggttatcgttgtagtcaatgtaagcatcccaccaaccagcacaatcaacaccatcaacttccaacgcctggataagaacgctacccgctacgttgtcgtattcgtacattgcatgtaattcatccagcattgcttcaacattggcccgtaagcctttgccgttgttagcaacaccttttgcttccaggcagtatccagcataagttgctttcattacgatttccatgatgtttatccttctgagttagtgtcttgtctacgggagttagaatactactataaccaacccccgtcaacacctttttaccaactaatgtaaaaagtgaattcacttacacggcgatctattttcctttcagaaaacatttcacgttcttcatggtttcgatacgtttgattgtacttactagccagagaatttgtgatcttagcggcgttgcgtttttcttctgtatcgaattttagcccttcttcttccaaccattcagaaactcgttggaatgcatagcgagtacattcaatacccagacaagagccgatatcgtgcttcatatcatagataaggttttgttttgtcgcgtgtttcagaacaccttttgtgattgtatcccgcgcatgttcgatcatcttagtattctgatcgttgataatttctcttgctcgttctgcgagagtgggggatcggccttctaccggagtttcgccgtcagtaccgatactacgtacatgaatcatattttcacctattgcgttattaacagcccatctttcgtatgtttcacgaagtaagggcgcatgttcaattaccataaaaaatccaacgttgggggtttgatattgatccctaacgtatcacacacatcgttcaatacactttctttgaagagattgaaacatggaaccctgtacaacctagccaatcttacagcaatcgcggttccacctttaacacatccttcacgttcttccgcccaaaataaaacaaaatcagttggattgtcaagattttcacgaagaacttgaatcgtgtttcgcgcataccttctttgaacgtattcattctgtgtatcgaagttacctgctacctttctggcttcgtcagcggctttctgtgtgtttaaatctcgaaagtcgatgatatcctttccgtttgagaaaaggccgttaaacccgttctcaggaaggattatacatctgttatccggactatagtcaaacagaaagtgactatccataccaggagcgccgccagaataagccctgatcccgcgttcgttcaaagcacgtccgattttaacagcaatgtttgcgatacgttcaggaggtttacggctaccgatcagggtagccgcttttgcatcaaccagaatctgattaaaattcatggttcaggattttgccccatacagggcgaatcatgttttgggcttcggttacaaacagctttttagccattgctgggtcttcgaactgttcgaggaaaggcccgtgattacggctgatttcttcgatagcatcctgaacagttaagcccataatgcgaccgaaatctttagcagtgatcgaagccagatccagtttcgaaagaacgtttttcacacggttctctgtaaggtaacaaacaaactcatcgagttggtttttgtctttttctgacagtgaaaccggagcattaaagcgggttgctttcttcgctttcttctcagtgaatttggttgttttgcatttgattgcaacgcgttcaccgtttggcataaaagcaggtgaaacaggtttcattacaaaaccttctgcaatgttgccctcttcaacttccatgataggatatacgaattcaccatatactgtattatcgctaccaatgccgctatttgctttattcacaacagattcaaacgtgatcggcagttctttgatctcttcaaaagtaccatatcccaacagcggggccattttcaggccatgagatcgagagatcagcgagcacaggttatcaggaaggaattcgccatttacacggatatcgaatacgtagaaatctttttcgccgtaatcaacatctttctgtacaccgcgccccgcaaattcgccgtagacttgaataaccaaatcatcataagttccggtctttttgagggtttcccacatcttacggatccctggggaatactttgcaactactgctgaacagccataaaaatcttcggctggcttaacaacatcagtacgctttgcgggggtaacggtaataccgtcatcggtgataaagctaaagttagcaccgtggatcttttcacgtgcaacccacacaccgccagtaagcccgttcataattacaccattgatgaacttaccttcataatggttagtcagagaagaatatttcttaaacataatttaacctttcattttcacacgtttttcaacttgataaagtgctttacgcagcaacttcacttttacttcatccagaatgacatcacccttaacgaatgcatcaagctgtgatttttcggcattagcggcgttgataaccgctattgtattttcttgtgtatatcccagacgtggattaatacgttccattgtacgggcatatgggctacctggtttattgctaaacatcttgccggaatactgacaacgttcagttgtcatcaacactttccaatcttccagagtaaggtcaaaagaatggttgttctttgcggcgtgttcatgcttgagattatatgaacgcgcaatacgcagatccagttcaatagcagacgcacgacggcgatgctcgatgagttcagggctaagggccacgatctcaggttcttttgctttacgaaccgcttctacatcaggtgcggcttgatttggttttacgtttgaagtagcaatactagcccaacgatccatcgcagatttacgcattagataatccccgcatcttgaaacgccagcgccatagaggtgttaagatgttcacgtttaaacgggcgaggtttcttttctttcttcatcggacgtttagcacgttctaaattgtacacacgcttacgatggatttcgatcgcttcgcggcgcattgcatttttaacagggagatttgcagaacggaacgcgcggatacgttcaatttcctgtactacctggtaaatatcgccgttatctaacccatgttcacgggcaatttcggcataacctttacgcaaatcattgaatttgaaatggatttgcactttttcggcttgagacagttcggaaatgctacggtgtacaattttcatattattttcctttggtagaatcgatttttgcaactacattcaacacgctatcgtttcggctgtcaacattttttagaacaaaagttactaccgtatacactccagcgctcatgttgaaattatcaacaaacgggatctgctgatcatcaagagtattgaccatttcttccatgtcatttgggtggtcaacgttgatgaaaatactttccgatacatgatttttgtatcgggttccaattcgttcatcgagttttttacacattacatcaactaacatttgtttgtcaatgcctaaaacaccagagtagatcacatgatatagtttcatacaatatccttttccgattcattaacaattgcaaaggaaaggaatgtaaaagcaacccctaacccgaccatccagatagccgttaaatcaccatacattgatgaatacgcgcccatcacttctaagcgatatcccaacaagaaaacgagatacgccaacactttatcattcataattcctcacaaaacgcccatgctgcatggtaaacgctcgcgcctttgtcttcgttcatgcatacaacatcaaccggacacacaaccctgtacagaacaggatccccacctatagaacgtgcggcccttccagcatatatacgagctaacccgatatcagcggtaaagaaaacacggtctaaatttttctttctgcctttttcagacagagtatcagaatcacagggaggcaataacatgctttcaataccagcagcagtacacgaaccgtgataataaacaacgttttcatttctgcaatgtatcgttttcatgtatcctcccttaaaaagatgcttatattatatcaaatggataaatccatgcaagaaatttctcgatctacatcttcttttgttttgttgacatacgccaggtattcatcggtatacattttccgctttctggctattctttcagcagccgcacacatttgagcttctgacggtttataaggcaacctttctccaaatccttcaacagttagacgaacgaaaggaaccgcagaagttataatgtcattaccatacgcataaccatttttagtaaatacggctttgttgaatcgttcatggtgtacgccttcaacctcaacctgatcaccatagtaagcaatagtatcaatgcgatggttaagaatgatagcaccagattcaatgattttcagtgcagcggcctttccttgttcgcgagcataagccacgatttcataagaaccgatatctatagcggaaccatgattaccaacgatgtaaaacatggagttaattaggtgcttagagatatatgcatacgttttatacatctgatactgttcattacgcagacacatacccgctttgtattcacgtcgtaactgcataaggttttgaatcacttcatcaatacgccatccgttagggaattcggcccttttctcacgtgcgatatggatcaacgcgtttccatacatcgcgttaaacgtcatgatccggatcccttcaacgtaaccatcgataggggcttgccatgtaatagggctatatatcggatcgtggtcaggacgcattttaggggtatggtggcgaaggaatccaacgtgagccgcaaaaagatcttcaatctcacgggagtaatagttgtaagagtccatgtcacggttgcgggaaaattctacaatgaagcgatgtaaattgattttcatatcatataccttatggtttaaagttcttccggcctatccgtcgaacaccctaaccatacaccactgtcagaaagcatgtcaataaataatagaaaataaactggagaattttacatgaagtcatttaaacaattcacagaaagcaccttaaccgaagcgctgatcaccttcggaggccgtgcttatcctaagttcggtcaggttgttattcttgctggcggtgctggttcaggtaaagggttcacactggaaaaactgctaggcatcgaaggtattaccctggacgttgacgccctgaaaaaacttgtaatgggtagcgataaactcgcagcagagatcaagaaacaaactggtcatgatgtcaaaacaatgaacctcaaaaacccagaaaacgtatctaccctccatcatgtgatcgccgacgttttcaacatttccaacaaaaaccaaaaccgtgtttattccggtattatggcagcaccagaagatcgtaaacctaacctcatctttgacgtaacgttaaaaggcatgagcaagctggcaagcatcgcgcgtgatgtcgaaacgctgggatacaaaaaagaaaacgtacatatcgtatgggttatgaacgatgtgcatattgctatgcagcagaaccagaaacgcgatcgtgtagttcctaaagaaattctcatggatacccacgaaggcgcggcccttactatggcgaagatcctgaacatgggtgattctcttaaacagtatatggacggcgacatttggatcagctttaacaaagttggtgttgatagcgagatcaagaaatcaagtaacaaagggatgtttgttgttaagtcaaactacatcaaagttaaagcccgtggtaagcctcagaaatctgtagctgaactggataaggaaattgtggctaaagttgcagcatacgcaccgaaaactgacacttggggttgacattaatgattaaacattatagtatgcatacacaaactgaggaattgatatgaataagtttttctttgatatggatggtgtattgttcgactgggaaggttcatttgtgccaatgtatggcgaaccctctatgatgacagaagatgagttgaaaaagtgcaaagcaaaaattgccaaaactgatttctacgaaaatctggaaccaatcaaagaaggatttgaattattccatcatttaagaacacttggtgatgtagcaatactaaccagtgttggtaaattcaattctgacggtgttgccgaacaaaaacgtaaagcattgcaaaaagtattgggttacgttccagaattccactacgttaaaagtagccatgaaaaagcagcattcgctggtaaaggaattctgtttgacgatcgggcaaaagcggtgttgcctttcagaaaagcaggaggtaaagcaatcctctttgttggtgataagaaaacagcgcttgatgaattaaaaagattgtaaaagaaagggaaccattgcggttcccttttttgttattgattagcctttgcaagcgcttccgtgactagctgaatattttcttccagggtttccgcaaggaaaataccaggaactttattagctagatgagaattgttccagatttcaagatgtttctggttgcgggaaatcagaacaccacgataggcatgttctgcgaactgttccggatagtcaatgcgactaaaatcgagacgagggatccccagttcagcgcaaatcttatctgtatagttcagtttttctttcataacccaaagagggctgaccgcttccgcgcgaagcagcaaagtagcaggatcaccgattcggcgttggaaactccattgaaggaggtcaatcccagcctgaatacggggaaggtttttataaaaatcagtacgcaccaaagaagccgccatttcgtcatatcgttcttttggcgttccttccggacgtacaccgaacttatcataaaaagtctgagaaaattctgctaaagtgtcgtcgaaatcaaaaagaagtgtattcattgtttgccttattttattggtcaggatctggttcaggagcaggagtcaatgacaacagactaaccagtttaccattacgagattcgattacatgaatatcaccataatcttcaaacgcctctttcagagtatcaaactctaatttatatttttcttccgcataatcgcgccagtcgtcgcctttctcaaaagcatcaacgataatatcgtatagccagtatggaagatatgtaaaactggtatttctccacggaataggatgaaccgtagtccatttttcagttgccatttaaagcctcttagatttcactcattttatgaatatagccgtttcgtgaatcctggatctcacattcaccgttttccatgaacgctttcaggatcgtttgtacttcctcactatacttgtaatcagcataatcagttttccaatctttaccctgtgctttttgatacagaatttcatcaagtacccaataaccgatcggggtaaagctggtatcacgccacggaatcgggtgaaccgtccatttagaaacaagatcatcagaataagtggtcacggtgattgtatcagacgtggtttctgttgctgattcttcatcagcaccgtgttttaagatcagggtataatcgccagcagttgtaccgtcaaccgtagttgtgtaagtatcggcggttgcgcctggaatatctacaccgtctttttgccaacgataggccagaaacacatcacccggatctagttcagtagtttcaacctctaaggtcaaagtttcgccaatcaaaagttcgtttttgttggcgctaattgttacagaaggaattgccataaatttaacctcttatgtttattggtatttatagccggagtattttaccgttacacgttccgcatttgtcgtagccgttaacacgtccatacccattgcattcaggacaaaacggagtagtaaccccgaaaatgttacggatcgcataagtggattgttcttcggtcaacccaacaaacccatcagttttaataaaatgttctttttgtgaagaaagcatatcggtatcatcatcaagaatgagatagtttttacatccgaaagtatcgatccatgccttgatttcatcaccacgcattccagtactatgagggaagttagtgcaagttttaccaatgatccgatacaatccccacggataaaatatttcacgtagattatgggtactgttgccgattctccacgtagaggaaatgacgatatcacaattagcgtgattcactatccggcgtaagtgtcgtgcgcattcgatgtccatatgttcaccaaatttcatgcaccgcatattatttagaacgccatcgatatcaagaaaaataacgttaccaatctcgttaccatcgctcaaatcttttaaacattcgtgatttaagttcatatttcacctaaaagaaaaggggccgtagccccttgttaatcaatagaatccgcgagcttcattatccagtctacgatctgcaatcatatgagcttccatttgacgagatacgtaatcaggatcacactccattctttcttcttcgtagttgtcccaggtatcagcaacccatttagaaccgttccaacgagcataaccaggttcggcatgaacaggataatttgcttccgcagcgtggcgaagtgcttcacctacagtgtaataaggagctttagaattgacgattttcttaacttcaccattagtccaaacaaacagaactgggtagtaagcatttttcatcatgttcattttgtatttccttcttcactgcgagagccattcccccgccttcgaatacaaatatactcgaacagcagggtaaggtcaactactttttaaaattattttttgaacgtgtcgaactggctatttctggtttcgcgtacagtaaccatcccatcacggtgcatgtaccatgccagtgacttgagggtttgacgcgctgaataatgaggacaactatcagggtgcttataccaatccggattttgtttcatccaatcatagatccaatacggacacgtataaaagccagtattcgaaacagagcggcccatcatgatgatagacggggtaaacccttccatccatgccagttcatcagaaaccgtctcagaatcgcttgtaggagcttgtagagcgtcgggaacaatttcaatctggtcggcaatttccggagcaacatcaggaacagatggttcaccttcgtatgtaacaatttccggatcaggggagtcgatcaacagttccggtttttcttccggtacggcagcttccagatcagcaagcatattttcgaatgacttctgacggttcagtttgacatcaaacgtttcttgcgcgtaggtagcaagctgtaatttggcttctttttgttctaaggctttgaaaccttcaaccttttcgtaatcaatactcattgtagttctccaatgtttatcattatttagcctataaatattcatataaaccgtatataggatacacatagtggatatcgaagtcaaattccttaacactagtcatgtgcagattcaggcagaggctaacatagtctatgaattgcgcgactatttcagcttccagccgccaggttatcagtaccaggcaaaatacaaatatggtggatggaacggctacatatacttgatggactataacgggaaactgccctacggtttagcctatcttgtaacaaaattcgcggagtctcgcgggtattctatctggatggatcctaagatccacgaaacagaagaaattacccagccagattttgacaagtggttagaagaacacccagtatacgacggaaacaagcagattgatccgtattggtatcaaaaacaatcggtgttccatgcgattaaaaaccgccgtgctgtgcttaacctcccaacgtcagcgggtaaatctcttatccaggggttgatatctcgttggtgtctggaaaattacacaggcaaagtactaatcattgtcccaacaaccgcccttgttgatcagatgatcggtgatattgtcaactatcgccttttacctcgcgaggcaatgcttggaatacgttcaggaactgctaaaaacagtaatgcattgatctacgtgtctacgtggcaatcggctgttaaaatgcctcctgagtggtttcaacagttcatgtgtttgatggtggatgaatgccacaaatcaacaggacaaagcatacagaagatcatcaacacaatggatcagtgtattttcaagtttggcctttctggttctctgaaagaaggcaaagcaaacatgatgcaatacattggcgcttttggtcaaatcttcaagccagttgatacaaatcggttgatgcaggaaggtcaagttaccaaccttcgaattaataccatcttcatgagatacaaagaggatgagattaagaaaatgaagggggccgattaccaaagcgaaatcaagtatataacatcgcataccaggcgtaacgcatggatctgtaagctggcgttgaaactggcaagggaaaaagatgaaaacgtgtttgtgatgttcaatcagatcaaacatggtaaatggctgtatgagcaactcaaaaaggtatatgacaacgttgtatacatttctggggaaacggggattgatgagcgaaacgaaatgaaacggatcgcggaatcaacgaagggactgatcgtaatcggttctattggtgtactgagtacaggtatttctgtcaagaacctgcatcacatcatcttcggacatccttgcaaatctgctgttatagtcaaacagtcaattgggcgcgtactgcgtaaacatgattctaaatctcttgctactgtttgggatttggttgataacttagcaacgctggcaaagtccaaaaatgctaaaaataaatattcatacaaaaactatggtatgaaacacgcaatcgaacgagtacgcatttacaatgaagaaaagtttgactacgtgatcaaacaaatcgaaatttagaggtcaaaatgaagagtttcaacgattttcgactttatgaggcggctattgatgatttcatgagcaaggtcgcctcttgccgtactatggacggccttaaagagcttgaaaaatattacaaaaatcgtgtaaaagaagttgatgttgcgccgtcagacgatatttctatgcgcgatgcgctgaaaggtcgagccgaagaattaaaggccgaactcgaaagcggagaagaagaaaagttctaaaaaaagccccaaccgaaaggaaggggctttttaattttgggacgcaatcagcccaacacgtacatttgattatagccagtgaggtactattctggctttttttactcatgcccttgatcgaaggtatgttatcaatcaccccgccgaaggtaaactccatcggacggcgcaaaagagtacgcctatcatccagcattcttttatcaagcccctttcgggtactaaagttatagtagtccgtgccgttgcacactgttagcttaaaggttccaggttgagataaatctcaatcacggatatatattgcattctatataggccataaggtttattcgattatggaaatgcatccatcgataaacatgcccttgccctactacaatactatttatgattattaaaaatcaggatgttcgtcagattctaaaagatctggacgttcatcaaaaatacccaaatcaatttctttcatgttagccttctccatacccgatttcccatgatttgcggattgccttgatttcattatagcaaccttccatcaaatcaagaagatgattaacttcattaaaatcaatgttcgaataatttttcatattgtacctacagcaacatttgaacttcattcagatcatcagattcgttgatctcgccgttttttgttttttctgcgatgtagtcagcacagatagtactacacacgcgcccggattcagtcacaaaaccagtagaaggaaccggacacttgcacactacacatttttcattttcagtagacattatgcaccactttctaatttacggatctctaacatgtttttgatagagtatcctttgtttttgacgatatccagtgctttactggtgaaatctaccaccatgtcataatactggatcagtttgttggtttctacaatcttcggatccccagcgatcgcgattttgatttcagtagtcccagtatacaccacttcgcacatttctttgtcatgtcttccggtgtagtacaacatacgatccttcacatcagcttcttttttagcatgaagttggatcagttttttcttcgcgtttgaatggtaacgaagccatttagcccaaatcttagggatatccgctgattctgattgcaacttgaggggatctatcagcatatccttttcaagttcattttgcagatcttctaatttcaaactcataacatactcaccaatttaccaagttgatctataatatactatattaatttgtagtcaaatttaaattgatctaatataatatattattaaaagaataattatacatgatctaatttataaaatcaaatttatttttacttgatttcaaaaattatttgatctataataattataattaataaattttatcataaatcatttataaattcaagatctaatttaatattaattataataattattaaaagatggagtaagtttccctactccacctattgaatattatccccgttgggttatactatcaacccagtttaggaagtttgatacccacaatctgactcatcttagatttacctgagaggtttacccagtcatcacctttcacaagtctttcgtttgcagcagtggtatatgggttaaccgataaaccgtagcgcatcagaatagcaactttaggctgtaaggattgaggatcaacagaaatcttgatcgaacctgcctgatcagcttctgtgtatggcgtatagaacagagagccaacatgatccatttcacccagatcgtacttgcaaccagtcagcatgtaatcaaacggtgtattggtgtcagtatagacataataaccgtttttaagtcgccctgtcgctaacgggtgggtttcatcggtttcatgcatccaaccagacgcagccagaacgcctacaacgcgagaagaggccaggacataggtagcttcaaatgaagtcgttctattcatttcctgccccatttcacacactaattgatacaagaaacgacctaaagccggagcatcctttgcagtgtatgcggttgtagcatcgaaaatgccgtttgtgatcacaccatcaacgttgtaacgatttgatacgttgatcagagtctgaatgatatctttgtttacttcttcgctggcaacagtacccaaaacatcttcaatcacattttctgcgttgaattggtttgcttccagatcctgcataagttccacggtcatttcagttttgaatttacgggaacgaacgttgatattccaacgatccatttcgaaagaagttgtactaatatcttcgctggtttcatactgacttgttggcgcggcttcgcttgccaggcgtaatttattgctgaataatgcgaccataatcgcttcattaatatcagcacctgcgagagttacgctatcagttacttcgtatacaacatcacttgtcgggtgtttgaaaacttggcctttggtgtaggcagtaccaaccgcaccatttgaaatattatcgcggcttgcatacttaccggaatatgtagcagcgctggaaaacgtcatatcgcctttagggttacgataacgcacaccgaacagagttgcggtaggtaaattagtttcctgaatcgctacaagttcaccgtagatcaggttgtttaccgcacgggtaagagataccagatccggacgggtattagctacgttaattgtttctgttccggttgcctcatcaagaacctttttagacaggccaggcggtagctgtgactgacgcaccagcttgttaattgtgtaaaatttttcactcattttatgttcctgcgtaaagtgtataatggtatttatgcaacaaatttccaggtagggtatttgtcgctattaatccgatattttaaaccagagtgggacatactaagggattttgccgcctccgacccggatgagtatacaactccatctatcgatacagaacggcctaatttcgccttgtgcgcttctgtgagaggtttatactctctgtctatacgtccattcatatatttagcttttaacgtctctgagcgcttcctgttggattcttcggactgtggtttaccctttttaagtttagagagacgagattttacttcatctgtcattctctctttagtaatcttggaaatttcttgtttcttctcttctgaatgaaacatacccaacatagggccaccatcaccaccgatacccatattatatgtatgtggattattaacaaattctagattaacaatctctctttctttttcatacatttcttcacgggtatcaaaaatatgtaatatttcttttataaatttatcgataccatacttcctctgagccgcctttatagccacccctgaacccatgtatgaatcattgatgtcttctgttgaatgagcaccaacgtaaattttattattgaccaaatttgttattttgtagataatatgtttcataatatagcctcaattgttttcactatttatagaaatgaaaaagggaacccgaaggttccctttaatatcgttatttttcaataacttataagcctttcacataaaccttgcggaagtatgcgtttttaccgaacatttctttggtaatcataccagaagtgatacggtcggacggagcctgagagcgagagttcgcaaacgggttgatacctacaccgtaacgagttttgaagcccattactggctggaagttcttcggatcagaaccacgcagcggggtcagcgcaacatacggagcgtagtagataccagcatccatttcgttatcgcctttgtaacccacggtgaagtaatcaccacgtgcatactggtcgatgtatactttatacacgccacccagaacaccagcgaatactgctttagtggtgtcaacgttcagagtcttctggagaccttgacctgccggagtgataccgctatcgatacgagccagagcggaaaccacgttacgggaagcgatgatgaagttaccagcaccacgaccagtttgacgtgcgatttcgtttgcttctttgtcgatctgaatcagcagagctttgtagctttcaccagcccaacgagcgccacgaacatcaatcggatcctggaagtcaaacgcaccagctttagagccaacggtctgagtgaaaccagttttaccaacctgtgcggtatagttgatcatgtcaacgatttcgcggttgatttccagcatgatttcggttgccagaatagcagacagttcggcgtcagcgtccataccgtgaacagcgcggagatcctgagccagttctacagagtactgtgctttcagttggcggctacgtgcttcgataacctgcttatcgatacggaagcccatttcgttccacgggttgccagtagaaccgttgaactgttcttgcagttctgctacactggtagccataccgtaagaaatttcagccagagtacctttttcctgttcggcgataacagcagcatccagagcatcggaggtagaaccagttacagtaaccggagagccagaaacgttctggaggaacacacgaccagtttcagagaaatcgtggaacacgatagcgccgtcagcgatagcagtaccggaagccagttcggtaaagccgttgctcggagccgcgccctgaccggagtacatgctatccggggagaacatcggatggaatgcttctttagcaccggaagccagcggatctttgccgtacactgcgcggagagcgaacacctgaccagtagggccagtcataggctgaacaccgcagatatcgaacgcaatcaggttaggaatcgcacggcgaaccataccgattacagcagggccgatgttggtgatagcaccgcttgagttaccagaagcgattttggttgcgtcgtaaccgtggtcaccagcaatttcagcttccgccaggaaaccaccgaaggattcaacgattttctcgtcgcggtaaaccggatcaacttctgcgtctttttcctgtgcttccataatggcagcaatcagttgttttttggatttggtagcgatatccggtaagccttcctgagactccagaagatcgttccatttttccatcaattcgtttttcttagacattgtttcttaccttttgaaattaagaaagggcttttgccgcttgtacatatttattgatcttggatttctctgccggaacactttcgactaccggaacaaagtcatctttcgtttgcggagtatttacagactcgtcaacgggtttttcagctttggttgctaccatttcaacaattgcgctgagtttattttcgaaggttgcggaatattccagcccttcaatcagagattctactttttcgacctgagattcggtcaaacctttagttttctctgaaactactgcattgcgtttcatttctgaaatttctttggtcagttcctgattcgcttcaaacagggttttaacttcctgctgattctcagtcagttcgtcttccagttcggcgactacatcaacctgttcttccggaatgacaacgttatgttcaaccagaacttctttgaggcccatgatcagggattcaaacagatcggctttgatgtcacgggaaacggcttctttgttttctttcagccattcttcggaaatgtgcgcaaaatatttatcagcatcttcgtacagcttagtttcgatttcagcggcacgttcagttacctgagcttcgaccagttcgtcggaacgttccgcgatctgggtaatgtgggattcagcgagttttgcagcgccagcttttacagcttgttcgaatacagtggtgaatgtcgctttcacgtcatcagaaagttcaactgattcgaaaatgctgtctaactcgaccggagtatccaggttctgggcttccgccagcagttgttctttaagcatttttgattttcctgttgttttgtttaatgtatttatagacctttcaaacgctcggacaattcccgaaaagcgtcatcagcactattattctcaacaagcggtttgctttgctgattttccactataggcttaacatatgcatcaggtgcgcttggcccccagacgacatcaacgcctacagctaatttaaagcccttttgtacaacgccgtagcctttgccggaatcggagagcttacctaatccacgggaagaaacaccaggaacccaaccagcacgaatcaacgccgccagtttgtcaccatcaccaccgtcgccttcaacaacaacagcgcggccccaaacatcgttacccttccaccacaatttttcaatcaggatgcaagcatttcgcggatccacattcggacgcggagggtgattcatttcacctaatgcttgacgggtgttaacttgagttctaatataatcgttaactgcttcttcaagtacgtttttaggatacaaacgacggttacggttaaccttttcggcttgaaggaaaataccttcgatccgtaatttaccgtcttttgattccccaacagattctaaaatagattctgaaacgtcaccgcaaggtaaaccccattcttcgattaaaagcatatcgccgttttcgttgatttgggattcattcatatttatagccccagtgcagcacgtttacgcaatgctttcttgcgcttacgttgtgcgcgagtagcaattgacgggttagcacgttttgttttgagagcacgacgcgcgatctggcgacgttgggatttagttaatccggtcgtctgatacgcattacgctcacgggttttcctgtctttgaggcgttctacgttgccacgggaatcaacatgcttgacaattacctcatcaagtgttaaaccttcaacaaccgccatcatagcaagggctaaatttggttcggtgaccgccaaattttcgatgattttaaccgtgccttcatcgatacccagaatatctacacgagctttcgcttcgtctaaatgttcatggagatcttcggcggtgatttcgatgtcaagttgcattacacacctcactcatcatctttatcggatttatcatcctcggctggctttttatcgcccttttcgtcatctttatcagcgccttcgtcgtctttttctttgtcttcttcgccttcgatgcgtacagcttcggcaagttcaacgcgcaattcgtgacgaagcgcttctgtgcggtcttccatgatggagtaaaaagtttttttagcttccaccagattaccgcttttgattgcttcgataaattctttcatcaaaagttttcctcttccgcttctggatttttaaaacgttcttcttttgattcttcttctatctgtttggcttcgctttgaatttcctcatcagacatccggagaacttctttcattacgtatttatgggagatatatttgccgaccaccccttcaagttggcccatcaggtttaaacggcgttccaaaatctcaatatctttgatttcggaatagtaagaatcttgctgatatacaaaagcaatcttacttacgttttcatcccattcatcttctgtaatgattttcttcgcgatcaagttagtttttaacggatccgcaagaacagggttgaattgaatttgcaattcgcgaataaatttgctaaagttcaattcgtcgcgggtaataccgccatcgttacccaactggataccgccatcatcgcgaggcatacggcttaacggaatacgtaacgcttcatacagcttacggttaaaccacttaacatcgtcgatatcagagaaggcagtgccaccaggaagcgttgaaacttcggtaactgctttaccatcacgacgcatcagccaatagtcctctgtcattgacaggttattttgctgattcttaactttaccagtgctcgcgtcatatacaacacggttttttaagccctgtgcaatgttatttacgtactgtgtagctttagggccacccatctgacctacgtcgatatagaacacacgacgttcgggcgcacgggtaatacggtaaatcaccatagcatcttccagcaaacgcaactggttagctggcttgaccgcgcggtgcaggtagcctataatgttgttgtcgcaatcttcaaggccgctatgagcgtaaacaatcgcagagcgaggaatttttaccttgtcattgtgactataaatctgtccgttgtagctataaccgtttttcggtgcagtgtatacgaagtattcacgatagccacggaaaattttaaccccaccgggtagggtttctgtaaccgattctcggatcagttccatgcaacggggatctaactggcgcaattctttgatgccgtcagcttcatttttgtgcatgattttatggaaatagatacgcgaatcaacataccaatcacggaataaacgagagcctcggttatcgaaatcgtgaatattcattacggtatcgagttcttccatgatcttatcttggatatttttactaaaattcgttttagtaagatccatcgtaacaatatcttttccttgttcattaacaatcgcttcgttaatgatttcagaaacagcgttttccacttccggatatgtcatgatgccacggtatgtatttattagctgtgttttgttctgaattcgcggatcctgtccggaatagaactgttgaaacacagaagaataacgctggtttgataagtccgtttcgatttcgtgcgccccatcgttatttttcggaggcgcaatcgaacctgtatcatcttttaattgggcttcaaattccatttcatcctgtttggcgaaatttttgaaaaaccctaacacattgtctaatccaaaaaagttcatttacaactccgaaaaataatgataaggggtattgctacccctgtatttatagcgtttaaacccaccagtctagcgcgaaagtacactcaaaagtgctcacttcgttgttgctatcccagtctaaagtaacctcaccaacgttggtcgggaacaggccataaatggtatgttcggcggttacttcgtcgttacggtttttctgtttaaccgtagcggtttttttgtagtttgcagggatatcccctgtaatgtcttcacccataccatgcagcatgtttgaccatgctacgattgcatcacgggttgtgtgtgcatcgtcgttatataccgtgattgtccagtcatcataggtacggtcaccagcaacgttaattttgcggttcatgtaacctaccggaactttttcaacggtagacgctggcatagtagcggctttacattttaatttaaagtttttgcccaggtacgggatctctacttcgaacaggttcggacgtgcgaaatcaccggattcaaaggcgcgtacaatatcagtaagcattttctaacctctatgtgtatttataggggcttttcagccccttacatgttatactgacgttgatccaatcaactcatcgaaatccgcaccagttgaggttgctacgaagttcagtgtgatgtagttgatagaacgtgctggtttgacgtagattgatgcaataaactcattgcgatcaataacatccggcgtgttgttcgtagtgtcacaaaccacacggtaatcgtatacaccgcccagagcgcgaacgttagacatatactgtcctgcatccatacggaaggaagaacgagtgaaatcatcgttattctcgaacagtttatatttcgcgttatcgccgatgtctttcttgatcatgttgaacaagcgacgaacgttgatacggtcaaacgggcttggaacagtcgttgcggttttatcaccgtacagaatgtatccagcaccaccagagaaaccagtaaccgcgttaatctgtacctggtacatagaatcgcgatgcgcgttagtcggttcgatagccagtttgatgcagttacgcagttgaccacggttgtagccagccggagacatccacggttgcgatacctgatcggtataaacacagaggccagccatatcacccgcgagcgggatccaacggttaacatcgttgtatttatcatactggaacttatagttaccgtcgatgaacgcataacttgaacttacgttcatgttgttatcaactggggtagtattaccgattttgtagcctgtacgccattctacgaggttatcaacggcctgagccagtgggatattaaccagagcagaacgcggcggagaaacgaatacgacgcaatctgaacgggtttcaccgatagacacagcgtgtttctgtacagtagacgaaatttcggcagtttcgccagcacaagcacccgcaatcagcagaggaacatgcagagattcacgatctgcgaacatatcccaaccagccatgagttcatcagcgcctacagtggcgtttgcagaagtaccgccgcccagttccagaacgccggagaatccgacaggccagtttagggacgtaccatacagatactgcgaaccaccgtttgcaaagaaatcatccatgtagatcgttgaaccgtagatatctttatcacccttagcggttgacacgataaacgtttcttggataataccaccacggcgaacgataaacgcgtattggttatcattctgagggccaaagttcatcgaactgcgaccgctgtttttaccagacttaccagaaggataagacttaatgacagccgaagaatcgtatgcagctttagacagaatttcaaccgttacggtgctacccatttcgccaggataaattgcaataacagacggtagctggtatttggtgcaaagttcctggaaagcagttgcctgaatagtttcttttgcagtgtcaaggttgagcagagtaatacccggatcaacttctacgccatcgattgtaatcgtagcagaaacaccagaagaactggaaacgatttctgtagtccagccactagacagatccggatatacaccaacctgtttagcgtgtgcgatgatcttagtgctcggaatgaacacagacaggattttaccctgatcatcaacgctggtaacaacaccatcttcttcaataacaacgttattgtgtttaactttgatctgatcgtctactgcatagttagaaccagcagcggtgatcgtggttttgatctgattatagatcgcggttgcgttttttgcggcttctttatcgacgacacgaacaacacgcagatcctgaccgaactgtaaaaagtttacagcgttcatgaaataatcagcggtgtcattgtctggggagccaaaatagtttaccagttcgacttcgttagaaatctgacggatctggtaagctggcccccatgaaaatttaccaacaatagcagcacgaccagttgaatttcgaacaacggtagattgtaccgatgtttctttagtttcaatgcctggagagattaaagccattattaagtttcctctaaatttatataaacgaaataccgtgttggccgacagatattgtttcgtcgccactcgttacgataacaggacataacatatcttcataaagcagttcgcgctcacgtgcgaatacctcatttgccaaccgcaaatcgtctttctcgcaaaattctgcgaatttcatttgtgttgttagccatgcaaagcaaaccagcgccataacgagatcgtcatggaaaccttcttccgcagcccacgaaacacctttttctgagaaagtacgaaattcaagtattgtctttttgttatttatgatgagtttatctttctctatcaagtcttttagggttgagcagccaatcgctttcgatcgtttactctgtttcatccccaaatcgttatagctatcacaaataacgttatcgtaatccaactcagaaaacaaagatttagccactgagtgacctgtgctatttagctcgatataaacccatgcttcgttgtacatcataagataacgtaacaggacatcaggcaaaataaggtgcgatgttttgtttgaatggtatacagcaacctgttcaaacggcatagatgtaatatctataatatgcatcgcgtgatagtcttgaccgcgcccttcggctgggtcgagtaccgcaatatatttatgtccctctactggagctttatactgatagaaattagtttccgtttcatcagtatcaacccatgatagtttagacaatttccagccagcgatcagggttccgttggttcccatgaattcagcacagtgttcctgtaaaaatgcttctttacttgaactggcgatcatcttcgaagaccatgaatagccgtcatcaaatacgccatcatcaccgtctgtatacaaacgctctttaaccgatgtccagatcgccgtgtatggcacgaagccggattttccttctatagcagcgttccagatatcatagaagtggttaagcccgttaggtgtcgttgtgataaggattttcgatttacgaccagaagaaattactggctgaatcgctaaccacgcatcaataaagtttggaataaacgcacattcgtcaatgtagatcattgcgaaggagttaccacgtaccgcatcgggagaagatgcaaacgcaccaattttacatttgttatcaagttcaatagaacctttgttccattcaacgataccaggttgcaagaaatcggggagaagttcaatcgcctgttttgtacgatccagaacttccgcagacatagaggctttatgagccaaaacgccaacatatttatcctcgttgaaacacacaaagtgtgcaaggaagatagcaacaacggttgttttacccaactggcgagacaggttacaggcaaccatacggtttttatgcatttcgatcagcatttcgcgctgatagtcacgcaactgaaccttaattgtaccatagtcaatgtgggtgatcgcgcaatatgtttcagcaaaataaacaatatcatcacgacatttaacccactccatcaacatctgttgcgtccatttcgtttggatgtacgcgcgtttcaggtttgggtttccgttatatcgagttttcttgtttcctttgtttttatacgtcgcaaagtttgaactgtcttttgcttgaatatcaactttatggataccgttaatttttaggtaatcgctaaactttgtcggataccattttttatcatgttcgctttgcgtccactccatcccaaattcatcaattttctttttcagataatcgggatgcattaatccgattgggtgatctgattccttactcggatcgatcgtcggttccatttccatcagggtttacctctaccgcttcaccattaatgaagccttctttgggttcgtatgcactaccatatttctgcattaattccgtaggggaaccaacaaatacagttgcattctctatgttcatttcattaccgccgccattacctttttcagatcctggttttgttgtttcttcggtaatttctcgcatttctttatgaattttcatcaatccctggttagaattgtttaactgattcatcagggttgtaaaaacttcaacgtgtctcggagattcagagtttttagcgttatgcaaggcaatttgtgccatatccatgatcatctgattcatgtaatgcgcggttttacgcgcaagtgcatagtcttcctctaaatcaggttttcgatctgctgggtgtgactcgacatcaacgagttcgagtttttcatacacgaccatttcttccccagtttcagcaccagggagattttcaagatcaagtagttgttttacgctaaattcttccattattggcccctcggtttaggaggttgatcaccgctaggaattgggatatcattagcatacgtttgaacgtattcttctcccgtgtaatcctgtataggcatatcaaccggatccacctgagcatcaacggattcaaaattgtctttgtccaacgggttcatattggaaaagaaatccgtgtatactgttctgatctcgcctttaatctcgttaacaggcggatacaggtagccctgtaattcaaacattaaagaccattcaatgtgtcgccgtgtcgttgtatcaccttcaaacgtggtatcaggggaaacagattgcagagatattttaatatctcggtctattttaatgtcgtttttatgtaattctgtaatacgacagttgaaatgcggctggaagtatggcagtatctgttctatgatctgaaacacatcatcttcgtaacgggtatacactcccagttcgaacatgagacgatacggagcagggttaaactgcgttactgtttttccaggtgcgcgtaactgcgtcattttttggtttaccgcgatcccagttttacgaattgcgttatactgcaaatcaacgagggatagattcatacgtggtaaaattgtttccgttttagcaacattttcctgactgtatgcatagttcagcttgttcatggatgccaggaatttttcttttgatgcgtaggtaatcggaaccttgataaatttttcttgttcgccgcgaatgcgtttaacttgcacgtgattgaaaagacaacccatcaagacaatataatttcgcaacgaactattataccaaaatccaaacattttatttttcctgtatgggttaaagcgggtataagatttctcctatacccttacatgtatagggtttcccctggttatatttatgggaactgtgcgaacggcgatccgcgcccgttgacaacatcaaacgattcaatgaattcatcgccttcatcttcaaaggcttgatcttcttcgtattgttcaatattggtatcagccaatccatcaagatttcgaataggttcgagatccagatcagcatcgggagcaaggttaatcccttcatttcgttgcagtttaggatccaattcttcaccagtatagataaatttaacgaggttgattttacgttgaggacgatcgccgaactggaagaacgggtcaaactcaatccatgtaatttcaaacaggctgttatccatagggaaataaatcaaatctcccagaacagggatcccgccatcggtttgatgtgcaaataaacgaggattgatcacaagtgtcatttcatcgtttgacatcataccaaatttgctgtaaaagtctctctgtccttcgtagtttgcatacgaatcgatgtatgctgcaattttccacgattttgtaaacttcgattcacggtcttcgcccaaaattttatcaatattaacaaattctcgacggacgtaatacatatccggagatttcatttgaattgcttcggctgttagtgaatcatgcaactgttgagtagggttatacttgtaccagttaacatacgggtttgttacttcttgtcttaggttccgatcgacgccggaaccatcttctaactgtgcaaacagactttcatcccaattttgcatttttcctccttacatcatcaacactggaagtgcatcagacagtaacagaagttcttgacggaggttttctttttcttgcatagcttcctgaatcagtcgggttccatccggagcaacaccaccaggcaattgcataccctgaaacttagccagcacctgaccgtttacctctttaacaagagcagttgcgtaatctttcacccaacggttgttatacgcagaggatgaactatgaacgcttgtaccttgaccagccttcacaccgcctgagacggctttgtaggggttattgtatatatctgctatagttggcttatcttcaccatcagaacccgctgtagcgtatccagcgacgttaccgaccatactgggtacatcaacaaaggatctgatcattgcttcgataacaacaatatcaccatctttaacggttccgtatactgcaaactgtcctgtgtcgtcgttataccagtaatccggaagcggagacaggagatcttgcattgaccgctgatagctcatcatctgggtaaaatagcccatatccgcgccatatgcgttcattccgtaggtacgtgatgcacaaccaccgccgcccagagaaccaccagtaaggcccatcaggaaatcagtaaaccacggataaaccgcagtaccatccatcgatacaagggaacccatgttagtacgcaacactttagtaattgcgaaaatgtgttctttactcagatcgaaaatatttttcgggttgtccggccccagggtgagaatgatataccctttgttagatccattgtaatgatattctgcatataggtctaatgctcgttgaatgcagtcataaacctgttcggttgtcacttcgattttgacgatcggagcacctaaacggcgcagaatttcatcttttaattgtgctgggttgttcgtaatcataaagatcctcaaaaggggccgtagccccttgttaatcgttaagcgacagtgatcgccagttcatcagaaacgatgactttatggcttgcatcagttaccgttactttgtaagttccggaatcagaaggctgtagcgaatcgatggtaaatgtgttagcatcagtaccaacgtttacgccgtttttcgtccactggtaagacagcggagaaacaccaccattcatagttacgcttagagacaatggatcgccagtagtgtattcagtatcaccagttaggttagtaccgaatgacagaggcgggtttttgctctcataacggagatcggcgtcagcttctttgatatacatagccagtttagcattcagatcttcgatagttacgcgatctgcaagtgcctgtgcaatgttcaacgcttctaaatcctcaacacgtttattaaggtcggcaattagtgcataaatgcccgtttcgttaccttcggagttatctcctacctgagtgaacaggttgcgggttgtcgttttcaaaccagcacgagtaacggggtcggcactaacaccatcaccatatatttctttgttaacctgctggctagttgcaacgaggccactagaagagttacctacaacgccttgcagttcccatagtgcgctagtgttggtgcgtaattcaccctcaacaacactcaaacggcctttgatactggtaggatctgaatcttcgccaatgtcgccagttaagatcgcaacttgtccctgcaatccttcatcaccggattcacccagaatcatttccatatccatcaatctgcgtttgttttccgcaatatcataacggatactaccctgaacagaaaccgtaccaatttgaccattgatggttgtaatttgtgcagtgataccagttaccggatcgttgatttgtgtagccagagaactaacggagttttccatactgttcacacgatcgttaatggaactggttgaacctgacgtgcgaccgatataactattaatcgcatcaagttcattttgcattacaacagaaccatcctcaaggatcttaattcgcgcatagattgaacgggttgtggcaagaccagaatcacccatttcagcacgaagttcttttacctcttctgtcagttgtcctacttcggaaagcgcccagtcatcttccagtttggttatgcgggtttcctgcatagaaatggcacgttggttactcagtacgcggtatttaaggccagtaccagtagaagaggggtcaacatcaccatcaacgttaaatccaggatatgaaccaacttctttcttgatgtaaatgatatcattacgaattgtgcggtgtttaggatccttttctggatcgtattcaccaatttcatcgttctgagcatttacagaaagggttaactgtgctaccttgttctgtgtttgggtgttcgataaagttaatgcctgaacatcctgatccaactggttaacttttttgattacgctttcatcaccaatagcatcaatgttttcagtaatcaagttaacctgatcgattacttcgttgattttatcattatgggtgatagtattttgttctaactgaaccgcgttctgctggatgtttacaccagttcggttaagactgccagtgtttgacactttatctggcgaaccgtccagagtttcaccgtttttgatccaaataatcttcgtttgagtcgtggcgtcatctgggacgccatcaacaaacgggatcttcggcaacgggtttaatttgtcgatgatcatttaataacctctgttataatacgcgaattacgtagtttaatgcgatgtttttcatgcgggtttcttcaccgcccacaccagtagctttagttatagaagcatcaaatacgcgagcgctttggtcattcttctcggcgcttttcagttcgtaaactgcttgccatttcggaatgttaccgccgttctggtagataagttgtaatgggtgttcgtgccatcccaacatatctccttcatatgtaccatacccacgattagggtttagtccacgcccacggtcatgaccacgtactgcaacgcctcgacagtctggaatgttaaaccaatcaccgccaccaccaaatgtataacctatacgctcaaacagtaacgggtaattatttttattcagtgaacgtccatcacaaatatacaaactaccgtggtcagtctggaaaccagtcatgacaatagcacctactgggaaatgccaatcaagatctgtccacgtctgatatttgttgttatgtattgcgctattctcataaagagaaccattaattaccgcactacgatcgctaggcaatacattagcattagaagaaagtgcagtgtttgccacataaccaacagttgttgctaatttgacaacaccgaactgggatccagttgcacgggtattgattaattttttcgcagtaatcgctttggtgtcatcagtacctgcgtttgcttctgcctgtgatgcgatgcgaataacgcccaggttgctttcagttgcagttaaacgaataaacgtataaggtgaaattgcatacccttcacggatcgtaccagcctgaacctgtgcaactgttgccagttgtaccagaccttgcgagctttcggtcgcacttgactgaaccggaaccagagacgcgatcgcttgcttgactttaagcggagtcatagttacagtgttatctgtaccagcaaccgcctgtgcagttgtagctattttagaagaaccccaaaccgattctgtacctttgcggttattgaacacatagttcagtgatcgcggagtaatagacgatgcatcgttagttacggttgtagattccgcatcagtcgaatacttcgtataaccccatacggtttgtgatgctttagggttctgcatacggtatgctaacagtttcggagtaacaatcttagtgttatccgtgccagcgttaatatcagcttcggttgcgatctgagcaataccacgaacagaagttgttgcgataggaagcccagtatcagtacgcgcccaactacctattttttccaacgcatcttgtacgttggttatggtatcaggccaatcagtacctgttgggtcaaatgtcacgtaaatggatttatcacttacgtggttgattgtattgttactcatgtgttatccttatgcaattcgtttgaagtaatacacggttacttgcggagtaacatcaggtaagaaaccagaacccaacttaacccatgaaccatagccattttttgcggctacgtcgatagttccgatttgacgaataccgttttctgagatatttgttgccgggtgcggaacactatcaataaatcgacattcaaggatcgtaccatcaacacctttgcggttaacttctgcgaaatatttttccgctgcaacgaattcagtaaatttgttgtatgcagtttcacaaacggttgcggcgttagtcccattatcaaagatgaaagggaagccgtatacgtgaactacagcctgttcttggtctgaatcgatgttctgtacaataccatcaaaagaaacgctctcaacctgctgtacggcgattggaggtgcatcctcagtcatggtaacaacgccgttaatcgggatttgctcgataagcgtatacaggtcatcaattgcggattgtacgtttccatacagaacaccgcgttttgtttggtcaatgtttggttcgccgatcgaacgtttaccgccgatcagaggcaacttaccataagtatcatactgtaagtaatctgcttctttagagaggacgcgagcgccctcccttgtttttgaaatattgttgtaagccattatgcaacccttatccagcgatgtgcagtcatatacggtggaatagttttgattttatcaggtaatgtgttaccatgattcactttcaatgtatcctcacggtatttagtgtatccagggccagaagcatcaggatctaactgacaaccaccaatgatcacagcaccattttcatcagcaatcagaactttatcttttgatacaagttcaggaacgttgatgattttgatttctgtaccacgatcaccgcctgtaccacctgccgtatgactcggttgaccaccactatctaaatcattattgtttaatgcgaaatcaggatccgctgcatttgatgtccagccagccaggaaataaccttctgcgtaacgtttccaaccaccaaatcccatataatcagcagggtttgccgggttgtgtgcgttttcatagatggttccgatcgggtggataatatcaaacatagcctgaatatccagaatacgtccctgataggtttcccctgtattacgcattgttttctgagaagggttattataatcggtatattcgatacggttcgtcaatataacttcttcttcgttattgagataaaccttatcagctttttctttaataccgccagttccttcccaatccatcagagtaccaatatcattgttaaaccaacggatcgttacaacgtcgccggattccagttcctgagcaaacttgattgaagtcactacagaatcagtgaatactaaactataatcctgtcctgacggaacccatacaccagagttaccaacacacgtactttcatcaacaccttccgcaccttcacaggaaaacgccggatagtcagcgtcaccgcctttaaccagttgtttaccgttgagaagcagttcaaacgagttagggttaatcaacacgcgagggttaacaccaaattcagcaggtgtaaactcttttttggttgccagatcacctacccactgttcaccaggaacggtttccagagaagtatcaccagtctgatacatgcgcatcacatacgcttcatagctcgaacgccatgttgctaacccatctagataggtaacaaattgaagcgtgtcaccagcgttacacgggtttttaagacgtactgaattaccatcaagtgcaaccagttcaccaggagcagaaccaatcgatccatagtctgagttatcagcattgaatccgtctttctcatcgatgaaaagcaagttaccgcgatagtaaacttcgaacgattgcaggttgtattcattaccaacaccgaatacgttagggaagtcagtttgtccctgagtagcaatatacgtttcttttgctactgttgccagatccgaagttgtgattttgtcaatctgtttgttttcgacgtattcccaacggcccggagaacaatacaccaattccacatccataaaatctttaaacaaatctttaggagttggggaacctttgatagtatcaccagttgcggggatcagtctaacgttgttggtagcccaacgcgaccacacatcacgcagacgaataactttgttatagtcgcctacgccacctttcgggaggtttacggtgattttgtttgcactggtattcaacgcccatgattcaccaaattttggtgatagcgtcgtacccgcaaaggttttccaggcacctgctggatgggggatctcaccatcccccagcatgttatacaattctgtaaagttgttgttagtcttttgaccacctcgacgcaggtaatcgcctgtaccatcgtctacaacctgacctattaaaatttcttgtttcatgacgcgatccctgatttaatcgtatcgattgctttaatcgtgaatttaattcgatcttctttgatcgcttgcacgttagcgtatacgacatcaccagcaccgacagtaaagtttaatgtaaacatttcatcttcactgtttttcaaaatagcatattccgttgaataaatcgttttgtttacacgatccacggtcattaaaacttccgccattttggtaactgtaccagctacgttttctgcgtatacgagcaccttagccccgctaaattcgctatatccgaacataggaatagcagtcgggtttgctttcagtacaagcgccgtagtgtcaacaggcatcgttttagaaccgaacatagattctacagaataatcccatgttgtgatcgcaccttcttttttggtacaccagatttttacaaaggtgtaaggtgacgtgatgtacaactggtctgcaacccccgcgattgtatcgccaacttgaggacgaaacgcgataggacgatcaacagagacactacccgtactatttatgaagtagcaaccttcgccaaccttaccagaaggaagaacaacggtaatcgaacctgttgaagtatccatgtcatgcagggaacccagttcgatcggtgtacttgaatagtaagtgcgtggtaatttctgatagtatccggtagcatggatcaccatgttaccgacaccttcgtttgcagacagcatacgcacatcaccaaacgcattataaacgttggtgatcatttcgttcagtttaacaccaccatcataaagcggatcgcctgttgatgggttgccgatttcaccgacatcaattagtttttttgctgtttggtaagccattgtttttccttagaattcgaatacaatactcacttcctcagtctgatcaagggagcgaataataggttgtctgttttccatgtaaatcatacgtccggaatcaggttcaagcgcgttagcattatagtaatcaccagttgctttcttttcaggttcggtcgggcttgcctttttaatcaacgggtttacaataatacttatctgacggaaccctttgttaccagggagcgtagattgcgggaagaaaagagaatccatgtacgcacgaaaacgcattgaattcacctttaaccgatacactagatcgtattgtcctggataccattgaatcacgttatcataaccccaacgtaccggatcctcttccagttcgccagggaaaggaactacgatatgttcgttcgtacagcggttgatcacgacatctggcgggattgtgtagaggtattcccatttatagccgtcgcccatgtcgatcccgttagcttctccgcgtggaggttcactcgattcatgagacggactccagataccgccgatcctgatacattcaagttttccggtaatgctcgaaatggagcaagaaccgatatcaggaacatcaactacacgataaaccatccaacctttacccggatcagtacggttataaggcgcggtgtttacaacaacaatatcgttaaagtaaaagattttcgggtttggatagcgagtatcaccccagtctttacgtggtaaaattgcatctatcatatcaccaggaactttagtagccccgatcatatgcgtccacatatcactaacaccatcggtgctatcatttggatatggcggggcaaagttagggtcggattcgttatccgcccatgattcagttcgcccaatagacatataaatcgtgtttagatcggcggcatcgccgatcatatctttgaagttcatcaagttttcggttcggaattttgcagtaattaccgaccgatacaagttttgttgtgccatttaatttcctaccttaatctgtgatggaggatttggatcacgtgggtttcctgcatcatctttcagtcgtctatccaccaaattacggaactgtgaatatttaacgcctgagcaatcgaacaacggactttgatcgaaccgtcgcgcagaaggaagaacaccgttaagcggtttttcttcaacgtcatattccggaggtacatcaaaaggttcccccgctcgcgggtgtgcggtgtacagaggttcaccagtaaccaggtcgaattgttggtttccgttaccgtccatgctcgcaatgcgatcaggccagaacttaggataaccactatcgaaacggtagtttctcagaatatcaatgattgtctcgttatgagtcattgacaaaccagagttgatgaatactgttaacatcgtaatacccatgaagccgaatcctaccggatgaacaaacctcaatacgtcatccttataacgggaagtcggtagatttgaacgaattttcatcacgtagtaagagcgtccacggtttatatagtcgatcgagttgttagccatttgtttaccacgaacaccacgaattaccattccggtgaaattggttttttctgacttgacaacctgcccttcgataaagttaccttgagcattatgcagagtcattgaccaacgcaattgaccattttcatattcacgttcgatgtatgtaacgttagcgcgtccagttggtgtatagatcgtccggcctacgatatcctgactgatatttgttgaactaaccaaaatatcatattcgagactgttggagctttcgatctcaacggaaacatcttcgttatacagtaatttaaacaggaacgtataacttgcctcaatcccttttgttgaatagaaatcgcttgcacgtgattcaaaaaatctaaccactgcctcacgtttggttttatccaggtaaatgttacggcggttaatttcagaccacaaatattcaacgttgtttttctctctcggatatttgttccggatgaggttcagcaatttgttatagtaactgttgctacccaacgaaatatattgcagatagtattcaccaaatttttcgaactgttggttgtccagatagctttgcggagcaaaacgagtaatcatgtgactcagatcaggatctattagtccaggttcaatatccggcgtgtatgggttttcacgttcctgattaaccagacttgccaccattaaagtgttatcaggtttccagaaaatagtaagttcatcccttgcgcggtatgacagttcatagaatccaattatcctaccacctgagcgatacaacagaacaccgtttgtgtacttcgtaaaaccagtaaatttgatattattcaagtagatagtaactgttcctttgtcccaaacttcatggtttacacgaatcgttgacgcaggagacgcgctatcagtaaccagagtatacagggtttccggataaaccaccagaggacggttatcattggtgatccatgtgctaacattatcgcggaaatgccagctaaagtttgcttcattgtagtactcttgcggcccaaagttccaaacagtaggatcgttctgatttgctcgaactgtagcaaagttaatcgaaatgctcgcagtataaccaggaacaagatcgtatttcaccgctgaatgcacatcttccggatacttttcaaccagatctggatctggcaaagtgcctggatatttgtagttaccaacagaaatgtaaacttcatcgccattggttgacatatttgtatattcatgagtgatataaaaacgttcatcttcggttttaccataaacacgggtaaacgtctttgcattctcatcccacagataaacgccagcatcgtttgatgggatcacgttagctttgacagttggatccatcatcgccgttttaacttcaccagttaccagaacgtacagacgatcattcagcacatccatttttttaacaacaattttatcatttcctggtacgatagtatatgaaacttcatcaaaaatacgttcaccaaaggtcggcgaaccaggatcagtatcaattggtgtgttacgtaacgcaatacggcgcataacgttcttagcagccacatagagccaatcactagaacaagccatagcttcggcatacttcgacactccgcccggtagacgcgcatacgtgttgtatgagtcaacatcaaaatctaaccctgactggttccccagcttcgcaaaagttacatcatcagaagaaaaacgaacttcatcagaagaccaacgaatatctgttgacgtgcgcccgtaaaatatgcgatcgtatcctaacacatacgtagtgttagtgctctgataagcaatggtacgggaaaccggattgcctacacgatcgtttaatgctttgtagtaataccacgtttggcctttgtcatttgacactttagccatattctgaaaacgttcaaacaggtaaagcaatccgtttgagtataccaggaacgtgcgatctatatcattacaaacgtgttcgatgtgatcttgaatttcatggtagctttcttgtttcaggatcttatcgctgatctggcttacatcagaatacaggggagagtatacaaaatcctcaaccatcagagaagccataataacatcatcgttaaaatcgacgtaatcacgattgtttttggcgaatttttcattgataaacgaatcagcaggggtgaattcacgcatggttgtatatgcgtaggcgttctcatcaaacgtccataattcatcgctgatcacccaatcagaaggttcaaacccttcatgagttgtttgaatacggaatttataacgtgtatttggggcaacctgatcgctaaaccattcgttttcgtagctataacccaactgcgtccagattaactcttcgtctggaataatagttccgtccatatcacggctacgggccaattcaaccacataatagaaatccatgccaacatcatcccatttaaggtaaacgaagttagcagccagtttatcaacgcgcaaactcgtaatcgaaggcgctttaatcattatatttctccaaatttgcggttatgtatatcacgtatttataaaaagaaaaacccctatccgaagacaggggttaaagattattgactgataggattcatagtcaatgtggtatattgaggacgcaggtcattttcaaacacgatcaacgaaccatcgcgagtaaaaatggtttcttcgagaggttttgcagttagctcgatataagcagcgctgaaactatcggcggatacgttcagaacgcccaggtcaaagctaatgaaatcggtgtaatgagaaaccgatccaacttcgtaatatttattacgggttcctgcatctgttaatttttcaaagtcatcgcctgtataagcagcgatcgaaatatccccatcctt

SEQ ID NO: 17 - DNA, 175592 bp, Unknown
  bacteriophage strain capable of infecting bacteria of the genus Klebsiella
tcacactggaaaaactgctaggcatcgaaggtattaccctggacgttgacgccctgaaaaaacttgtaatgggtagcgataaactcgcagcagagatcaagaaacaaacgggtcatgatgtcaaaacaatgaacctcaaaaacccagaaaacgtatctaccctccatcatgtgatcgccgacgttttcaacatttccaacaaaaaccaaaaccgtgtttattccggtattatggcagcaccagaagatcgtaaacctaacctcatctttgacgtaacgttaaaaggcatgagcaagctggcaagcatcgcgcgtgatgtcgaaacgctgggatacaaaaaagaaaacgtacatatcgtatgggttatgaacgatgtgcatattgctatgcagcagaaccagaaacgcgatcgtgtagttcctaaagaaattctcatggatacccacgaaggcgcggcccttactatggcgaagatcctgaacatgggtgattctcttaaacagtatatggacggcgacatttggatcagctttaacaaagttggtgttgatagcgagatcaagaaatcaagtaacaaagggatgtttgttgttaagtcaaactacatcaaagttaaagcccgtggtaagcctcagaaatctgtagctgaactggataaggaaattgtggctaaagttgcagcatacgcaccgaaaactgacacttggggttgacattaatgattaaacattatagtatgcatacacaaactgaggaattgatatgaataagtttttctttgatatggatggtgtattgttcgactgggaaggttcatttgtgccaatgtatggcgaaccctctatgatgacagaagatgagttgaaaaagtgcaaagcaaaaattgccaaaactgatttctacgaaaatctggaaccaatcaaagaaggatttgaattattccatcatttaagaacacttggtgatgtagcaatactaaccagtgttggtaaattcaattctgacggtgttgccgaacaaaaacgtaaagcattgcaaaaagtattgggttacgttccagaattccactacgttaaaagtagccatgaaaaagcagcattcgctggtaaaggaatcctgtttgacgatcgggcaaaagcggtgttgcctttcagaaaagcaggaggtaaagcgatcctctttgttggtgataagaaaacagcgcttgatgaattaaaaagattgtaaaagaaagggaaccattgcggttcccttttttgttattgattagcctttgcaagcgcttccgtgactagctgaatattttcttccagggtttccgcaaggaaaataccaggaactttattagctagatgagaattgttccagatttcaagatgtttctggttgcgggaaatcagaacaccacgataggcatgttctgcgaactgttccggatagtcaatgcgactaaaatcgagacgagggatccccagttcagcgcaaatcttatctgtatagttcagtttttctttcataacccaaagagggctgaccgcttccgcgcgaagcagcaaagtagcaggatcaccgattcggcgttggaaactccattgaaggaggtcaatcccagcctgaatacggggaaggtttttataaaaatcagtacgcaccaaagaagccgccatttcatcatatcgttcctttggcgttccttccggacgtacaccgaacttatcataaaaagtctgagaaaattctgctaaagtgtcgtcgaaatcaaaaagaagtgtattcattgtttgccttattttattggtcaggatctggttcaggagcaggagtcaatgacaacagactaaccagtttaccattacgagattcgattacatgaatatcaccataatcttcaaacgcctctttcagagtatcaaactctaatttatatttttcttccgcataatcgcgccagtcgtcgcctttctcaaaagcatcaacgataatatcgtatagccagtatggaagatatgtaaaactggtatttctccacggaataggatgaaccgtagtccatttttcagttgccatttaaagcctcttagatttcactcattttatgaatatagccgtttcgtgaatcttggatctcacattcaccgttttccatgaacgctttcaggatcgtttgtacttcctcactatacttgtaatcagcataatcagttttccaatctttaccctgtgctttttgatacagaatttcatcaagtacccaataaccgatcggggtaaagctggtatcacgccacggaatcgggtgaaccgtccatttagaaacaagatcatcagaataagtggtcacggtgattgtatcagacgtggtttctgttgctgattcttcatcagcaccgtgttttaagatcagagtataatcgccagcagttgtaccgtcaaccgtagttgtgtaagtatcggcggttgcgcctggaatatctacaccgtctttttgccaacgataggccagaaacacatcaccaggatctagttcagtagtttcaacctctaaggtcaaagtttcgccaatcaaaagttcgtttttgttggcgctaattgttacagaaggaattgccataaatttagcctcttatgtttattggtatttatagccggagtattttaccgttacacgttccgcatttgtcgtagccgttaacacgtccatacccattgcattcaggacaaaacggagtagtaaccccgaaaatgttacggatcgcataagtggattgttcttcggtcaacccaacaaacccatcagttttaataaaatgttctttttgtgaagaaagcatatcggtatcatcatcaagaatgagatagtttttacatccgaaagtatcgatccatgccttgatttcatcaccacgcattccagtactatgagggaagttagtgcaagttttaccaatgatccgatacaatccccacggataaaatatttcacgtagattatgggtactgttgccgattctccacgtagaggaaatgacgatatcacaattagcgtgattcactatccggcgtaagtgtcgtgcgcattcgatgtccatatgttcaccaaatttcatgcaccgcatattatttagaacgccatcgatatcaagaaaaataacgttaccaatctcgttaccatcgctcaaatcttttaaacattcgtgatttaagttcatatttcacctaaaagaaaaggggccgtagccccttgttaatcaatagaatccgcgagcttcattatccagtctacgatctgcaatcatatgagcttccatttgacgagatacgtaatcaggatcacactccattctttcttcttcgtagttgtcccaggtatcagcaacccatttagaaccgttccaacgagcataaccaggttcggcatgaacaggataatttgcttccgcagcgtggcgaagtgcttcacctacagtgtaataaggagctttagaattgacgattttcttaacttcaccattagtccaaacaaacagaactgggtagtaagcatttttcatcatgttcattttgtatttccttcttcactgcgagagccattcccccgccttcgaatacaatatactcgaacagcagggtaaggtcaactactttttaaaattattttttgaacgtgtcgaactggctatttctggtttcgcgtacagtaaccatcccatcacggtgcatgtaccatgccagtgacttgagggtttgacgcgctgaataatgaggacaaccatcagggtgcttataccaatccggattttgtttcatccaatcatagatccaatacggacacgtataaaagccagcattcgaaacagagcggcccatcatgatgatagacggggtaaacccttccatccatgccagttcatcagaaaccgtctcagaatcgcttataggagcttgtagagcgtcgggaacaatttcaatctggtcggcaatttccggagcaacatcaggaacagatggttcaccttcgtatgtaacaatttccggatcaggggagtcgatcaacagttccgggttttcttccggtacggcagcttccagatcagcaagcatattttcgaatgacttctgacggttcagtttgacatcaaacgtttcttgcgcgtaggtagcaagctgtaatttggcttctttttgttctaaggctttgaaaccttcaaccttttcgtaatcaatactcattgtagttctccaatgtttatcattatttagcctataaatattcatataaaccgtatataggatacacatagtggatatcgaagtcaaattccttaacactagtcatgtgcagattcaggcagaggctaacatagtctatgaattgcgcgactatttcagcttccagccgccaggttatcagtaccaggcaaaatacaaatatggtggatggaacggctacatatacttgatggactataacgggaaactgccctacggtttagcctatcttgtaacaaaattcgcggagtctcgcgggtattctatctggatggatcctaagatccacgaaacagaagaaattacccagccagattttgacaagtggttagaagaacacccagtatacgacggaaacaagcaaattgatccgtattggtatcaaaaacaatcggtgtttcatgcgattaaaaaccgccgtgctgtgcttaacctcccaacgtcagcgggtaaatctcttattcagggattgatatctcgttggtgtctggaaaattacacaggcaaagtactaatcattgtcccaacaactgcccttgttgatcagatgatcggtgatattgtcaactatcgccttttacctcgcgaggcaatgcttggaatacgttcaggaactgctaaaaacagtaatgcattgatctacgtgtctacgtggcaatcggctgttaaaatgcctcctgagtggtttcagcagttcatgtgtttgatggtggatgaatgccacaaatcaaccggacaaagcatacagaagatcatcaacacaatggatcagtgtattttcaagtttggcctttctggttctctgaaagaaggcaaagcaaacatgatgcaatacattggcgcttttggtcaaatcttcaagccagttgatacaaatcggttgatgcaggaaggtcaagttaccaaccttcgaattaataccatcttcatgagatataaagaggatgagattaagaaaatgaagggggctgattaccaaagcgaaatcaagtatataacatcgcataccaggcgtaacgcatggatctgtaagctggcgttgaaactggcaagggaaaaagatgaaaacgtgtttgtgatgttcaatcagatcaaacatggtaaatggctgtatgagcaactcaaaaaggtatatgacaacgttgtatacatttctggggaaacggggattgatgagcgaaacgaaatgaaacggatcgcggaatcaacgaaggggctgatcgtaatcggttctattggtgtactgagtacaggtatttctgtcaagaacctgcatcacatcatcttcggacatccttgcaaatctgctgttatagtcaaacagtcaattgggcgcgtactgcgtaaacatgattctaaatctcttgctactgtttgggatttggttgataacttagcaacgctggcaaagtccaaaaatgctaaaaataaatattcatacaaaaactatggtatgaaacacgcaatcgaacgagtacgcatttacaatgaagaaaagtttgactacgtgatcaaacaaatcgaaatttagaggtcaaaatgaagagtttcaacgattttcgactttatgaggcggctattgatgatttcatgagcaaggtcgcctcttgccgtactatggacggccttaaagagcttgaaaaatattacaaaaatcgtgtaaaagaagttgatgttgcgccgtcagacgatatttctatgcgcgatgcgctgaaaggtcgagccgaagaattaaaggccgaactcgaaagcggagaagaagaaaagttctaaaaaaagccccaaccgaaaggaaggggctttttaattttgggacgcaatcagcccaacacgtacatttgattatagccagtgaggtactattctggctttttttactcatgcccttgatcgaaggtatgttatcaatcaccccgccgaaggtaaactccatcggacggcgcaaaagagtacgcctatcatccagcattcttttatcaagcccctttcgggtacgctagtatttataccctaaaaatcagggtgttcgtcagattctaagagatctggacgttcatcacgatctgtaattccttcaccgtaaccaatcataagattctcctacagcaacatttgaacttcattcagatcatcggattcgttgatctcgccgttttttgttttttctgcgatgtagtcagcacagatagtactacacacgcgcccggattcagtcacaaaaccagtagaaggaaccggacacttgcacactacacatttttcattttcagtagacattatgcaccactttctaatttacggatctctaacatgtttttgatagagtatcctttgtttttgacgatatccagtgctttgctggtgaaatctaccaccatgtcataatactggatcagcttgttggtttctacaatcttcggatccccagcgatcgcgattttgatttcagtagtcccagtatacaccacttcgcacatttctttgtcatgtcttccggtgtagtacaacatacgatccttcacatcagcttcttttttagcatgaagttggatcagttttttcttcgcgtttgaatggtaacgaagccatttagcccaaatcttagggatatccgctgattctgattgcaacttgaggggatctatcagcatatccttttcaagttcattttgcagatcttctaatttcaaactcataacatactcaccaatttacccagttgatctataatatactatattaatttgtagtcaaatttaaattgatctaatataatatattattaaaagaataattatacatgatctaatttataaaatcaaatttatttttacttgatttcaaaaattatttgatctataataattataattaataaattttatcataaatcatttataaattcaagatctaatttaatattaattataataattattaaaagatggagtaagtttccctactccacctattgaatattatccccgttgggttatactatcaacccagtttaggaagtttgatacccacaatctgactcatcttagatttacctgagaggtttacccagtcatcacctttcacaagtctttcgtttgcagcagtggtatatgggttaaccgataaaccgtagcgcatcagaatagcaactttaggctgtaaggattgaggatcaacagaaatcttgatcgaacctgcctgatcagcttctgtgtatggcgtatagaacagagagccaacatgatccatttcacccagatcgtacttgcaaccagtcagcatgtaatcaaacggtgtattggtgtcagtatagacataataaccgtttttaagtcgccctgtcgctaacgggtgggtttcatcggtttcatgcatccaaccagacgcagccagaacgcctacaacgcgagaagaggccaggacataggtagcttcaaatgaagtcgttctattcatttcctgccccatttcacacactaattgatacaagaaacgacctaaagccggagcatcctttgcagtgtatgcggttgtagcatcgaaaatgccgtttgtgatcacaccatcaacgttgtaacgatttgatacgttgatcagagtctgaatgatatctttgtttacttcttcactggcaacagtacccaaaacatcttcaatcacattttctgcgttgaattggtttgcttccagatcctgcataagttccacggtcatttcagttttgaatttacgggaacgaacgttgatattccaacgatccatttcgaaagaagttgtactaatatcttcgctggtttcatactgacttgttggcgcggcttcgcttgccaggcgtaatttattgctgaataatgcgaccataatcgcttcattaatatcagcacctgcgagagttacgctatcagttacttcgtatacaacatcacttgtcgggtgtttgaaaacttggcctttggtgtaggcagtaccaaccgcaccatttgaaatattatcgcggcttgcatacttaccggaatatgtagcagcgctggaaaacgtcatatcgcctttagggttacgataacgcacaccgaacagagttgcggtaggtaaattagtttcctgaatcgctacaagttcaccgtagatcaggttgtttaccgcacgggtaagagataccagatccggacgggtattagctacgttaattgtttctgttccggttgcctcatcaagaacctttttagacaggccaggcggtagctgtgactgacgcaccagcttgttaattgtgtaaaatttttcactcattttatgttcctgcgttattgacaaacttttctttatttatgtaataaaaaagggaaccttgcggttccctcttggaaaagttggctattacagccctttcacataaaccttgcggaagtatgcgtttttaccgaacatttctttggtaatcataccagaagtgatacggtcggacggagcctgagagcgagagttcgcaaacgggttgatacctacaccgtaacgagttttgaagcccattactggctggaagttcttcggatcagaaccacgcagcggggtcagcgcaacatacggagcgtagtagataccagcatccatttcgttatcgcctttgtaacccacggtgaagtaatcaccacgtgcatactggtcgatgtatactttatacacgccacccagaacaccagcgaatactgctttagtggtgtcaacgttcagagtcttctggagaccttgacctgccggagtgataccgctatcgatacgagccagagcggaaaccacgttacgggaagcgatgatgaagttaccagcaccacgaccagtttgacgtgcgatttcgtttgcttctttgtcgatctgaatcagcagagctttgtagctttcaccagcccaacgagcgccacgaacatcaatcggatcctggaagtcaaacgcaccagctttagagccaacggtctgagtgaaaccagttttaccaacctgtgcggtatagttgatcatgtcaacgatttcgcggttgatttccagcatgatttcggttgccagaatagcagacagttcggcgtcagcgtccataccgtgaacagcgcggagatcctgagccagttctacagagtactgtgctttcagttggcggctacgtgcttcgataacctgcttatcgatacggaagcccatttcgttccacgggttgctagtagaaccgttgaactgttcttgcagttctgctacactggtagccataccgtaagaaatttcagccagagtacctttttcctgttcggcgataacagcagcatccagagcatcgtcggtagaaccagttacagtaaccggagcgccagaaacgttctggaggaacacacgaccagtttcaacgaaatcgtggaacacaatagcgccgtcagcaatagcctgagcagaagtcagtttggtaaagccgttgctcggagccgcgccctgaccggagtacatgctatccggggagaacatcggatggaatgcttctttagcaccggaagccagcggatctttaccgtacactgcgcggagagcgaacacctgaccagtagggccagtcataggctgaacaccgcagatatcgaacgcgatcaggttaggaatcgcacggcgaaccataccgattacagcagggccgatgttggtgatagcaccgcttgagttaccagaagcgattttggttgcgtcgtaaccgtggtcaccagcaatttcagcttccgccaggaaaccaccgaaggattcaacgattttctcgtcgcggtaaaccggatcaacttctgcgtctttttcctgtgcttccataatggcagcaatcagttgttttttggatttggtagcgatatccggtaagccttcctgagactccagaagatcgttccatttttccatcaattcgtttttcttagacattgtttcttaccttttgaaattaagaaagggcttttgccgcttgtacatatttattgatcttggatttctctgccggaacactttcaactaccggaacaaagtcatctttcgtttgcggagtatttacagactcgtcaacgggtttttcagctttggttgctaccatttcaacaattgcgctgagtttattttcgaaggttgcggaatattccagcccttcaatcagagattctactttttcgacctgagattcggtcaaacctttagttttctctgaaactactgcattgcgtttcatttctgaaatttctttggtcagttcctgattcgcttcaaacagggttttaacttcctgctgattctcagtcagttcgtcttccagttcggcgactacatcaacctgttcttccggaatgacaacgttatgttcaaccagaacttctttgaggcccatgatcagggattcaaacaggtcggctttgatgtcacgggaaacggcttctttgttttctttcagccattcttcggaaatgtgcgcaaaatatttatcagcatcttcgtacagcttagtttcgatttcagcggcacgttcagttacctgagcttcgaccagttcgtcggaacgttccgcgatctgggtaatgtgggattcagcgagttttgcagcgccagcttttacagcttgttcgaatacagtggtgaatgtcgctttcacgtcatcagaaagttcaactgattcgaaaatgctgtctaactcgaccggagtatccaggttctgggcttccgccagcagttgttctttaagcatttttgattttcctgttgttttgtttaatgtatttatagacctttcaaacgctcggacaatgccagaaaagcgtcatcagcactattattctcaacaagcggtttgctttgctgattttccactataggcttaacatatgcatcaggtgcgcttggcccccagacgacatcaacgcctacagctaatttaaagcccttttgtacaacgccgtagcctttgccggaatcggagagcttacctaatccacgggaagaaacaccaggaacccaaccagcacgaatcaacgccgccagtttgtcaccatcaccaccgtcgccttcaacaacaacagcgcggccccaaacatcgttacccttccaccacaatttttcaatcaggatgcaagcatttcgcggatccacattcgggcgcggagggtgattcatttcacctaatgcttgacgggtgttaacttgagttctaatataatcgttaactgcttcttcaagtacgtttttaggatacaaacgacggttacggttaaccttttcggcttgaaggaaaataccttcgatccgcaatttaccgtcttttgattccccaacagattctaaaatagattctgaaacgtcaccgcaaggtaaaccccattcttcgattaaaagcatatcgccgttttcgttgatttgggattcattcatatttatagccccagtgcagcacgtttacgcaatgctttcttgcgcttacgttgtgcgcgagtagcaattgacgggttagcacgttttgttttgagagcacgacgcgcgatctggcgacgttgggatttagttaatccggtagtctgatacgcattacgctcacgggttttcctgtctttgaggcgttctacgttgccacgggaatcaacatgcttgacaattacctcatcaagtgttaaaccttcaacaaccgccatcatagcaagggctaaatttggttcggtgaccgccaaattttcgatgattttaaccgtgccttcatcgatacccagaatatctacacgggctttcgcttcgtctaaatgttcctggagatcttcggcggtgatttcgatgtcaagttgcatttacacacctcactcatcatctttatcggatttatcatcctcggctggctttttatcgcccttttcgtcatctttatcagcgccttcgtcgtctttttctttgtcttcttcgccttcgatgcgtacagcttcggcaagttcaacgcgtaattcgtgacgaagcgcttctgtgcggtcttccatgatggagtaaaaagtttttttagcttccaccagattaccgcttttgattgcttcgataaattctttcatcaaaagttttcctcttccgcttctggatttttaaaacgttcttcttttgattcttcttctatctgtttggcttcgctttgaatttcctcatcagacatccggagaacttctttcattacgtatttatgggagatatatttgccgaccaccccttcaagttggcccatcaggtttaaacggcgttccaaaatctcaatatctttgatttcggaatagtaagaatcttgctgatatacaaaagcaatcttacttacgttttcatcccattcatcttctgtaatgattttcttcgcgatcaagttagtttttaacggatccgcaagaacagggttgaattgaatttgcaattcgcgaataaatttgctaaagttcaattcgtcgcgggtaataccgccatcgttacccaactggataccgccatcatcgcgaggcatacggcttaacggaatacgtaacgcttcatacagcttacggttaaaccatttaacatcgtcgatatcagagaaggcagtgccaccgggaagcgttgaaacttcggtaactgctttaccatcacgacgcatcagccaatagtcctctgtcattgacaggttattttgctgattcttaactttaccagtgctcgcgtcatatacaacacggttttttaagccctgtgcaatgttatttacgtactgtgtagctttagggccacccatctgacctacgtcgatatagaacacacgacgttcaggcgcacgggtaatgcggtaaatcaccatagcatcttccagcaaacgcaactggttagctggcttgacagcgcggtgcaggtagcctataatgttgttgtcgcaatcttcaaggccgctatgagcgtaaacaatcgcagagcgaggaatttttaccttgtcattgtgactataaatctgtccgttgtagctataaccgtttttcggtgcggtgtatacgaagtattcacgatagccacggaaaattttaaccccaccgggtagggtttctgtaaccgattctcggatcagttccatgcaacggggatctaactggcgcaattctttgatgccgtcagcttcatttttgtgcatgattttatggaaatagatacgcgaatcaacataccaatcacggaataaacgagatcctcggttatcgaaatcgtgaatattcattacggtatcgagttcttccatgatcttatcttggatatttttactaaaattcgttttagtaagatccatcgtaacaatatcttttccttgttcattaacaatcgcttcgttaatgatttcagaaacagcgttttccacttccggatatgtcatgataccacggtatgtatttattagctgtgttttgttctgaattcgcggatcctgtccggaatagaactgttggaacacagaagaataacgctggtttgataagtccgtttcgatttcgtgcgccccatcgttatttttcggaggcgcaatcgaacctgtatcatcttttaattgggcttcaaattccatttcatcctgtttggcgaaatttttgaaaaaccctaacacattgtctaatccaaaaaagttcatttacaactccgaaaaataatgataaggggtattgctacccctgtatttatagcgtttaaacccaccagtctagcgcgaaagtacactcaaaagtgctcacttcgttgttgctatcccagtctaaagtaacctcaccaacgttggtcgggaacaggccataaatggtatgttcggcggttacttcgtcgttacggtttttctgtttaaccgtagcggtttttttgtagtttgcagggatatcccctgtaatgtcttcacccataccatgcagcatgtttgaccatgctacgattgcatcacgggttgtgtgtgcatcgtcgttatataccgtgattgtccagtcatcataggtacggtcaccagcaacgttaattttgcggttcatgtaacctaccggaactttttcaacggtagacgctggcatagtagcggctttacattttaatttaaagtttttgcccaggtacgggatctctacttcgaacaggttcggacgtgcgaaatcaccggattcaaaggcgcgtacaatatcagtaagcattttctaacctctatgtgtatttataggggcttttcagccccttacatgttatactgacgttgaaccaatcaactcatcgaaatccgcaccagttgaggttgctacgaagttcagtgtgatgtagttgatagaacgtgctggtttgacgtagattgatgcaataaactcattgcgatcaataacatccggcgtgttgttcgtagtgtcacaaaccacacggtaatcgtatacaccgcccagagcgcgaacgttagacatatactgtcctgcatccatacggaaggaagaacgagtgaaatcatcgttattctcaaacagtttatattttgcgttatcgccaatgtctttcttgatcatgttgaacaagcgacgaacgttgatacggtcaaacgggcttggaacagtcgttgcggttttatcaccgtacagaatgtatccagcaccaccagagaaaccagtaaccgcgttaatctgtacctggtacatagaatcgcgatgcgcgttagtcggttcgatagccagtttgatgcagttacgcagttgaccacggttgtagccagccggagacatccacggttgcgatacctgatcggtataaacacagaggccagccatatcacccgcgagcgggatccaacggttaacatcgttgtatttatcatactggaacttatagttaccgtcgatgaacgcataacttgaacttacgttcatgttgttatcaactggggtagtattaccgattttgtagcctgtacgccattctacgaggttatcaacggcctgagccagtgggatattaaccagagcagaacgcggcggagaaacgaatacgacgcaatctgaacgggtttcaccgatagacacagcgtgtttctgtacagtagacgaaatttcggcagtttcgccagcacaagcacccgcaatcagcagaggaacatgcagagattcacgatctgcgaacatatcccaaccagccatgagttcatcagcgcctacagtggcgtttgcagaagtaccgccgcccagttccagaacgccggagaatccgacaggccagtttagggacgtaccatacagatactgcgaaccaccgtttgcaaagaaatcatccatgtagatcgttgaaccgtagatatctttatcacccttagcggttgacacgataaacgtttcttggataataccaccacggcgaacgataaacgcgtattggttatcattctgagggccaaagttcatcgaactgcgaccgctgtttttaccagacttaccagaaggataagacttaatgacagccgaagaatcgtatgcagctttagacagaatttcaaccgttacggtgctacccatttcgccaggataaattgcaataacagacggtagctggtatttggtgcaaagttcctggaaagcagttgcctgaatagtttcttttgcggtgtcaaggttgagcagagtaatacccggatcaacttctacgccatcgattgtaatcgtagcagaaacaccagaagaactggaaacgatttctgtagtccagccactagacagatccggatatacaccaacctgtttagcgtgtgcgatgatcttagtgctcggaatgaacacagacaggattttaccctgatcatcaacgctggtaacaacaccatcttcttcaataacaacgttattgtgtttaactttgatctgatcgtctactgcatagttagaaccagcagcggtgatcgtggttttgatctgattatagatcgcggttgcgttttttgcggcttctttatcgacgacacgaacaacacgcagatcctgaccgaactgtaaaaagtttacagcgttcatgaaataatcagcggtgtcattgtctggggagccaaaatagtttaccagttcgacttcgttagaaatctgacggatctggtaagctggcccccatgaaaatttaccaacaatagcagcacgaccagttgaatttcgaacaacggtagattgtaccgatgtttctttagtttcaatgcctggagagattaaagccattattaagtttcctctaaatttatataaacgaaataccgtgttggccgacagatattgtttcgtcgccactcgttacgataacaggacataacatatcttcataaagcagttcgcgctcacgtgcgaatacctcatttgccaaccgcaaatcgtctttctcgcaaaattctgcgaatttcatttgtgttgttagccatgcaaagcaaaccagcgccataacgagatcgtcatggaaaccttcttccgcagcccacgaaacacctttttctgagaaagtacgaaattcaagtattgtctttttgttatttatgatgagtttatctttctctatcaagtcttttagggttgagcagccaatcgctttcgatcgtttactctgtttcatccccaaatcgttatagctatcacaaataacgttatcgtaatccaactcagaaaacaaagatttagccactgagtgacctgtgctatttagctcgatataaacccatgcttcgttgtacatcataagataacgtaacaggacatcaggcaaaataaggtgcgatgttttgtttgaatggtatacagcaacctgttcaaacggcatagatgtaatatctataatatgcatcgcgtgatagtcctgaccgcgcccttcggctgggtcgagtaccgcaatatatttatgtccctctacaggagctttatactgataaaaattagtttccgtttcatcagtatcaacccatgagagttttgacaatttccagccagcgatcagggttccgttggttcccatgaattcagcacaatgttcctgtaaaaatgcttctttacttgaactggcgatcatcttcgaagaccatgaatagccgtcatcaaatacgccatcatcaccgtctgtatacaaacgctctttaaccgatgtccagatcgccgtgtatggtacgaagccggatttcccttctatagcagcgttccagatatcatagaagtggttaagcccgttaggtgtcgttgtgataaggattttcgatttacgaccagaagaaattactggctgaatcgctaaccacgcatcaataaagtttggaataaacgcgcattcgtcaatgtagatcattgcgaaggagttaccacgcaccgcatcgggagaagatgcaaacgcaccaattttacatttgttatcaagttcaatagaacctttgttccattcaacgataccaggttgcaagaaatcggggagaagttcaatcgcctgttttgtacgatccagaacttccgcagacatagaggctttatgagccaaaacgccaacatatttatcctcgttgaaacacacaaagtgtgcaaggaagatagcaacaacggttgttttacccaactggcgagacaggttacaggcaaccatacggtttttatgcatttcgatcagcatttcgcgctgatagtcacgcaactgaaccttaattgtaccatagtcaatgtgggtgatcgcgcaatatgtttcagcaaaataaacaatatcgtcacgacacttaacccactccatcaacatctgttgcgtccatttcgtttggatgtacgcgcgtttcaggtttgggtttccgttatatcgagttttcttgtttcctttgtttttataagtcgcaaagtttgaactgtcttttgcttgaatatcaactttatggataccgttaatttttaggtaatcactaaactttgtcggataccattttttatcatgttcgctttgcgtccactccatcccaaattcatcaattttctttttcagataatcgggatgcattaatccgattgggtgatctgattccttactcggatcgatcgtcggttccatttccatcagggtttacctctaccgcttcaccattaatgaagccttcttttggttcgtatgcactaccatatttctgcattaattctgtaggggaaccaacaaatacagttgcattctctatgttcatttcattaccgccgccattacctttttcagatcctggttttgttgtttcttcggtaatttctcgcatttctttatgaattttcatcaatccctggttagaattgtttaactgattcatcagggttgtaaaaacttcaacgtgtctcggagattcagagtttttagcgttatgcaaggcaatttgtgccatatccatgatcatctgattcatgtaatgcgcggttttacgcgcaagtgcatagtcttcctctaaatcaggttttcgatctgctgggtgtgactcgacatcaacgagttcgagtttttcatatacaaccatttcttccccagtttcagcaccagggagattttcaagatcaagtagttgttttacgctaaattcttccatcattggcccctcggtttaggaggttgatcaccgctaggaattgggatatcattagcatacgtttgaacgtattcttctccagtgtaatcctgtataggcatatcaaccggatccacctgagcatcaacggattcaaaattgtctttgtccaacgggttcatattggaaaagaaatccgtgtatactgttctgatctcgcctttaatctcgttaacaggcggatacaggtagccctgtaattcaaacattaaagaccattcaatgtgtcgccgtgtcgttgcatcaccttcaaacgatgtatcaggggaaacagattgcagagatattttaatatctcggtctattttaatgtcgtttttatgtaattctgtaatacgacagttgaaatgcggctggaagtatggcagtatctgttctatgatctgaaacacatcatcttcgtaacgggtatacactcccagttcgaacatgagacgatacggagcagggttaaactgcgttactgtttttccaggtgcgcgtaactgcgtcattttttggtttaccgcgatcccagttttacgaattgcgttatactgcaaatcaacgagggatagattcatacgtggtaaaattgtttccgttttagcaacattttcctgactgtatgcatagttcagcttgttcatggatgccaggaatttttcttttgatgcgtaggtaatcggaaccttgataaatttttcttgttcgccgcgaatgcgtttaacttgcacgtgattgaaaagacaacccatcaagacaatataatttcgcaacgaactattataccaaaatccaaacattttatttttcctgtatgggttaaagcgggtataagatttctcctatacccttacatgtatagggtttcccctggttatatttatgggaactgtgcgaacggtgatccgcgcccgttaacaacatcaaacgattcaatgaattcatcgccttcatcttcaaaggcttgatcttcttcgtactgttcaatattggtatcagccaatccatcaagatttcgaataggttcgagatccagatcagcatcgggagcaagattaatcccttcatttcgttgcagtttaggattcaattcttcaccagtatagataaatttaacgaggttgattttacgttgaggacgatcgccgaactggaagaacgggtcaaactcaatccatgtaatttcaaacaggctgttatccatagggaaataaatcaaatctcccagaacagggatcccgccatcagtttgatgtgcaaataaacgaggattgatcacaagtgtcatttcatcgtttgacatcataccgaatttgctgtaaaagtctctctgtccttcgtagtttgcatacgaatcgatatatgctgcaattttccacgattttgtaaacttcgattcacggtcttcgcccaaaattttatcaatattaacaaattctcgacggacgtaatacatatccggagatttcatttgaattgcttcggctgttagtgaatcatgtaactgttgagtagggttatacttgtaccagttaacatacgggtttgttacttcttgtcttaggttccgatcgacgccggaaccatcttctaactgtgcaaacagactttcatcccaattttgcatttttcctccttacatcatcaacactggaagtgcatcagacagtaacagaagttcttgacggaggttttctttttcttgcatagcttcctgtatcagtctggttccatccggagcaacaccgccaggcaattgcataccctgaaacttagccagcacctgaccgtttacctctttaacaagagcagttgcgtaatctttcacccaacggttgttatacgcagaggatgaaccctgaacgcttgtaccttgaccagccttcacaccgcctgagacagctttgtaggggttattgtatatatctgctatagttggcttatcttcgccatcagaacccgctgtagcgtatccagagacgttaccgaccatactgggtacatcaacaaaggatctgatcattgcttcgataacaacaatatcaccatctttaacggttccgtatactgcaaactgtcctgtgtcgtcgttataccagtaatccggaagcggagacaggagatcttgcattgaccgctgatagctcatcatctgggtaaaatagcccatatccgcgccatatgcgttcattccgtaggtacgtgatgcacaaccaccaccgcccagagaaccaccagtaaggcccatcaggaaatcagtaaaccacggataaaccgcagtaccatccatcgatacaagggaacccatgttagtacgcaacactttagtaattgcgaaaatgtgttctttactcagatcgaaaatatttttcgggttatccggccccagggtgagaatgatataccctttgttagatccattgtaatgatattctgcatataggtctaatgctcgttgaatgcagtcataaacctgttcggttgtcacttcgattttgacgatcggagcacctaaacggcgcagaatttcatcttttaattgtgctgggttgttcgtaatcataaagatcctcaaaaggggccgaagccccttgttaatcgttaagcgacagtgatcgccagttcatcagaaacgatgactttatggcttgcatcagttaccgttactttgtaagttccggaatcagaaggctgtagcgaatcgatggtaaatgtgttagcatcagtaccaacgtttacgccgtttttcgtccactggtaagacagcggagaaacaccaccattcatagttacgcttagagacaatggatcgccagtagtgtattcagtatcaccagttaggttagtaccgaatgacagaggcgggtttttgctctcataacggagatcggcgtcagcttctttgatgtacagagccagtttagcattcagatcttcgatagttacgcgatctgcaagtgcctgtgcaatgttcaacgcttctaaatcctcaacacgtttagtaaggtcggcaatcagtgcataaatgcccgtttcgttaccttcggagttatctcctacctgagtgaacaggttgcgggttgttgttttcaaaccagcgcgagtaacaggatcggaactaacaccatcaccatagatttctttgttaatctgctggctagttgcaacgaggccactagaagagttacctacaacgccttgcagttcccagagtgcgctagtgttggtgcgtaattcaccctcaacaacactcaaacggcctttgatactggtaggatctgaatcttcaccaacgtcaccagttaagatcgcaacttgtccctgcaatccatcatcgccggattcacccagaatcatttccatatccatcaatctgcgtttagtttccgcaatatcataacggatactaccctgagcagaagccgtaccgatttgaccgttaatggttgcaatttgtgcagtgataccagttaccggatcattgatttgtgtagccagagaactaacggagttttccagactgttcacacgatcgttaatggaactggttgaacctgacgtgcgaccgatataactattaatcgcatcaagttcattttgcattacaatagaaccatcctcaaggatcttgattcgcgcatagattgatcgggttgtggcaagaccagaatcacccatttcagcacgaagttcttttacctcttctgtcagttgtcctacttcggaaagcgcccaatcatcttccagtttggttatgcgagtttcctgcatagaaatagcacgttggttactcagtacgcggtatttaaggccagtaccagtagaagaggggtcaacatcaccatcaacgttaaatccaggatatgaaccaacttctttcttaatgtaaatgatatcattacgaattgtgcggtgtttaggatccttttctggatcgtattccccaatttcatcgttctgagcatttacagaaagggttaactgtgctaccttgttctgtgtttgggtgttagataaagttaatgcctgaacatcctgatccaactggttaacttttttgattacactttcatcaccaatagcatcaatgttttcagtaatcaagttaacctgatcgattacttcgttgattttatcattatgggtgatggtattttgttctaactgaaccgcgttctgctggatgtttacaccagttcggttaagactaccagtgtttgacactttatctggcgaaccgtccagagtttcaccgtttttgatccaaagaatcttcgtttgagtcgtggcgtcatctgggacgccatcaacaaacgggatcttcggcaacggatttaatttgtcgatgatcatttaataacctctattgagtacgaattacgtagtttaatgcgatgtttttcatgcgggtttcttcaccgcccacaccagtagctttagttatagaagcatcaaatacgcgagcgctttggtcattcttctcggcgcttttcagttcgtaaactgcttgccatttcggaatgttaccgccgttctggtagataagttgtaatgggtgttcgtgccatcccaacatatctccttcatatgtaccatacccacgattagggtttagtccacgcccacggtcatgaccacgtactgcaacgcctcgacagtctggaatgttaaaccaatcaccgccaccaccaaatgtataacctatacgctcaaacagtaacgggtaattatttttattcagtgaacgtccatcacaaatatacaaactaccgtggtcagtctggaaaccagtcatgacaatagcacctactgggaaatgccaatcaagatctgtccacgtctgatatttgttgttatgtattgcgctattctcataaagagaaccattaattaccgcactacgatcgctaggcaatacattagcattagaagaaagtgcagtgtttgccacataaccaacagttgttgctaatttgacaacaccgaactgggatccagttgcacgggtattgattaattttttcgcagtaatcgctttggtgtcatcagtacctgcgtttgcttctgcctgtgatgcgatgcgaataacgcccaagttgctttcagttgcagttaaacgaataaacgtataaggtgaaattgcatacccttcacggatcgtaccagcctgaacctgtgcaactgttgccagttgtaccaaaccttgcgagctttcggtcgcacttgactgaacaggaaccagagacgcgatcgcttgcttgactttaagcggagtcatagttacagtgttatctgtaccagcaaccgcctgtgcagtggtagcaattttagaagaaccccaaaccgattctgtacctttacggttattgaacacatagttcagagatcgcggagtaatagacgatgcatcgttagttacggttgtagattccgcatcagtcgaatacttcgtataaccccatacggtttgtgatgctttagggttctgcatacgatatgctaacagtttcggagtaacaatcttagtgttatccgtgccagcgtcaatatcagcttcggttgcgatctgagcaataccacgaacagaagttgttgcgataggaagcccagtatcagtacgcgcccaactacctattttttccaacgcatcttgtacgttggttatggtatcaggccaatcagtacctgttgggtcaaatgtcacgtaaatggatttatcacttacgtggttgattgtattgttactcatgtgttatccttatgcaattcgtttgaagtaatacacggttacttgcggagtaacatcaggtaagaaaccagaacccaacttaacccatgaaccatagccattttttgcggctacgtcgatagttccgatttgacgaataccgttttctgagatatttgttgccgggtgcggaacactatcaataaatcgacattctaggatcgtaccatcaacacctttgcggttaacttctgcgaaatatttttccgctgcaacgaattcagtaaatttgttgtatgccgtttcacaaacagttgcggcgttagtcccattatcaaagatgaaaggaaagccgtacacgtgaactaccgcctgttcttggtctgaatcgatgttctgtacaataccatcaaaagaaacgctctcaacctgctgtacagcgattggaggggcatcctcagtcatggtaacaacgccgttaatcgggatttgctcgataagcgtatacaggtcatcaattgcggattgtacgtttccatacagaacaccgcgttttgtttggtcaatgtttggttcgccgatcgaacgtttaccgccgatcagaggcaacttaccataagtatcatactgtaagtaatctgcttctttagagaggacgcgagcgccctcccttgtttttgaaatattgttgtaagccattatgcaacccttatccagcgatgtgcagtcatatacggtggaatagttttgattttatcaggtaatgtgttaccatgattcactttcaatgtatcctcacggtatttagtgtatccagggccagaagcatcaggatctaactgacaaccaccaatgatcacagcaccattttcatcagcaatcagaactttatcttttgatacaagttcaggaacgttgatgattttgatttctgtaccacgatcaccgcctgtaccacctgccgtatgactcggttgaccaccactatctaaatcattattgtttaatgcgaaatcaggatccgctgcatttgatgtccagccagccaggaaataaccttctgcgtaacgtttccaaccaccaaatcccatataatcagcagggtttgccgggttgtgcgcgttttcatagatggttccgatcgggtggataatatcaaacatagcctgaatatccagaatacgtccctgataggtttcccctgtattacgcattgttttctgagaagggttattataatcggtatattcgatacggttcgtcaatataacttcttcttcgttattgagataaaccttatcagctttttctttaataccgccagttccttcccaatccatcagagtaccaatatcattgttaaaccaacggatcgttacaacgtcgccggattccagttcctgagcaaacttgattgaagtcactacagaatcagtgaatactaaactataatcctgtcctgacggaacccatacaccagagttaccaacacacgtactttcatcaacaccttccgcaccttcacaggaaaacgccggatagtcagcgtcaccgcctttaaccagttgtttaccgttgagaagcagttcaaacgagttagggttaatcaacacgcgagggttaacaccaaattcagcaggtgtaaactcttttttggttgccagatcacctacccactgttcaccaggaacggtttccagagaagtatcaccagtctgatacatgcgcatcacatacgcttcatagctcgatcgccatgttgctaacccatctagataggtaacaaattgaagcgtgtcaccagcgttacacgggtttttaagacgtactgaattaccatcaagtgcaaccagttcaccaggagcagaaccaatcgatccatagtctgagttatcagcattgaatccgtctttctcatcgatgaacagcaagttaccgcgatagtaaacttcgaacgattgcaggttgtattcattaccaacaccgaatacgttagggaagtcagtttgtccctgagtagcaatatacgtttcttttgctactgttgccagatccgaagttgtgattttgtcaatctgtttgttttcgacgtattcccaacggcccggagaacaatacaccaattccacatccataaaatctttaaacagatctttaggagttggggaacctttgatagtatcaccagttgctgggatcagtctaacgttgttggtagcccaacgcgaccacacatcacgcagacgaataactttgttataatcgcctacgccgcctttcgggaggtttacggtgattttgtttgcactggtattcaacgcccatgattcaccaaattttggtgatagcgtcgtacccgcaaaagttttccaggcacctgctggatgggggatctcaccatcccccagcatgttatacaattctgtaaagttgctgttagtcttttgaccacctcgacgcaggtaatcgcctgtaccatcgtctacaacctgacctattaaaatttcttgtttcatgacgcgatccctgatttaatcgtatcgattgctttaatcgtgaatttaattcgatcttctttgatcgcttgcacgttagcgtatacgacatcaccagcaccgacagtaaagtttaatgtaaacatttcatcttcactgtttttcaaaatagcgtattccgttgaataaatcgttttgtttacacgatccacggtcattaaaacttccgccattttggtaactgtaccagctacgttttctgcgtatacgagcaccttagccccgctaaattcgctatatccgaacataggaatagcagtcgggtttgctttcagtacaagcgccgtagtgtcaacaggcatcgttttagaaccgaacatagattctacagaataatcccatgttgttaccgcaccttcttttttggtacaccagatttttacaaaggtgtaaggtgacgtgatgtacaactggtctgcaacccccgcgatagtatcgccaacttgaggacgaaacgcgataggacgatcaacagagacactacccgtactatttatgaagtagcaaccttcgccaaccttaccagaaggaagaacaacggtaatcgaacctgttgaagtatccatgtcatgcaaggaacccagttcgatcggtgtgcttgaatagtaagtgcgtggtagtttctgatagtatccggtagcatggatcaccatgttaccgacaccttcgtttgcagacagcatacgcacatcaccaaacgcattataaacgttggtgatcatttcgttcagtttaacaccaccatcataaagcgggtcgcctgttgatgggttgccgatttcaccgacatcaattagtttttttgctgtttggtaagccattgtttttccttagaattcgaatacaatactcacttcctcagtctgatcaagggagcgaataataggttgtctgttttccatgtaaatcatacgtccggaatcaggttcaagcgcgttagcattatagtaatcaccagttgctttcttttcaggttcggtcgggcttgcctttttaatcaacgggtttacaataatacttatctgacggaaccctttgttaccaggaagcgtagattgcgggaagaaaagagaatccatgtatgcacgaaaacgcattgaattcaccttcaaccgatacactagatcgtattgtcctggataccattgaatcacgttatcataaccccaacgtaccggatcctcttccagttcgccagggaaaggaactacgatatgttcgtttgtacagcggttgatcacgacatctggcgggattgtatagaggtattcccatttatatccgtcgcccatgtcgatcccgttagcttctccgcgtggaggttcactagattcatgagacggactccagataccgccgatcctgatacattcaagttttccggtaatgctcgaaatggagcaagaaccgatatcaggaacatcgactacacgataaaccatccaacctttacccggatcagtacggttataaggcgcggtgtttacaacgacaatatcgttaaagtaaaagattttcgggtttggataacgagtatcaccccagtctttacgtggtaaaattgcatctatcatatcaccaggaactttagtagccccgatcatatgcgtccacatatcactaacaccatcggtgctatcatttggatatggcggggcgaagttagggtcggattcgttatccgcccatgattcagttcgcccaatagacatataaatcgtgtttagatcggcggcatcgccgatcatatctttgaagttcatcaagttttcggttcggaattttgcagtaattaccgaccgatacaagttttgttgtgccatttaatttcctaccttaatctgtgatggaggatttggatcacgtgggtttcctgcatcatctttcagtcgtttatccaccaaattacggaactgtgaatatttaacgcctgagcaatcgaacaacgggctttgatcgaaccgtcgcgcagaaggaagaacaccgttaagcggtttttcttcaatgtcatattccggaggtacatcaaaaggttcccccgctcgcgggtgtgcggtgtacagaggttcaccagtaaccaggtcgaattgttggtttccgttaccgtccatactcgcaatgcgatcaggccagaacttaggataaccactatcgaaacggtagtttctcagaatatcaatgattgtctcgttatgagtcattgacaaaccagagttgatgaatactgttaacatcgtgatacccataaagccgaatcctaccggatgaacaaacctcaatacgtcatccttataacgggaagtcggtagatttgaacgaattttcatcacatagtaagatcgtccacggttgatatagtcgatcgagttgttagccatttgtttaccgcgaacaccacgaattaccattccggtgaaattggttttttctgacttgacaacctgtccttcgataaagttaccttgagcattatgaagagtcattgaccaacgcaattgaccattttcatattcacgttcgatgtatgtaacgttagcgcgtccagttggtgtatagatcgtccggcctacgatatcctgactgatatttgttgaactaaccaaaatatcatattcgagactgttggagctttcgatctcaacggaaacatcttcgttatacagcaatttaaacaggaacgtataacttgcttcgatcccttttgttgaatagaaatcacttgcacgtgattcgaaaaatctaaccactgcctcacgtttggttttatccaggtaaatgttacggcggttaatttcagaccacaaatattcaacgttgtttttctctctcggatacttgttccggatgaggttcagcaatttgttatagtaactgttgcttcccaacgaaatgtattgcagatagtattcaccaaatttttcgaactgttggttgtccagatagctttgcggagcaaaacgagtgatcatgtgactcagatcagggtcgattaatccaggttcaatatccggcgtatatggattttcacgttcctgattaaccagacttgccaccattaaagtgttatcgggtttccagaaaatagtgagttcatcccttgcgcggtatgacagttcatagaatccaattatcctaccacctgagcgatacaacagaacaccgtttgtgtacttcgtaaaaccagtaaacttgatattattcaagtagatagtaactgttcctttgtcccaaacttcatggtttacacgaatcgttgacgcaggagacgcgctatcagtaaccagagtatacagggtttccggataaaccaccagaggacggttatcattggtgatccatgtgctaaccttatcgcggaaatgccagctaaagtttgcttcattgtagtactcttgcggcccaaagttccatactgtaggatcgttctgatttgcacgaactgtagcaaagttaatcgaaatgctcgcagtataaccaggaacaagatcgtatttcaccgctgaatgcacatcttccggatacttttcaaccagatctggatctgacaaagtgcctggatatttgtagttaccaacagaaatgtaaacttcatcgccattggttgacatattggtatattcatgagtgatataaaaacgttcatcttcggttttaccataaacacgggtaaacgtctttgcattctcatcccacagataaacgccagcatcgtttgatgggatcacgttagctttgacagtcggatccatcatcgccgttttaacttcaccagttaccagaacgtacagacggtcatttagcacgtccatttttttaacaacaattttatcatttcctggtacgatggtatatgaaacttcatcaaaaatacgttcaccaaaggtcggcgaaccaggatcagtatcaattggtgtgttacgtaacgcaatacggcgcataacgttcttagcagccacgtagagccaatcactagaacaagctatagcttcggcatacttcgacactccgcccggtagacgcgcatacgtgttgtatgaatcaacatcaaaatctaaccctgactggttccccagcttcgcaaacgttacatcatcagcagaaaaacgaacttcatcagaagaccaacgaatatctgttgacgtgcgcccgtaaaatatgcgatcgtatcctaacacatacgtagtgttagcgctctgataagcaacggtacgggaaaccggattgcctacacgatcgtttaatgctttgtagtaataccacgtttggcctttgtcatttgacactttagccatattctgaaaacgttcaaacaggtaaagcaatccgtttgagtataccaggaacgtgcgatctatatcattacaaacgtgttcgatgtgatcttgaatttcatggtagctttcttgtttcaggatcttatcgctgatctggcttacatcagaatacaggggagagtatacaaaatcctcaaccatcagagaagccataataacatcatcgttaaaatcgacgtaatcacgattgtttttggcgaatttttcattgataaacgaatcagcaggggtgaattcacgcatggttgtatatgcgtaggcgttctcatcaaacgtccataattcatcgctgatcacccaatcagaaggttcaaacccttcatgagttgtttgaatacggaatttataacgtgtatttggggcaacctgatcgctaaaccattcgttttcgtagctataacccaactgcgtccagattaactcttcgtctggaataatagttccgtccatatcacggctacgggccaattcaaccacataatagaaatccatgccaacatcatcccatttaaggtaaacgaagttagcagccagcttatcaacgcgcaaactcgtaatcgaaggcgctttaatcattatatttctccaaatttgcggttatgtatatcacgtatttataaaaagaaaaacccctatccgaagacaggggttaacgattattgactgataggattcatagtcaatgtggtgtattgaggacgcaggtcattttcaaacacgatcaacgatccatcgcgagtaaaaatggtttcttcgagaggctttgcggttagctcgatataagcagcgctgaaactatcggcggatacgttcagaacgcccaggtcaaagctaatgaaatcggtgtaatgagaaaccgatccaacttcgtaatatttattacgggttcctgcatctgttaatttttcaaagtcatcgcctgtataagcagcaatcgaaatatccccatccttgaacgggcctattacaatttttgcgttaccatcctgatccatttccgtagaagcataacgaacatcataactttcgtcttctccgttggtgaacttgaatgtactggaaatgattgatttagattccacctggttcaagaaatggatcccagacataggggcgctgtaatagttgtcaatttcacggagcaatttaatatctgcttccgaaccgataatagaggtatcagactgatcgacataagtcaacatcttagatacactgaaagatttgttgaaaatttcaacgttgtcagtatagtaagagtcgatcgacgaaataacctgaccgcgtaaccattcctctgattccgtcaacttactgatatcatacgttacttttacagattgcacaatatacagatagttaggatccataatcgacggggtgatcgtcgcgaggttatatttcgaaagatacgtttgcatatcttctttctgtaccgatgttaggcgcaaacctgactttggtttaacagaaatgaaagcataaccgggtttttcgttatcagtaaagcactgtaccgcctggatgatagaaccaaatctgtgagacaggaaagattcataatccgatgcagttacacaacggcgttgtgtttcacgcataacaggggccagttctcgaatacgctcgatatcttctggatcaccaccaccatcagcaccgacataatcaggggatttagtcgggttttcttcgatgttagtgatgctaatattggttaatgtatcgacatagataaaatcttttgcaccgttagccgcttccccatcggttgacaggtattcaataacgatagtcgatccattagcaggtttcaagcccccgatatattcagcggttaatgcaccacccgccacttgttgacttgcttcaccttcaccgaaataaacttcggtatgtccatcaacagtttcacgcatgtagtaaatcgtgcttgcgcctgttgcgtttacaatgctttcgtttgtccagtcttcccattgtgtgccgtttacagttaaacgtacctgactacggtcaatgtttggatctcggatcaggatactcgaaccgtcataaattagttcagtacgaactaaacggccttgcaccaggttcagcattgatgtatagttgttattactatcacgaacgataacaacgtcatctgatacaacaaaagaataactgtctgtattctttacagtaccgatgaattttgtaccgcgcgggatacggatcgatgttggggtcagtgggttagcagccgtaatcattactgctgtgcttgcagccgtgcgagaatctggcatatatcccagatcttgagcagactgtacaacagaactacgcaatgcagccgtgcgaataaacgattcaaatagagccgtgttacccatctgctgaatataaagagtagcatacgacagaaggtcgatcagtacgttcattcgcgagccggaaaaatcgtaatccttaaactcttcttgtccacccagccaatcaatcagatctgttttaatttcttcgaaagtacccccgataaaaatatcggggatttggttaatctgttttttgacagtcttagtcttagcagtagccattattataaattcctcttgatcattcgactatttagtatttcagtactggaacacatacactaatcgaaccaaagttgattgctaatcctatgagagacagcaatttattcacatattgtgtgactttactcaacgccagcgtacaaatttggttatagattactttgcagtgatctttaaacgagcgagaactatcaatgaaatttttgtacagagactgagcaccagtaatcgcattttcatatgacttgagaagatcgtcaaatgcgacaccacagaagcctaaaaactcgtttattgtactcatcaaaggcaatttctttaattcttccatcgccatgctgtatgtatctttcattgcatcttgtagagatccaatctgttcctgtatagcgtcatacgcggcctgtgttgcagctacagcagcgtttgcagcatccaatgcagattgataagccgctgttgcttcgtctgttacagcgccccacatccagtttaagtactggttgaattttctctgaattgtatcacgttcgaaaatctgattttttaacgttttgtaaagttcctgtccctgttcataaagccctcggatctgttcgtatgactcatcaacaaaagccttgactttttcctgtgcttgttgatacaaatccattgcagtgaatccagggaagttaccgcccagaattatatcaagtggtttgatttgcatcatgatgttacggatagccagcaccgcagaccataacgggtttgggacttccggagggatagcccatgtttgcatgatccgaccgtataagtcgattaatgcaacgcaaccgttttggaacatcgttaaacaccaatcaaataacgcgctacacgcatccacaaggtcgcgagcgccagctttgacatattccacagagtaattgtatgcgcttcctatggccccgtatattgcgtttatgacggtttcatatgtttgttgtccggatttgatgattgcattaaacgcatctttcaaagtctgaacagaattatcaccaaacaccagatcgtaaatgttgatcgcaacacctaagatggttacttgaggcaagaaccgattaatcaatccccatgcaccaccgataatgttaaatgcagcgctaatcacttgtctgaaaactttcatagcagtttgccatgcttgctgtgacaatgcgagcgcccccgccattacttcttccatcgatacggataaaccatcaaacatcgtcgcgatcccgaatccattctgtacagcacccgttaacatgttaaactgtagcttgaacgtattacgggtttcgttccatgcctgtaacatagcatcactgatatttgtatatgcgaaaccaacagttgccggaatgcacgaaatatcagcacggcttaattcactcggtaatgccccataagtggaaggcattgcaggaggaacaggaggaatgcttgtatctgcgttggtgttaacctgcatacccgtatatttgcattggtgcgcccctgtttcatcatgcttcatataggctatacgattaccattccaataataatcaatattggtgaatgcgccagtgtcctgattatacgcctgacgtatgcgagcatcacatacagggtttgttccggaaagatacccgccactgttttcgaccttatacatagccagttcgccagggtttttgtataggtttgattttgacagatccgcaccataccaatcattaccaccattgattttagttgcaccaatggatgtaatgtaagcatcaatttctgcttgagtgttgaaataataaccgatctttggaacaaggatccctgttggttgtccggtatttggatctgttcctggtgaattgacaacaggtagatccgtgcttctatgtccgaacggttcttgagtataaagatgagtaccgattttgattatctcggtatcccactcaaccccaacagccggataattttctgtatgcccttgccagataacccgccgataatagccagcggggatctcagcatcacaaggatgctgataattttgcataattccatcaattattgattcataatccataatcatgttagcctacctgtaccgttgccccagtgatttttgttaatgcgccagaatcaataaacgtgttattcgttgctttgatattgatatctttagcaccgatatccatcgtttcttcaatctcaattttcgcattttttgcagtgaccgttgcgtcttctgttacagccacggttgcattctgtttcacatttgcggtaagattctgatcaacgttaactgttgcatctttgtttacagttagttcagcattgcctttaataaggccaacgtactcaccttcaaccgtttgttgaacgtttccacgaacaaactcagttacgttaccatcaaccgtttgttgaacgttacccatgttgtaaatgaacgcatcgccttcaataactacctgtaagttgcctttaacgttgagtttccggccctgcatcacgatctgatagtcatcccctacgattttaacaacgcgggttccatccgggcgaatttcttcgtaactccctgctgggtgaacacggttatatcgttcgtatcctggggtatcatcgaattcctgaatgtgtccggatctcgattcaaacaccatgttatacggatattccgcattataagatgatgctggttcttcaaacatcacacgggtatcaccaggagtaaacggatcttccggactagtagccgacaatgtagcaccgttatacgcagcgtaagcagcactcagagagcgcccttccggatctggtacttgtaccccatatgattcaaggttgcccgtgaggacgattttagacacgcgagaagaacggcctggagtttgactagcccacagtgaatttcgaagaccattataagccgcttgccaatcttcatttttcatcgctttcagggtattggtgaatttagcaacaccaccgacgcccatttgaaacgacatgttttcgatcgccatttgacgaggacggttgaggttcacatacacttcacggacgttagcggttctctgaatatcagatcttactttggctaaatcttgagcaaataaggttgatacctcttctgccgtgattgttccgtttgttacttctcgacctaccgctttactgatcgcagcgttaatttttgcagtgtcgcgagtcttttcacggataagcaaatgcccgatcccgattgtcggatatccttcactgtctgtataccatcgtgtacggatcccctcatcctgcttgagcatcttttcgatagtaaatccacccgtatcagggcggttatcttctggtatctcatccagtgggcgatcgtctgggtttactgctatgcttgtgtttgaatcacgaatgatgacacttgatgatcctttgcctttcaaaccacctaaagcaagggagttaacatcgttaccaacatagcgagggtattcacccataggatcgcaaaaacctttctgtgtgtctggttgttcgacatattcaccagcgacagtaccaattatcataccatcttggtgccatttgtcacgccaataaccaacaacaaaggatccgcgagtgataccagttggagagaagcccacaccagagatcgcagcgcttctaatatcctgaataggcatcatccagggtaaatcttcaacaggaacaccgattgcatcggatttttgtttttgggctgggtgttgtccaaatacacggacttgaacacggcccaacccgcgcggatcatcaacgttttcaaccaccccatcaaagaaaggggagtgtaaatttccgcctaatttcatgagttagccttttccatttctttaataaaatcattcagaaacgcctggatgtcagacggactaatgatttttattgttcgttttgcttcattttgcaacactgcatcttcataaatatctacaggagctaatacaccttgatactgtaaatacagcattggtttgtcacctttgtcataccaatgaccagggttattggggtcttcgacaaggttataatacttgttgttgttttcatctacatgatacagaacctgttcaccgccaacctcagaataacgctgtatagcgcactgatacgcggcttcctgatcggagatccaaccatagaaagggtcataaacagagttaagcatcaacaggatccagtagtattgctggtttccatataatgattctgcaagttgttcaggtcgtagtgtgcctgttatctggtaactacgggttttatattttccaatcacacgattaaaataaaatcgatagtctcggaaaatatcagttgtctgggtgcctttgtaatcaacaggcgggaagtatgaaaatagcacgataagttcccctatctaaacgttatattattctatttaggatttacgcaatggctggaagacagacgtataaagggtcgtttgtacccgaaaacatacagaagtataaaggcgatccgcgaaagattacgtataggtcatcgtgggagcgctacgttatgaagtggctggataaaaacccacacgtaaaacgttggaattctgaatgtatagtgatcccgtatttctgcaatgcagacggtaagagaagacgctattacatggatttctatgtggaaatggaaaatggtactacatatctttgggaggttaaaccccttaaagaaaccatgcccccaccgaagccagtaaacaacaacgtacacaataaaaagaaatttattgatgctctttacacctatacagttaatattgataagtggaaagccgcaaatgagctatgccgtcaaaaaggctggcagttcaaaatagtaacagaagaatcactcaaaaaagtttttgggtggcgaggtcagtaatccctggagggaaacatgagttttatttttgagtttgagatcatcgcggaagaggataaacccaaagcaccacccaaacgcaaattgagtgattgggttgaactggggatcaaattccgcaaggcaaaaacgaaaggtgtttctgctaaacgttttgccgattctgagggattaaactacgcaacgttcacaaagtcaatgcatcgttacaaaaaacagatcgatgatgagattgaacgacgttccgcagagacagaagcccgtaaaaaacgtaatgactaccgtaaaaaacacgggatcgagatcatcaacgatttccgtaatagtctgaaaaagatcactgttggtgtatcagcagcaaagcgacagaaagattcaacagaatggtttggtaatttcatcaaaaccagtatcaaaacacaccgtgtggcaaaaccagcaacgggtcgcctgtacacgtttgcatatgatgcaaaatataaagacaccctgccgtattgggatagatttccactgatcattttcttaggatccggaagatcgaaagcgggtaacttagtgttctatggtttgaacttgcactatgcgccacccagagcacgacaggagtttttagaagagttattgaagcgagggtacggatccactaaacgcctctctaacaagactgtactcaaaattaactggggtaacgtgaaaggtatgcgaggcgcaacagaaatgatcaaagcatatctaccatcacacctcaaatcaccattagcagagattgcccctaaagattgggcgaaagctgtttggctaccgactcagcaatttatgtccaaagggaaaccttacggcgcgaaaaaagtctggagcaaatactaatcaaaaagccccaaccgaaaggaaggggctttatttttacagggtgctaactatttctgcaagtttgccaggggtcgcaccaggtctaactttcatagcatctttcaggtttttgtcaaccatcttttctgcatctttttcgttaaacccgcgtttcaccatcacagcaataactttttcgcgaatgcctttagccgcttcattcagatcttcggattcagccagaaccagtttagaaaccatatcgcctttatattcttgggtgaattttttaccagatactaggcgaggtttgccggaagcatcaactacggtaaacactgcatattcaccgcttgctttagttttagaacgcccagtgtacagaagacgcatatcgttgcttgggagtttgtaaactttacctttcaccagagcttcatccatagggatctcgatttcgaaatcttctgctaactggttatacagatccagattttcttccgcctcttcatacagagtagcagctttgaatttttctggtttgtcgaaatccagatcatcatccggattgccactgtagaaagaaacagtacctttagcccaatcgacataagccgcttgaactttaccagtagtcatacctttcaaacgtacaatgtttttaccgaagtatgccagatcgtgagaatccggtgctaaaacttcgaaatcagaaccatgtttgaagtgaagaaaaccgattgaatgtttatcggaagttttagcgcgttgaccacgtgctacggtacgagcgagggttttaccttcggtcagaaattctttgaattttttcaagtgagtcattttgtttttcctgatttccaatatgggaacatagtaccagtatttagtgacggggtaaaggaaaagttttcagaaaaagcataaaatttattagatctaagtattgatcttcataaaaatttatgataaaataaaatattaatatattatagatcataaaatttatgaattcaagatcagatccaaaaatttttgataaattatttattaaattttacttgatcttgttagatctttttgataaaattttaattaataattattatagatcaaagattttaaaaggtcaagcattttcttcaaatttttatattaccccgtcaggccgctttgatcccgttccccgctaaatagaggaaaggagatcctatgtctacagaaatgattttaaaccaaatctcacctacaaactttcgggttgatattcctgataacagttacatgaaaggtttgactttacaagttcaaggggttacactaccatcaatgaacctcccagcagttgatattcctgcaaatatgatggttcgaggtaaagtacctggttcggcttttgagtttgatcctttgatgatccgctttgtagtcgatgaggaaatgagatcgtatcttgggatttacatatggatgttgagcacaaacgattacaatgagtttaactctgttgcgtgggatgatcctaagcaatcattcgctgtgcatatcctggataactcccagatgaaaacgatcgccacatttagattttatggtgccttcccaacaaacttgggtgaggttgaattgggttatactaacgatagtgatgaagcggttacatgtatggcaacttttggcttccttcatatggaagttgaaattgacggaaaagtagtctcttcacaaaagagaatgagctaatgatttatgtgattagtggaaaaaagcgaactggtaaagatacggttgctaaatttattcaagagacgtacaatgatgttcagtgtgaagcactggcatttggtatcaaaagaacgctaagagtagcaatgcagcgatatggttacgataaaccatacattcgtagtctggttgaaggaaaatattctgatcctgatgctattttttacgaaggcgatcgagagaaacctcttgtgatgtctaatgaagatgttctaaatattttcagaatcgggcttgaaatcctcaaagaacgcggatacaatattgtttatcatcctgatgatatccgtaacctgattatgagtaacgatactccctggagtatcagacgcttgatgcaagtgtttggaactgatatcgtatgcaagtatgataacacggtttgggttcgttacacactggaaagattcgtcaataaatatgctggtgacgaatacaatcaccttctggtaactgactgtcgtcaggaacacgaatataaatacctgaaacgtttgggtgctaagtttgtgtttattgtaaaggataccggaattgttgatgaacattctacggaaaaaggtttgacacctcaaccgggagatagtatcatcactaacgaaggtactttgaaacaactaaagagcaaagtgctcgatacttttaaattttaacaatgggtaataaaatgtctgatattcaaaaactgcaaaatgaagtactggtactgaaaggccgcgcattcgatcttaacgaagttatcgcgcaaaaagaaagtgaactgtcggttcatcgtcaacttctgtccgacctgtgttcggtactgggtattgacgcaagccagccagtaaccccagaagcagtgattggtgcggtatccgctctgatcccttccgttgaagtcgccaaagacgcggaagatgaagccgcctttggcgaagaagcgtaaaaacaaatttattacaaaggggcttcggcccctttttttattggggtgttttatgaaatcatttcttgaaatcacaaaacctgttgtagatcctggtatctacatgtgtgctaaattcgatcaggcttcatgtgaggctttgaaaaatgttcaaaagacattaggcatcacaaagaatgctgtttccgccgaaaagatgcatacaacgatcgtatacagccggaaaacggttgatttgttcccacaacaggacattatagaacctgctaaactggttgatgttgaaaagtgggacacaaaatacggtagcactatcgtagggatcctggaatctgaatacctgcatagccgtttcaaagattcaattgatgctggcgcaacatacgattacccggattacaagccgcatgtaacccttgcatatgattctatgctggatgatatcagcggagtgaaaaggttgttgacactgcccgtggatttgactattatccgtgaagaggctgaatcactggatctggataagtcgttaaaagacattacagaacacattgaacagcgtggcgacaagtgggttgttttgaatcacgatagcacaaaagaacttggtgaatacgattcgaaagccgccgctgaaaagcgtttgcgtcagatcgaatacttcaaaaatcagtgaggattatatgaacagaacacgtttaatgtatcttgttaacagtgtacgaaaagaagttagcgaggcgtttactagcgcgttaggtgactggtatacaatcaaggtagcggctactgctgaccacattgcagatcgctttaaagaccgttcagtatcgattaaaaaagatattgaaacttatcgagacatcatgatgagtctagcaaatcattattcgtgttatgttctaacctacgctgtgaaggccaaaacagaagggacacaggaagttattgtttatcgtctggtaaatggtaaaatctttgcctgtcctataactgttcaaatgttctttaacgaaggcgaagagaagccagtcatcgctatacggttgcgaacagtgatccctgagtatgtttctttagctaacagaaaaacaatccaggtaaactacgttccaccaaaaattaattttgaatatgacggttatcgtcgggttatgtcccgcctggatcgtctaatcgcttctaaagattgtcctccgcaactttggatgttgaaaaactgaaaaaagcccttgcattcgtgcaggggctttgttatattggccttgtcgaaacaaaggaggctatcatgaaactttactggttaattttctcaaacgggtttgttatgaaaggaagtgttcattgcgcaaaaacttattgtgaatggaacaattgcactttcaagatcctgagtgttgcggcgtctcaacctgtaggggattactaatgactggtgataagtgggttgataaaactttgttgttgactttggtttatattatggtaagatacttaatatagaaaaaggaggatatcatgagaaacttaatgaacatcgcagaactcatcgcatacggcagctcactctatgttttggcgcacggtgacggaaaaggttacttaattttctttggtatcggccttgctatctctttcatcaaaaaattctttaagtgagaaatatattatggctaaaccatccggcaaaaaatataacgtcattgatgtttatagaatgactttaaaagactttgaaaacatgtgtcgggcttatggtagttctaccacccttcgcgaactggcagagtctgctaaaaaagaacgtcctcatgtttgcccgaaatgcaacggaaaaggttatgaaaccattcgttataacgcatatccgtctgggttgccagattctggatgggtcgaagatatgaaagatttcaacaaagaatgtgacctgtgtaatggtcatgggcgcaccaaagataaatttgttgcaaaacctgttaaagtggaatatgtaaaatcatgaaaatcgtcgatttgattaaaatggctaatggccttgtaacaagcgatcattatgccgactattgcgaacagtatgaggtgccactgcaacgcgcgatcaatcaatccgggtatgatggtgttagcgaaatcaccaccgaaaacctgaaaacattcatcgtgtttgctaacaccttctggatgtatctaccggataatcctggtattcgtcaacctgcattctttacgctttgcaccttctgtgaaacgtatttgcctgattgtgaggatttcgaagaaatctatggctaaagtagagttgatgtatcttgataaaccaactggatctgttttcccttgtgggtttgctgatagtgcggaacaaatgatgtctatcgcgttttctcccagcatgaagccgatccctggtttagatgaaaatgtaatgaatgagtgtaaccagaacggaaaagtatggtatactcgacacgaagggaatgttgtttatcactccaccctcgaaaaccttaaatctgaaataggctatacaaaatgaatattgaacatgtatttgcacaggcattagaacagaaattaaacacagaactcgatctgtaccgttatgacatggaagaacagattcgcggcgatcacaaaaacagtctggaacatgaatccagtcgccgcgaagtgtggaaacataccttctttgaaaatctccaggctggtgtgacaaaagccagtgctcgcgctaacaacgcacttaaagcatttgataacgcttttgcaggtgaataaatggaactatcagcgggtattatctttgttaaagatggtgccgtgttgatgggccatgccactgaaacgccccattgggatattccgaaggggcatgttgaaaagggcgaaactcatattgacgcggcgatccgcgaatgcttcgaagaaacaggatttgaagtgttcgcggaggaattggttagtctgggtgttctcgattacacgaaaacaaaaaaccttgctttattcctctatgtagggcaagattacccagtagcggaagaatgctattgtgcatcaactttcgttaagaacggacggactatacgtgaaatggatgattttaaatatgtcccgatctcacagattccgtcacatgcacgtaaaacgatggggcaactactgcctaaaattttagcaagatgagaaatatatcatggaaaatcaactgactttaatcgatatctgcaaatcaattcgtgatgctgttttaaccaaagcatccgaagtcactgtttactcttcatggagtgctgaattcggctatgaagaaatcgtaaacttccccgaccgcctcaaaaataccaaatggttccgttatatcgatcctaatgatctttcccttgatgaactggaagaactcaatttcagtcgctgggatgaacatagcggcctacgcctgatccctttgtggttgttaccatacatcgatccggaagcaaaggtcatctgcattgatggtaacgaagttctgtttaaagatgcagataatgatcatcgtttcggtatgttggcctacggtgtgaaaccaaaggcataatatgagatacgtcgattttaatactctatctgaaatgggccttgtttggcgcattaaccgcgaaatcttacaccctctggggcttgcgctttcccgtgatgtagaaacaggttcatcacctggcgcgttaatagctgatgatggtgtatggcatttcgacgaactcacaaacgaaagaaacgcagagaagttttctaaagttttagatttacatcaaagcggaaatctgttagattatctacagaataacgcgaaataggggcttcggcccctttgaggatcatattatgaatggtaagcgggttattgttgttggcgaatcaaagcataacgaaaagggcgatcatctgatcattaacaacgatcggggtggatggtacggggcgacacaaataaaaagcggttacgcaacgctggttgaaaaagatgcggttagattggcaacggctaacgatcctgggtattatggtactcgcgaagagtttgaaagcgaaaaggatcaagagatcgcagaattgaaaacacaggttcataatgcgcgtgtttttgctgcaatctgtaccacttttgcatttatcaattcttttttattgctgtgggtgatacataatgtcggatgaaattgtaagaaaccgtattcgtgagttaaaaactttccaaagtcgcgatcatgcgatcatggttggtagttacattcactggttcaagaacaacgatctggatctgaatccgtcctatcagcggccctacgtatggaagcagaaagagcaagatgctttcatgaagactttgattactgggtttccttgcggcatcattgcgatcgcggttgatagcgaattcaacgaatctcgatgggtagaagtcatcgatggaaaacaacgcttgacaactatcatgaaattctggaacaatgaaataggaataccgatgcctgacggttcccgtttgttttggggtgaaatggaaagacatgaacaacgtgctttcgaaaacatttcattgccagcgcttggactcgatgagtgcaacataaaagatcggttgaatttctttttgaaagtgaactttgcaggggttccacaatcaccggaacatatgcaagcaattttaactatgtatgagaatgcaaaatgaattttacaacagcgccttttgaaactggtaaatggtacttcaaaaaacgtcagagtcgtatccatagctatacttgcaagaaagaccatctttactatccgcaagtaatgcaagctatgtgtgataccgaaggaaacattcactctgttattgttccttctaataattgtaaactgagtctggttcagcgcaaaattcctaaagaattctatgttctttatgaagagtttacccctactcacctggaagaatcgttatttttcaaacagggtaagcgttacaaggtttctaaccgtgggatcattgattgcctgactgaaatcgatttagggaagtatggtcataacacatcgttacgccgcttcctttcttatggtagcaaccgacaggaacagcagaacgttatctatatcaataaagttgatatgcatggtaacgcgatccacattctgggaaattcatgcaccagtgaagtacaaagttctttccggactaaaattcctggatggatgttgatgtttttggaagaagtaggtgaaaataaaccagtcgtggcaaaggatccggtcgaaacgatgatccagaatcatgaaacactggaagaaacaacccgccgtgaactcatccaggatgaagttgtggatcttccaaaggcagaaggaatcatggtaagtcatgaagatttagccctgcttgatgcggtcaagtttctcattgaacaaagttctgttgattatggttcccgtgctcgtattcaactgagtgccgaaggttacacgtatggtgtagattctcctgaattcctgatcaagtgggccgaaaagcgccgtagtgagttgatgaaatatagcgatgaactctttaataaaatcaatgagttgaaagcaaccatcgaaaaattaccaaaataattaaaaagcccttgcattcgtgcaggggctttgttatattacacacatcgaaacgaaacagagaaaggaaaacatcatgaacatgaacaaaaatattgccgctgtagttggttgtgaagtttctaacgcagaacgctatgacaacggtttctctttctgtgttccgactgaactcgatgcgtacaaagccgcttacaaataccgcactatgcataaggtaaacgttgcttacgcgcctaacatcgaaatgtggttggttcaggtttacaaagcatgaatttccacgaacgcaaggccgcacgaaccgattattacatacggttcgtgtatggctggaaattaaggaaatgtgttgcatgtaacggatcggggcggtatgatagcaaccgttcccccaaatgcagtagctgtaatgggactggtaaagaattttataaaagtgaggtttctaatgagcgtatcaaatgaactgactaactatttcaatattcgttatacctctggtattgatgactgggctagggatgacgaaatgaccattaatcatgcatgtgcagttcatatgaaacgcttgcacgagcaagggaaattgaaagaccttaacctttacggcgacatcggatccggttatcgctattcattctctatcaatgataaagagcgcatgaccgttactctcactaacttagttattcatgaacctggtaatgtcgttgcctgggggatccataacgggcgatatactgaaaatcacagcatgaaattagcgctgatgaatcataagttgtttggtggttgtgttcctgatatctttactaacgcacttctgcgtattttgaaatctatgtgaggcatacatgagtgatgaaattgtgtttgatgacgcaacattaaacaagttgcatagtgtcgccagcggaacctgtacagccatgagggagaaatgggcggctacaatcaccgatgataacaagatcggggttgttgatgaaatgggccgcacgtttacggttacgtataattcgtcttggtctgttgctgacaaccaaacaaaatccaattgcttgatgaaattcatcgacatgatggatccacacatgatcaaaaagctggttgaagagatccgccgccttaataaatttgaagcggaatcgaaccactggaaagcaaatcatgcttgtgaggttgaacgtgctcgcgtactcaaagagcgtcctgatatgcccttagagcgcatcaaagcatatgaccgtatggttgagttggaagaagaaaataaacgcttacgtgcgcgtatggaagttctcatgagcgcggaaatgatgcaaaataacctaaacatgatcagcgctatgttgcattctatccaaagcgatactaaccaaacaaaaaaattgttgtgtgaccgcttcaacgtacaaggatattattaatgtcatggttcaaaaaacgagagtgtaagcatgaagctactggctatcgaggtgcaaaaccttacatattccagaaatatagtcaggtagatgggatcgggcgcatccatttacatttatacgctcgatgtgacaaatgcggaaaggattttccttacgctatgatgcacctggatcgggcgcttaccgaattgtgccagtattctacgatacgttcggaaattcaaagggttatagataataccccgatcaaacgataatttttgcaaaaaccccttgccaatggtgaggggttttgttatattgcattcatcgaaacaaaacagaggaatcatgaaatgactattaaaacgagaagtgttgaggttcagaatttatatgcagttcgcacaatcctggctgttttgatgggcgtctctaccggaaaatcttcttatattgatagtttcatattttctctgtacaacccgcgttctcattgggatggtgatgttagttggactgagcatttttgtgaccagttgaatgagatcgcaaacgaaatcagaaacgggaaatactggaaaactgggatcttctttactctgattgcagcggaagatgttaagttttgggatgcgataggggttccgatgaaaacctggaaaaatatcgaactcgaagcaaaataaatgttgcattaaaatctgggtgtggtatattacacacatagaaacgaaacagacaaaaaggaaatcatcatgaaacttgttcgcgaatcaatcaaactgggtaacgaatacaacggtaaatggtacttcgtcatttacgacgacaacgccgaaaaactggaaaaagttgaagatgcattacgtgctatggaaactggtgcttctgttggtggtgaagtgatgacctgggaaaactactgcgacggttgcccttgctatagtgatggtttcggatctggtttctggattgatattgaagacgttccggcgttcaaagcctcctggaaaatcgctaagaaaatggcataattagcacaaattgctaaaactcgataaccctgatctgttattgtacacacatcgaaacgaaggaggaaatcatggaaatcatctacaaaagccggaactacaaaaaagaagatgttgctgcggtttacatcaagtaccggaacgtgaaatgtgagtacagcgggatctggggttacgaaatcgttgttgaagaagtcaacgccgacaacaaaaccatttgcagtttcacggtaaactcggatagttctctgttcactacagaacagcttgaaaaagcgtatgatctccggaaccaggcttttaacgcggtacgtataaaatgaacaaattcgaaccctatatgaaatggctacgtaatgttagcgcccacttagggcgcgatattaaacccagcgcactagctcgcgaactgtacgaacttgatgcggatccggaagatgctgcaaccgactacgggagattcctatgaacatgtacgaaatgcttaaatcagaaaacagcgaaacccagggcgaaaaagattacaacaaatggaaacgctctgttcaacatatgctgggttcttctgattatgacgaagatctgatgtatgctctttactcggacggttgcaccccagaagatgcagtgtgtgaatactacgcgcaaggggatgaagaatgagagatcaaccattcagtaaaaaatatcgtttgtgggctgaacatgttcgaagtttactatctcctttgaatatttcatacaacgaccatcactgtactttctttggatttttctctgacggtatgacgccagaagaagcaataaaattcttcatggagtacaaataactcttgcgctggatgtaggatgatgttatcttacatccataccgaaacgaaacggggataaaaaatggacatgttgacagtaacagaaatcaaagccaaaatgcatgatgccctgggcgcgaaaccttctaaagcggaagcgctggaatggtgggaaagattcttcgaccgtcacgctgctgtaatgtatacccgtgtttacatgagtattgacaaatacattgctaaaatgaagtgaggttgttatgttgacttttgaacagtacaaagaaaagcgtgatctgtaccaaaaatggatcgatgagatcggcgcagagttaagagcgtatcctaaaaatgaaatgggtatgactattgaatcgatccgtatgtctccggcatacaaagaaaagaaaaatcttttcaatcgtgtattttcaaatctccgtgccttgaacggcgaatacatcaaggtgtacaaaaaagaactggctgacgaacgcaaacaacggtgggtaaaatgatggaacacgtaatcaaaacagagattgacaaacgcgtatttttggaaaagaataaaacggtaacgctgttgaactactccactgaaaattgttctagtgaattttggcgcgttaacatcgatagcaaagggcaacatcaatcaataccgtttgataacgaaagtctcgctcgcgctgtcttccaatcccatgttagattttgagaattatattatgaataacgcacaaactgttctgaaagctcctaccctgttcatctatcaagatggtgatatccgttacgctcgctctaagtggtataactacaatttcaacgttaaaactggtgagtttgctcgctggggaacatcgtttgaaactgatcctacctatgccccattccccgaaattctcgatatcgagatcacaactaaatgcaatggccccgctggtaaactttgcggtttctgctacaagtctaataaccctaacggcttcaatatggatcttgatacattcaaatctatcattgataaaatgccctggttaacacaatgcgccctcggtgctgatgcacagggacaaacaaaccctgatatgtttgatatgatggcctatgcgcgttctaaaggcattgtaccaaaccttaccattgctgatgtatcaaaagacgttgcagcgcgtttagcggctgttgctggggctgttgcggtatcagtatataaacatgctggattcgatgtcgcatttaattcagtggctaacctggcggaagccggacaacagcaaatcaatcttcatttcatggttagctctaaaacctatgatgatgcgtttaacgtggttgatgctgtgaagaatgatccgcgcttgaaacaagttaacgcgatcgtattcctgggtctaaaacaaaaaggccgtgggaagaactgggataccgttacacgcgagcagtataaagcgctggtagagtattgccttgaatctggtgtagggttcggttttgattcctgttccgctccggcctttgtagaggctatggaagggcatgaaaattttgaacagtacaaacagtatgcggaagattgcgaagctactatgtttagctcgtacatcaacgagaagggtgaattcttcccttgttcctttaccgaacgttgggtcgagggtggatggtcagaagggcttaacgtcctggaagccagtgactttatcaaagatatctgggaacatccgaaaactaagaaattccgtcaggaattggttggtaacaaggatcataacggttgccgtaactgtccggcttatgctgtatgtggtaaagatatgcgcgtacacaaagcccctgaattggatgtgtacgcggtggaattgaaatgaaatttaatcctttaatgattgacattcccgaaaaacagcgtacactggaatcgttgatcgagaagtatgaatattctctggctactccggcaacagcagaaatggcaatggcggaaaggcaaagcattatctatgaatgtgatgctaagggtttccatactgatgaagatatggcaatgattgattatctatggaaagttcgcggcgcggtagtcgatttgattctttcaaaccaactgatgcaaaacgaaacacgccgcatacaagaccgtatacgctctcagttgtatggcatgagcacagaacaaaaggaaagaatgtatgaaatgcacagccgccgttgatgaattgatgagtcgctactacaaacgcaaagaagattctcgtatcaaagaatcaaagtcaatagaaattattgaacgatatgctatgaagttaagagagcaagaattcacgccaaaggcgatcaatagtctgatgatcctaaaacttttgattgcttccggtgatgatatgccgtatgatgtagatagtgcagagggattccaaaaggcgtatcgttcatggggagtgatttactcccgctcacttggttcttatgactctgttatgtggaacctgatgcaccttgataagctgatctgggaagtgcttgaagaagagggatttgtatgatttttacacataccggaatggttgaaacgataacagcaggtaagaagcgtatacccttgatgaaatcggggaaatactggaagagtgaagaacataagtttgatcataatggtaactcatttggttcttcttatgctaaactatacctgaaaaccattaaaccaatttaaaggaactgatctcatgtttgaacaatcttttgatgaaatgaaagcctctgtttttgttggaaataccgaagctggaatggcgtttagatatgggatcgcaacaataaatccaggttacaatgaaatcacaagcaacgatgcattagaacttattcgtaaaatggatcgtttgcaagtaaacgtacctaagcgcctccataaaaagtggcaagcgttgaggggttcttttgttatggcattcgggcctgatatgctggaaagactttaaaaggaaactatatgttaactaatgaacttagcggggctattcgtaccattgaagggatccttcatgatttgcgtatgggtaacgaaatttgtgtaagcgacattgaagcaaatctggttgagtggcgcggtgctctgtatggggcaacacaaggaaaagatccgttgtttacggaatatgatatgtatacagtaaccattgataataaaacttatcgttttcagtggcctgatgatgcatacgatcatatcaaaacattttacagtactggaggtgctctttttgctaccagtattggtgttaacgaattgccttttcatcctgatggattgcgaccttccgatcatttagggtgtacaactgtgttactgggtatgtgcggtaactattctgatcccgtgtactggattgaagccagtaaaaccaacttaaaaagagtttaacatgaaatatattattgctttggtgttagtcgttattgtcgttttagcacaagctggatgcaccgatgagaaagaagctgaacgtattctgactgctaacgggtttaccgatatcacgtacacaggccacgcctggttcgcatgtgatgagaaagacacctacgcaacagggttcgttgctaaaagccctacaggggtgaaaattgaaggtgcggtgtgctctggattatttttcaaaaatagtacaattcgcttcaaataagtgttgacgtagatacggggttatgagactatagccctgtcgaaacgaaacacactttaggagagaaaaatggacatcatgaacgaaatcttagctcacatcgaagccaacaaagaagcaatgaaagctaaagaaggttgggttgttgttgacgattgcttcaatcctaatatctggactccggttttcatcgatgagaacggtaacgaagcccacgggttctatgatgccgcaatcttcgatactgccgaagaagcatgtgatttctgggcctacgttagcggtgatgctccatttacaaaatacggtgtgtgccgttgctgtgaactctaattaactagccccgaaaggggcttttttgtaggtaaaattatgattacgaaagcacaaaggatcattaatcatttagaaacagggttcccgtaccagggagatttaacccgcgatattattgatatcctttctgaacacgacggcatgaaggccgaaatcgaagaactgttacatcctgatgctaacgtgtttgcttcattgatgagcgatgtagtgaacattgacgccgatgaacttggatgcattgaaacaacaaatgatggtgataaaaccatactgaaacaggcttgtgaacggatcgacaaccttcacgatcgtttattcactctaacttttccgtcaaaaaacgataaaccttgttgacatccagaaaataaactagtagtctgtagttacaccaattgagaggaatatattatgaaaagtgcttttgaaaaacgtgctgttaagaaagatgttaaaccaggtgcgatcatgtatgaagtattctgcgtggacggcgaaaaggcggaaatgggtagaaagatgattgttactggcttcccttatatgaatcgcggtatagggctgtttgcaaaatgcatcaccctgtttgatgactgggactgtcacacacaattctctcttgacgaccgtagtatgaatgggcgcaacggatataacttccatgctttcttcctgaccaaagaggatgcacaggcttacattgatgaagtcaatgaagaccgtcttcctcctgatatgaaagagcgaaaagaagaacagatgaaacgtaaacgtgaatttgaagaatgcttcggtgatctttacgattattaattatcgaacctcttaaaccataaataccctgtgtacccaaacagggtatttttacaagaggtgatttatgtttaaattcagtcaaaaaagccttaacaaccttaaaggtgttaaacctcaactggtgaaagttgtagaacgtgctctgcaactgtctcctgttgattttggtgtacgtgaaggtctgcgtactgtggaacaacagcgcgagaacgtccgtaagggtgtatctcaaacaatgaactcaaaacacatcacgggtgatgctgtggatctgtatcctagcgtgttgcctcaaggctggcaaacaaaccctaaagtgtggttgcctgtcctgaatgctgttaaacaagcaggtgatgaactgggtgttaaactgcgttttggtatcaactggaaaaatgatccgaaccttccgatcgaaacaaaattcattgatgccccgcatgtggaattagcgtaacaaaggggctttggccccttaaaggtaaaacatgaatagtgaattttatgtaaagacaattgaagaatgtcgtaagatgcatcttatgcgagagttggaagaaccaacgcataattacggccctaacgattttatggtattcgaaaccaggctggatctgggcagagaaacgcaaaagactaaaggcgcgtttgattttatgaaacgttcccatagttcccttaacatttacgtagcgcatacgttaaatgcagcacaagacgccaaacagctaaatggtgctaccggatgtgatgtattgaccagtaaaggggcaattcttaatcatttccgtggacgtcgaatagagcaccaggcaataaaccttatttttgatgagtgtgatcttacgcgcaatgaacgcatggacattgtgtataatacactcatgcattgtgtacaaaagaaacatccattagcatatattcacgtaatttcgctgggtatgtaatgaaaagtcatggctattcatcaagaaccatacatgaagagattcaagggatcgaatctcttctgaattttgtagatgttgatacatctacaggtaaagtgtattggaaagttcagcgcggccctatgtctcctggaagtgaagccggaagcaaaaacgagtattcccaaattcattttaaaggttctatgtatttgcgacaccgaatagtgttttacgttgagaatggttatcttcctcctatcgtagatcatgtatatggtgttgagaatggagatacagcaagaaatttacagaaagcgacgaaccagcaaaatgcgatgaaaaagaaatgtaactcaaacagtagtacagggttgaaaggtgtttcttatcataaagccaatgggaagtacaaagcgcagataaacatagatggaaaaagaaaatttttggggtactataacactccagaagaagcaaaatccgtttataaccggaaagcaaaagaggttttcggtgcattttttaacgaaaccacataaggttaatgtatgtcaaaatacgtattagacaccaatgttttgattagtaacccctattcaatctattcattcactcaacctggtacagaaatcattattacctctgctactatgggtgaattagatcacctgaaaacgaaagaacgaacagcgcacgaagcacgattggcgatccggcttctgtcaaaagttattttcggtcagtcatatgatgcgattacgaaatcaggtattcctttaaacctgacaaacccagcactgtctgacactatcacccttaaagtggttgattatgtcggaaacaaaacgtttgctcttgacaagcaagacgaacgaatcattgaaacttgtatgcaacaggatgcaaccttagttactcgcgatattatgatgttgctgatcgcaatgtcccgtgggtgtaaggtagaacagtatactggcgacgatacgttaaaagatagcgatgtattgtattccggttacgtagagatccctgatttctgggataccgtagaagtgttgggatatacagataatgtagcccaaatcacttacagttcgcttcctgacgaagatttttatcctaaccagtacattacctcgaatggtgagttagtcgggcgtgtggtgactgctgatgagatttgcttgaatgtcttacctgttaagcacgaacaggctatgaaacgcaaactcatgaaagctattcagccccgtgattctctgcaagcggcttttgtcgaatccattatgagcaatgaaatcgatgttgctaccattatgggcggcgctggttctggtaaaacaatgcttgctgtttccggtgctatgcacctggttaatagtggacattacgctaacttgatgtatgtgaagtcagatagcccgttatcaagtgaaatcggcttccttcctggtacattgggcgaaaaactccggccttctatcgaaccttgtattactagcctgaacattctgtttaaggataatccggaatctgaaaaatacattgaaggtttgattgaaaaaggggtggtgcaattccctagcctgtattacttccgtggtcgcagtatcggacatccggatccgggcaaaggttctgtgctgattgttgatgaatgtcaaaaccttagcaaccacgaaattaaatctatcatttctcgttgcggagagaacacacttctgatactatgcgggaacattaagcagatcgacaaccctcgaaacactgccgttaacaacgggtttgtatgggctgttgaaaagctgaaagaatacgaacactcaagccatatcattcttgatacagtgtatcgttcccgtctcgcggcgtttgtcgaagacaatttctaatgatgggggcgaaagccccctttttgtgaggtgtatatgattactgtcatccatagccaaaaactaattactgtttgtagttgctgtaaaagtgggttagaatatgaactatctgatatacagcaaaagagagaatcgatttacaatggatttttctctgctgctgattatgtcgtgaaaaaatttatcacatgtcccaaatgtggtaactctgtgaaattatttttgaattgaggtttccataaatgaaactagaaaaacgttattatgtagcaaaattgagcgatcttaaagaactgacgccagaagatttgaaaacgttcaacgaaatttgcacgaaaatcgaaatcgggcgcgggattaatggtaagaaaccatttgatgcgatcgtgatcgagaatgattggcccgaatacgataaagtgttggaaatgctgacttctcgtattgttcgcgaagatacgcaaaataaatttgaaaagatgctggacaacaaagaacgtctcggatactttttcgtcattcaaactcaccagggaaaatttctgatcaccagtgatgcgcacagcacgaatcgtctgacgaaatacagtgggtacaaataccgcgcgttgttcagccccgattgtggatttgacaacagagaaatctttactactagctggagtgtctactttaaacatgccgttatggtatcattagatgaaattgttgcactatacgatcctaacaaggctatttcaaattataacattgctgagtttatcaacgataagctacgcgacgcgaaaactatctaaaatagttgcataaatataaagtggggtgtattatggcccctcttttgcaacataggtattaaaatgaagaaaattattattgctgccagcattttcttgtgctctttttctggcaacgctgcgacggatccgctaggggatttcattgcggatttgcctactcatcaattgcctttacaaaaggctactgtaaagcctccggcaaacaaaaattctccatcctacatcaaggatttggataatatcacaccgaagcagaaagaggttttggagtatgcttatcgagttggacacaactatgatttgaagactgcaaaacctgtagaaaaagataaggctaaacgtttaggctatcatttagcggctattgcctggatcgagtctcgcgcatgtgagaatgtcggtaaaggtaaaaaaggccatcacgcttatggatgctggcaagttaccgcaaggagcgccagcgcacgaatggataagtcatatcctaaacgcgtagtaatcaaaaagctcgaaactcttcaaggtggatcgaagtatgcgatctatgaactggagtactggcttgattaccacaaaggcgacttgaaaaaggcgcttgcgagctataacgctggtttcaagtatacaaagaaagaagcccgtgattatgctcgtatggttaatacaaccgcgaagctgttagaagaaaaacaaatcatttgacaaaaagcccttgacttcggtcgggggcttttttattatgagtgcatctaattgagaggaatacattatgagcgtttcacatcaagtcattgtttcacaaaaatatgattaccctaacctgttgcgttgtgtgcaagcaatccgcgatcattttagcaaacaagacaacatcgttatcaaagagattactttgagtaaatctctcgattgttttaacatttatttcacatatgataacgaacagcgccgcctgttcatttgtgaactcatggatatgtattatgatatggaatacaatcctattcctaaaaatgggatgtattttagtatcaatgtctggggaggatcacagaaaatcatggatcttgtgaaagaaaccgtgtacactgtcattacaagttcggatactgtgtatgagcgcccgaacgatgcttatgaatcacgattcactttggttaaatgaggaatacattatgagcgacctgatcctgaacgaaactaaacgcgtactgtttaaagctggttcctacatcgtagcgactccgaaaggcaatacttcccattgggcggttgctgattggatcatgtacattgataaaaacggggaatgggtacaatgagaaacttagcgttcgaagtgaccgtgattgatcaacggatcaaagaacttcatgcacagatagccccgctgcaagaagaaatttctaccttgatcaaggagaaaagagacctgattgaacttatcgatcaggatatcattaacaacgtcaaggatggggaaaagatccccgtgatgttggaatatcgttcttccagtgtgtcttatcacgcggcaacacaatttttcgaatctatcggtctgggtatcgatggtatggatccggacattaaccaatactgtttgcggatcgcgatggatgaagacggttcaaacatcaatcgagttttaaccgctttagaaatggtagaaccttttgttagaccgcaagcaaacgggcgtaagcgtttcgatctgttcgaacatactctgtctgaatgggattgttactggctgacatacaatccagctaacaaacgttgggctgttgaaactggtagtgggatgagacgaaaccaggatccgacattctcggatatgtctctgaaaaaagttcttgcgtatatctgcaatgcgcattattatacccctatcgaagaggatgaataaggaatcatcatgaaaaagttagcactgcttttaactctggttgctggattcgctcacgcgggtgatgctcgcctggatgagttatgcaacaatcgtgatatcaaagatgtcgcagtatgtaagcaagttatcgcagaacagttagatgttgcttatatgtggggagaggaaaatgctcacctgtataaacgcggtaagttgctgaaacaaaaagagtttttgcagtctgaaccaatgatgaatctatgcaaacaagcgccaaataaggaacggtgcgaaaagttccgtacttatttggttgacgaattcaatgctggtataggactttactaatggctatctggatttttattattatggcggcggttgtggtgttcttggcgtacaatgctggtaagcatgagagcactgggccttgttactattgcggggatgatgactatgtgtaatttcatctgggttgttattggccttgtggtctttactggtgtaatgtatatgtgtcatcaagaagacctccgccgtgaacggaaagcgagaaaatgagcgtagggattcaattcactgtattgtggatccttgtgattttgatgggccttgttgtggccctactatatcggaaaaataaaaatgatcattaaagaagtgaaaggtaatgctgtcaatatgtatctgaacggtgaaggccacctgatccacggatgcaactgttattgcaatatgggcgctggcattgctcgcgagatccgcgatcgtattccgggtgcatttcaagttgatgccaatacgttaaaaggttcccgtgataagctcggaacttgttctgtttacattggcgaaaaaggcaacattgttttcaatgcatatactcaatatgatttctggacacctgggccgcgtgtcgattatgacgcaatcggcaatgcttttaaacaggctgtagggcttgctgacgccgttaagactggaaagcctatcatcacacctttaatcggtgctggcctcgctgggggcgactgggaactcattaagcgcattattaatgaggtgactggtgattacccgatcattgtcgtgcatttcgatcctcgtaaggcgaattaatcatgatggatcctatcaaagcaggtcgggagattaagaaagcgaacaaacggatcgccgtaatcaaaggacaacgcgccgcactggttaaaacctgtaatgcattggcgcaagcgatgaaagcgaataacatcaacattatgcagcgtaaagaaactgttaatgttctatgtatcgttgacaattgtctgagtaaggaaatggacgaactgaaaagtaaaatcaatatgtggtatcttgatatacatcaagcacaagataacgaaatgagcggttataatcatgactgacaaaatcaaagctaaagcaatgaaggtgattgcgacatacggaacactccgttggtgtaacgcgcaggtgtgcgggtgtatgggttgcgcaaatcataccatgacaaaagaagagtatgacactgcgatccagatgccagaaatcaaagagtatcttgcgcgacataatgaaaaactcatgggtacaggatggttttcaattggctaacgcacacattatagaaaaagttcgttgtcgggattgtcatttccctttaatttgcgtaatgaacattaccaaacccccttatgatgagtgggattggtggatctactgttcaaacaaaacatgcaaaaaccatgaaggggaaggaaaattccagaataccccagattttgttgagaggataaatggctaaactgtattttcattatgcatcaatgaatgctggcaagagtgctcgtttactcactgatgcatacaactaccaggaacgcggtatgcggatcctgatgtacaaaccagcaattgatacgcgagaaggtaaacagagtatctcttcgcgtattgggttggaagcaacatgcaccatgatcacgcctgatatggacttgtattatgacgttcacaacaatcatttttatagcgacagcccgaatctggtttcttgcgtgtttgtggatgaagcgcaattcctttccaggaaaaatgtcatggatctgtgtcgggttgttgacgaattagatatacccgtaatgacatatggactaagaaccgattttcagttgaacttgttcgaaggttcttatatgttgctggcgctggctgatgagatcagggagttgcgaggggtttgtcattgtggaaagaaagcaactaccgttgcccgtattgatgcaaatggcaaatttgttgctaatggcgaccagattgagatcggggcagaagacaaatatgtttcactttgtcgaaaacactacttgcaactaaagaacaaccctgatacagtggaagcataaacaaaaggagatcattatgagtcgcacttaccgtaagaaatacaatcctcttcgtgaccgttcatctaacgaaaagatcgaagaagtaaaagagtattctcgttattatgctcaacatggtattgatccggatgggttacgttggtactcaaccaactggaaacacaaatcaggatgtgcatacattcgatttgataataatttgtgtcgcgacggtaacaaagctcatggcgatctgaacgcaatgctttctattgcagtaaagaaaattgattcaaaagtacgtacccgtttacgtcaggaactgaaacgtatgaaagctggtgtgatcggttgggatgaaaacgtagaaaacgcgaacaaaatacgcgctttcgaaagaagtttgtgttggtatgacattacttgattgactttacagcaaaaatattataacgaggcttcggcctcgtttttgctataaatatatacaggagtagacctatagtgggtctatgagtaaaagagtaattgttatgaacattaaacgcatatcaatggctgtgctgttcggattgttgatgatgacacccacaacacacgccgccgaccgtccggttcagaaagaatttgacgattatatcaatgcggcccttcaagtatacatcacaacgatccctcccagcgtaaatacaagcgaactattctacaactacatggaacgaaaatggcaccaaaaacaatgccgatctgaatccgaatgcgcaaagctagggattagggtcgcgtatgagtttgcaagtatccatcgttcataaagggatcatcatgcaatcatttaaacaaattacagaatctgagaactcaagcaagatagatgcctttattggcatgtgccttatgtccgttacctatatgcatagcgcacattttgcaacaggttcatactcacaacataaagcatatgagggtttttacgaagatatgcaggatttggttgataaattcaccgaaatccacataggaatcacgggaagatacaaacctgtgctaaaaaccgaaaatgtgcttgacacggtggcgtatctccgtaaaatagccaacgaagcaaacgagatctacgaatcagtagatagttctttgaagaacatcctggacgagattaagggcttgtgctatcaaacaatctacaagctgacaaaactttcttaaaaatagtttgacagcgtgaaatgtgatgatagaataactatcgaattgaacaacaacttatggaaattatgatgaacttaaacactatcgtgaacaacccgaagaaaacctctctgatcgctctgggcgtagtcgcagcactgtggttagtgcctaacatgtataccattgtgcaagacggtacggttaaaactgaaaccttcatgggtaaagtatcaccgaaacccgtactgcctggtttccacattgtaaacccgctggcgacgtttgacacgttcagcaccaaagacatcgcgatgaagttcgacaaattacaggttccgtcccaggataaatttaaatccactgtggatatgaccgtaatgctgcaattcgacggtagcaaagcaccgatcaaccgtatcaacgcgggtaatcaggatcaggcactggataagtatgtaaccgaaaaactgctttccactgttcgcgaatttggtaaatccgtaccaaaagcgcaagacctgtttgatgcgaagatccaaaaccaactgcaaattgcgattcagcaggaagtagaagattatgcacggccttacggttacactgtgaaacaggtattcttgcaggatatcaccctgccggaagttatcatggaacaggtaactaacacgaagatccgcgaagaacaggttaacgctgctaaagctgaactacaaaaagtagaacagacttcattacaagcagtaaaacaagcggaagccgatcgccaggcgcgtgaaaacgctgcaatcgctaacgaacgtgatgctgatgcccgtctgtatgcagcgaagaaagaagcagaagccaacgccgccctgcaacgcaccattacgccggaaatgatccgctggaaagaactggatgtacagatgaactactctacccgctataaaggtggcgtacctcaaactgtaatgggttcggattatgctggtaaagtgattttcgattctcgtaaataatgttttaaagccccctctttgggggcttgacatctaaaacgagaatactataatgaacataaaacagatcgtattgacaatactcatttcactattctttggttttattggtggattgtttggtgttttaataattgcgtctgttttatgattaacctttaaacgtggagcacgttatgaaacacaaatatgataaagctgtagtaattggacgttttcaaccttttcactatggtcatgagaaaatggtaagggaagcccttgctgttgctgatacggtttacattctgatcggttctgcttatgcatatccgaacacattaaacccattgaccgctaaacagcgtcaagcaatgatcactcgctggtctatctgcaaacttgatgttgaagatgcagccagaatcaaattcgcgcacattcctgattacctctataacgaggaaaaatggaaatcccgtgttcgtatggcaatcgatgaaactcgaaatgatcgaattgcgatcgttgggtacgaaaaagacaaagattcttactggcttaaagcattcggatggaatcatattccggttgaacctgtgaaggttggagatcaggatctatcctcgaccaatttacgcaaaattatctgggaacaccatgaaggctgggacgaagatttgttaaaatatgcgcctagcactacggtttcctttatcgatgaatggacacaaacaaaagaattccagcgtttgtcccatgaagatgcacactggcaacgagagattgacaagttcaaaaaatatccgtatccggattctctgaactgttgcacggctgattcagtggtcgtatgtaataaccacgtgttggtaatccgtcgtaagtttgcgcctggtaaagatgcgttagcgcttccgggtggacacaaaaacggtaacgaaacgttccttgattgtgcgattcgtgaattgctggaagaagtacgaattaaagtacctgaaaaggttattcgtggttctatccgtaattcgatgctgttcgatcatccgaaacgttcggtgtacttctcaaaacccactgtagcacagtatatcaagctcgaacctaataacgatggttcattgcctcgtattatgggcggctctgatgatgcagcagacgcgttctggctacctatgcatgaagtgatcgcgatgcgtgatcaattcttcgatgaccattatcaaatcatcgttgcatttaccggaatttaaaacaaagcccttgacttcggtcaggggcttttgttatattgggcctacagaaacaaagaggcttattatgaaacatccctattgtcttgttacccgtccggtttgttcaggtggtttgcctgttacctgctggcagttgattgaaaagggtgatgcgtttttaaacaaacgcggtgagaatgttttcgtttacggtgttaactcaatcgataatgaaactatggttatcaccgatgagaaaacaaatgaaaaatatacgttgacatccgaacacgattgtcgtaattttaacgtatattggaaatctgatgaagaatttgaaactgtgaggaaatgattatgatccctgttattagtgctcgtgaacaagtagcaaaaccccgtgctgttaaagttggtgattttctggacgtgagttttacctgtggagaaactcagaagcaacacaaagaatctttcagcgtgatccttgtatctaaagattctgatggttcaatggtttacattctgcataaagtaggaaccgcccgtgttcagggtcatgtaatgattatctcagtatatcctggcggagataaagtatcttctcagtgtttagataaagtgactgctcgatatttgagagatagtgttttaatggcggagattagtaaaatttatgttaattctcgttctgctgttgatggtattgttacccatgtaggcgatgaattaatgtttaccgaaaaatctcatgaatcggttagacgtgctgttaaagttggtgataaactcggaagccctcgccgtgattatgtggttgaatacattacctcttctggtgacatcatcgtgaaagctgacaaaggttctaccgttgtcatttcccgacgcgataaaaagctgattgaatcactcaatcaggatctggaatggatcgatgaatcagaggtgtacgctgcatgaaacctcgcttgattatgtcggatatagtgattgtcaacaacgaagaatattatgttgcagacattaacacgaagggaacccgcgagattttggatctggagtgtgttaggggtggcgaaaaccgattcgttgtgataacatacaacagaagcagtaaagaaacgttgggtgtgcctgttcccgttcactactgtgaaaaaactaattgctggagacgtaaatgattgatttaagtgatgtgaaagttggtgatacgttgtatgatgctgggatccgtagtgaccagcgacaaaatcgcaaccccaaaaccctttacgtacaaaaagttgcgcgtcagtacctgtatgcatctttccgaccggaagatgggtctgattgttgtactaatattaaaatcaagcgcaattccggatgggctgaggggtggatggggtatcaactgtatcgtagcgaagaagaatataaagaaatggtgtaccgccgcgatttgtgtgataagattaaaaaagtatttgggaacagctacggaacaaacatccctgatattactaccgctgaattgcgcgggattgcaaaaacattaaaggttgaattctgatgaaaatgattatggaaaccgtatttggttctcacctgtacggactggaaacaccaacaagcgataaagactacaaagggatctatctccctcatcctcgcgaaatcctgttaggtactgcgaagaagtctattgatacatcaactggcgataaaaactcaaagaacggtgttaatgacgtagaccgtcagatttacagtctgcaaaagtttatcagcctcgcatgtgatggtgacaccgtggcgattgatatgcttcatgcagatgatagcaaactgatcgctaactctgatatctggcaatatctccgcgctaaccgttcacgcttctacactacggaactaactggtctgtttggttatgttcgtaagcaagcggcgaagtatggcgttaaaggttctcgcctggctgcactgcgtgaagttgttgatgtgttacagatgattcctgattactggtatggcacatcattgctgggtaacgtagatgaatctaactacggcaagcgcatcaaagttggtgagatttctaaccgattcccgaccaacgagttttgtcgattcgttacagacaaaacactgaaatcaggttgtcaggatttttacgaagttctggggcgtaaattccagtctacaatcaccgtagcagaaatgaagaaatccgtgtataaactctgggatgaatacggggaacgcgcacggcaagcagaagccaacaacgggatcgactggaaagctctttctcatgcattgcgcggtggtatgcagttaatccagattttcaaagaaggtgatattgtgtatcctcttccggatagcgcatttttgaaaatggttaaagctggcggtgttcctttcgcaaccgtacaagaggcgctagaatcaacgatgtgtgaagttgaaaagctggcggctgtatctggttatccgaaagaagttgatcgagatttctggaatgatttcattgaacgtgtgtattctgaacatgttgtgaggtactacaaatgacatacccgaaattatccggcgctgaaattgatgttctgtgtaaactttacggatactcatcaaaaatgttagatttggatttcaacgatgtacccagtaaatcagggcgtgatgccctgattcaaaaaggttatgcatctatggcgtttagttcaccaacgaaaaatactgatatgtgtttagtgatcacccctttgggcgttgacgcttataaacacggaattgaaacggagtggcgctaatgactgatgttattttgaacgttaaagatattgtactgggcgataaagtcaaaaacccagacgcggttacactggaacaggctgttgttaatattatgcgcgatagcctccgcctggaagttaacgagattacagaaacttgttatacaggtggactttgtggtcaatctctttatcgtgatgcaaaaagcgtgaatattcagctatgggctgatattggcgaagaatcatacaaaatcgatgaggttgatttcgacgtatgaaaataattgacctttgcgctggtgttggtggcgtgaggctcggtttcgataaggcattcggcggggtcgaatgccttttaacgtctgaaatcgataaacatgcacaacaaacatatgctgataactggggtgatgaaaatattcagggtgatatattcgccattgatgaaaacgacgtacctgatcacgatatcctgttggcggggtttccttgtcaggcgttcagtaaagcagggttaaaacagggcatgttagatcctcgcggtactatcatctttgaaatactccgcattatacgggctaaaaagccctctgtgctgttctttgagaatgttccccagctattaacacatgacaagggaaacacgtttaaaaccatctacaggctgttacaggacgaagggtacgatatccattatcaggtaatgaatacaaaagattttggattgcctcaacgaagagagcgtgtgtttattgtctgctttcgcgatccggtattctttagttttcctgttcctccacgtaccccaacaagggtcggtgacattctcgaaccggataatgatcaatataccatatcagatcgtgcctggaagggctttagagagcgtaaagaacgaaacaaggcaaacggcaaggggtttggctatcaggccgttacagttgattctgtgtgtactgggacgataacagcccaatactataaggatggtgttcaatgtctggtattgcaggaaggtaagaaccctcgaatgttatcacctcgcgagtgtttccggttgcaaggatttccggattcattcaagatgcataagagcaaaacacaggcgtacaaacaagcgggtaactctgtatctgttccggtgatcgaagcaattgcaaaacaaatcaaaaaagcgcttgcataggataacaaagaatagtatagtgaccttgttgaaacgaaactgacaaaaggaacataccatgacttttaatgacctgtttaacggatgtactggtgctggcgcgaaattcaatcttctgaaagattacccgctgggttctaatcctggttatgtgatggttgaagttcgcaacggtgaatactataacgtgttcatgtgggatcgctctttctcttactgctggttcggtgcgaaatataaaccagattacattctggagcaaatcgaaacagtgaaagctaaaaatcctgaactgtatgcattcgcagagtctattcgtggtgtgttcgggcattaattaaacaagccccgaaaggggctttttcgtgaggtttatatgattaccgaagttattgaaatggttttatacgcgttaacttttgtcctcttgtttcttagtgcggagtggactagtcgcggaaatgtagtaatggcccgtatttgtgcggttgctgtgttctggatcctgggtttactgctggttagcatcgttagggggtggtgatgatttacgtagcttcttatagtgctgattatgaattcactgaaattgcccatgtttctgaatcattgcaaaactgcgttgatgcgctgaacaaagttcctaatttcccttatcttggtgatcatgttactattgatgtatgggaaaatgaaaaaatcattgcaaaaagttcaacattcgggcatcgcgatgtatgggatgatgaatcactacagtacaacgaaatccccgtaacttttgaagaggttatgaaaaacatgaaggaagtgaaagatgaacatctatagcattgagttgatttttgatgaccgttttgagcaaacgtctgattgtgtatgttctactgttgacctgaacgtcgcgatcaaatacattaaacatacaccgcttccgtcgttgcattactattgtgtaactgtgtttgacgggtttaccggaaagcaaacgcatcgttgtactgttgggtatgacgaaagaaaacatttcaccgcttttgaatttgaggaaatcaaatgaaaatccgttctggttttgtgagcaatagttcatcaagtagctttattgtacggttcccgaaggatccgactgatatcaacaatctccgcgaaatgatgggtgattgtgttcctaactgtggttatagctggatgacttgcccgacagcggaagaagttgtacagcaagtacaccgcgacctgggtggtcatatgggtgatggtttcgaatcatactatgatgataagcgttatgaatgggaaaccgaagatagcgcagaaactcgatatcggtctaatcctcaaattgcgcttgcttatgatgggcgtgactggtatgatctggaaacagaagagaaagacgctctgatcaagatgtggttgtatgaagagtacaacgctaaatttggcaatcagaacggtgtattcatttatgaatttacttactctgatgaatgcggagaattccaatcacagcttgaacacgggcaaattttccgtaatctggaacacactatgaagagtcatcactgatggaatacgaaatctgtgtaaaaatgcccccctatcaactgggggaagaaataacgtttagtcaaactctaccagtaccgattgatttattttctttgcgaaaatatcttgaacggttcgatctgaatgagtatactattcaaatcgtaaggattaaaaatcctgttgcctacgctctgtcttttgacgttggcgagtctcaaacaacaacgatggatgattttgtttcattgttgagtagtaagtttggatgcgatgatgcattagatactattagcaaaaaagtaaacgaaattttaataaaatttacctataaatgagaaaattatgatcactaacattgaattcaaaaacgccgtagccaaaccaaccccgactaaccacgtttttgtttgtgacgtatccggatcgatgtataacgaactcccgcgcattcgtcagcacctgaaaaacaacctggcaacgctggttaagcaggatgataccgtatctattctgtatttctccagccgtggtcagttcggttctgtattcgtgggcgaaaaggttagctctgtatccgacctgagcaaaatcaatgatgctatcgatcgttatctgcgtccgaccggatgtactggcttcgttgaacctctgcaactggcggttgaagtcgctaccgatctgcaagcggataatggcaatctgaacagtctgatcttcctgactgatggttatgataactgctggcgtactgatgacatcctgaaagcgtgttctactctgccgttgacgtttaacaacattgctttcctggaatatggttattatgtaaaccgtcctctgctggaaaaaatggcggaagcaaccaacgcattacacaaattcgttgaagggtttgatgcgtatgtacctgcatttgatgaaatcattaccgcgcaaacctccgcacgtgttgaagtcaaagttggcgatgcaactcatgcgatctacctggatgaaggccgtgtgtatgtcctgaatgctgcaaatggtgttgttctggttccggaacatatcaaaaacatttgggcgctgggtgaaaacgcgatcaatgacgttgacggcttcgatccggcaacagcagaaggtgaacaggttctgtatgtggttctgtatcatgcgcttcataccatgaatccagatctggcatggaaagttctgaaaaagctgggtgatgtgcgtctgattaaagcatacgataactgctttaccaaacaggattattccaacgctaaagatatgatctccgaagcggttgttgatccggctaaacgtctgatggatggtgttgattacaacatggttcctgatgaaaacgcgtttactctggttgatgctctcgaactgctggcagaaaccgacacagtgatcgacctgtcttctgaacactgggcgtacaatcgtacaggccgtcagactgtccagaaagatgatgatacactggataaactgtcagaacagattgcaaacgcttctactccggaagaacgtaaagcactggcggcgcaactggtagcgcatgaagtatggaaaccggaatttacccaaaccacaacgaaagttgcagtgaaacacctggttggtaacagttcccgtccgaacatttctatcaatacggatctacaaggttacgtaaccattccggaaagcaaacaaaaagagtttggattgccggaaaaagtagaaaccaaacaagtgcgtaactttaccattgttaaagatggtatcgttaacgttaaggtacttccgctggaaaccgatatcccgactctgaaaaacttacgtgcttctggtctgactatcaaaccgctggctaaaattggtgaagaccgtatgtctgtactggttgactttacctctctgcctctggttaaccgttcgatgactcgcggtatttctggtaaggaatttgttgctgataacgtccgtctggaaatcctgaaaggccgtcagaaggtaatgaagttcttccgtgataacgcgattggtttacgcaatgcagaagggcttaaacagcgctttggtgaggcggctggtgaatggttgtctgagcaagggatccgtgattacggcttttctccgaaggttgagcgcacagaatcgactgatgtttacatgtcgaaagaactgaacgtgaaaatcaaaggcgtttcatcacttccggctgttgctgctaccgttgcaaaacgcgccgaaggtaagaagaaactcaacaatggcgacctgatcattctgtgggcttatgatactgtatctaaagagatcgaagcgcttgacaagaatgacctgatcgagtatcttgataagcagacaaaggaaactattaaagaggttcgcgcccttaataatcgcctgagtcgtgtaatgtacggtattgtcgtcggacacgcatggtttgcggatctggatttcgaagaaaccagcgtaagcgttaccgcaacagatatcgttgcagcggaattctggaaagatgtgaaatttgattgcacaatcgttctggaagaaaaagaagttaaactctaatgagatctcgcccccgaaagggggctttgaggtgacttgtggaattacttgaattggactttaaaaatcttatgaatatatgcgaactgaatcaaggtgacatcctttatttctccaatcgtgatgggtttcgtaattcccgtcctgaaaacatcggctttcattcacagctacctgatttcatcgtcgttgatgatgtccggttaacagataacggctggcaggttgatgtagtcggattcaaaaataacaacggtgctatcgtatggcgtcctggttctattgatgaatcggtgtattttaacaacattcgtgtaaacatcgatgaaatcggaaccgatttgagcgaagtgcgggaatctccgtatgtgttcagcaactggtttaaagttggtggcgcgtatcgttctgataacacaaccgttgtgtatgttgatagtttgatgtccggtatggttaacttcaacccgtcattacctggcaacaacggcacgatgatggacattttcagagattataatcgttctgggacaatgttaccttccgaaaaagcatatgttatcaatcgttgcttgaaagggctgtaccaggatatgcttacctataacgaaggtaacgtaaaagatgcgcttcacgatctgaataagatcctgaaagaagtttctatgagaatggatacccgcaaatgatttctttattcgcgttcgtttcagttgttgtattgattttcgctggaggtgttatctatcatgggtgtgaccgtcgtgaagataaggtcattctatggggtatcgtctttgcgctaatccctctattcatgattggtaatatggtgatgcgatgaaaattcgttctgggtttgtgagcaatagctcaagcagtagctttattatcgggatcggacttgttcgccctggtaaagaaaaggaagttgctgatatctacggtgagaataatattgagtcattaatagatatgatcaccgatgatactcgttcgaagtggggtattcctcaagtcgatagcaacggtacgatctcactggaagcgttcggttcccatagcgttgagatttcgtatatctgggataagttgaaagaactggggatggacgatatcaaaattgttcacttcaatgaacgcggcgatgaaccagaatatgatgatgaatgcggaagatacaattatagctggtatgaagacgccgacgcgttcgggcctgaactcgaaagaaagtataatttattacgtgataaccgcgaactgttcattgaaggcgatgtgaattgtggcggggattacgacggttaaccactggggtaatgcatgataacgatagtatactgggaagaagtcgaaagcgaaatgatcgatggggaactggcggaggttgacggggaatccgaaatgcttactgctactgaaacaatcgaaaacgctttcgatcgaatcaaagcgcatcaaaaagaaatggaaggtcgtgatattcagtacatgatgagtttctgggtcggaggcgaggcgttatgtcatgccgtaattgcggaaagcacctcagttgatacatgtcgtgaaaagatcgaacagtacgtgaaatctttcttgcattgattaaaaagcccttgacttcggtcggggctttttgctatattggttctatcgaaaacaatgaggaatacattatgaaatatctactacttgcacttagtcttatgaccacaaccgcaattgcttcggaacctccaaccgattaccaatcatttaaagcgttatcaaaagaagaacaatgtacgtatcttccatcataccaaacgatgtatgattggattacgttatcttctgattacgatcaggtaaagtcaaaaatcgttagtgactacttgtataacatatcgaaaggttgtattcttaaacttcaactgcaagtggatacgatgaaacttgaaaaaatggaaagaggacaataggatgaactgcgtatatgttatcattgaaaaatttacttctcctgctggtaacgttgaacaaacaacagtctgtgctgctctgaatgaagaagaagcaaagcacaaagtcaaatatctcaatgaaaatgcaattattcctttcggtttcaaaggttatactgtaaaatacgaatatactgcgatttctcttgaaactagcccttcatggctacttgatatgaaatgaggttaaaatgaatccttatacaaaatgcggggtcatgtccctgttattaaaagaagttgtgcggttctatagccctattggtaaagtgtggtgtgtatctatcgggggtagacaaatcggatggatccgccgtggagatacaatcaaaggctggcaccaatacactgcaatttctattatgggctgtgaatatggtgagtttgataacttcatgcaagcattgtcactgttcatagataacgctattcacgagatcagttcacagggttccaaagttacaaagtacatggatactctttatgtgaacgtggaaaccgatcgatattgcatcatcaaagaagcactatacgatgataatgatgaggtgtattattacatcgtatcagatcaaaaccagatgcaaagttatatctccccgtttgaattgcgatatcaaacactaatgggattcattgaattctaagagaaagccccaaccgaaaggaaggggctttttgttatgatgcggaaagctgtagtttgatttgctctacgtcatccgggtcatcaatgatgctgtaatagatggttactgttactgagttatcatcatactgtggaataacttcaacagaaagattatatactctaggctcatatgtccggatcgcagatacgatagaagttctaattgattccgctgtcagagggttcatgttctcaaacagcatatcactaatagcacaaccaaagttactatcaaatggacgtgtacccttgatcgtggttacgataccaatcaaactatttcttactgctgcggccccttttgaagccgctacgtcattattccaatctcgttgcatgttaggttctatatcgctatatagcaacctcagatttacacccatttagaccacctttaaaaattgctgtaagcctctcagagagacgatatggctatgtccacacgaacaccttaccggaatgtttgcgaccactgctggcttatccagggcggtagaaatcgatttataggttgcatagtcgattgcatccaacaccatttctttatctttgtcgctgcaatcactccacatgatctgttcgccgtctatcattacgtaatcgataagatcggggatctcttcatcaccagtcttacgagggtgaacagatagcgcgatcccgtcattgccgtatagcttatcgtcgaaatcttcaaccatgatttgattgcgtttaagctggaattctattctttcctgacattcttcacagttgatgaacagttgacgggtatcgatatttttactttccagaagtgccagaatgaaaagatattctctttgatacaggtaaacatcccctttgataaaatctgcattgggggtaaactctgtatgtgtcagaggacgataatcaacattatatttctcaacgtgtttatattcatgctttctcatttaacagcaccttgttttttcaagtcttctgcaagcaatgcagtataaatttgcctttccattgggctactattcatgataggttccaggttcaggccgtttttatttagcagatagttggtcttcacaaattcatccagatccccacgactaaacaatatcttgaacagggttaacataccactaaatgatttaccgcgcatagacacatcaaccgatttcgttagcatagtaactattttttctacatcatcaagttcgacgatatcaagaatattctctttcgtttcttcggttagtgatgtccattcatagcgctgttcgttgtatatcacataactgatacattcaagaaacaactcttcgcttgtattgcgtgtacgggggaagttaaaccctaatgtgatttcatcattcagcttgtattcgttttccagttgaatatcattaatcaccatgaaggcttcggagtggcccccgcctttaccgcctatcacaaccttgataacgtttttaccgaacgaaccacaatacacccggctgaaaatatattcctgttctgttttggaatacccagggtaaagcagatccaacacttcatccagtatttcctgttgctctttaaggggccgaccttccatatcaatacgggtcagcattagtttaaactggtctttaactgtaaacatagggaatcgtttgatccctgatggtaatgttactcgaataatatcaaacataagatcctcaaaaggggccgtagcccctttattgtcctgtaattgcggtacgtgctgcaatggctaaaccttcctctacggattgtttgaacccttcccagccttctttatcagcctcgacaacccatgatgttttataggcaaaatcaacagtaaatgtccagatttcgttgttgttctcatagctcaattcactgttactgattttgacgggcaaacacttctgaaatacgtatgttgtatgcggtgaaccatcacgatcgtgtaagttaacctgaatagtacttgtcacttcatcaatgaaggcgtattgtcctgttacatcatcgcgaatagcggaaatccattcgttaaagattttcaggttacgggcttctgaatcggtgcggaacgtcaatgacaattccccattctcagggcgagtgaatctgatttgaggtacgccaccattataaacgtattcgtacccaatggatttaccagggaggttaactcccataatgcttaaacccatattatacatcatttcatcacggaattcagatagcagttgtccatacatgctatcaccaaacagggaagtaatcaaacgggggctaattgccccgatgattttgctaaatcctgttttgttcagcgacataatcgccttatcgacggtgtaactaaacaatttactcacaccgccagtgatagcattaatgaattcgttcgggttgtttgcgttgatagaactaatagatccatcaatcaaagtatctcgaatactaccgatcgtgttgtcaaggatacgtgatgcagggctggttgcaaatacaacgctaaacaggttgctacgctgaaaatcgcgattagccatacctgataaaaattcatctacgttgtaaaacatcatatctccttagtaatttgtatcaaaaatagaatcctgacgcatatcgatcagttccataaattgaatttcgacctcaagtgagatcggggtatttggtgattctcttaatgtatttacaatattatcaatagaacgaccaaagcgaacactggtaatacctgctggcccaaaggttgaatgaggtaaacgcaaggaatccccagactggaaatcacgaataaaccagacaggaggcgatttaataacctctacgtttgaaatgaagtcaaccacatcattacccagactattatcaaaatctgacgctgttactgggttactggaagggctaattgcgttcgcggttttagcacccagaacaccgtaatattgtttaaccaatgcagcaacctctttagcagtaccgccagaagttgtaccataacccagaacagtaaacagatagtagattttaatcagttccagcaaatcattacggctttcgatcacgaatgtattgtaatacatctttgttcgcttgtcagaaccctggaaagcggctttagtaccaacatcaagggcttctcttcggtctgccataataccgccagaaacggattctacagcgccccataccatgtttgaaacaacacgactcaaccctttggttaagaaactatcgtttgcatcttgatagcggtggctgtttacttcgttatcgttcaggcttcgcggtagcaggatctggcaaacaggttccatagtaccaatagaactgttcaacacttgtttgtacttaacattacccgtcgcagatgatagtatttgttttgggttctgtgctgcctgacgtaatgaacgatagttgtctttactaccaacaccattaaaatcatatgcagtgaacagaaggccgttattatacagactcgaagcattataagcattatcgatacctgctgcacgttgggccggaaattcggcggtaacgatagtttgctttaatactgattctgtgattgcggcacccccagaggggataccgcgatttttaatatttttgagagtgtttatactgtcatcaataatagaaaacttcattatatgttccttatgccagcgctacgagcggtttatgctctgtgcgttgtactgaatgagttacgttgttgttaacagttttgttgttaacctgaatgttgcttgctttatcagcatccggtttatttgctgctaacggtggctgtgcgtcgatcggggcgctggattctgtacgggctgcaatcttgttttgcaattgctcgataaggtcagagattctatccttctgtacatcgtccagattgccttcattacgacgtttttcaagctgatccaacagttcatcgttaatgtatttgatatcggctgcatccagattttcagagttagcatagttggttgctttacccaacagatcatcaccttttttctcggatccttctggcggttgtttgccttccttacgcgcttgtttcaggcgatccgcttcgatttgtgcctgacgaacacgctctctgttgcgtttgttttcctcatcggctaacttctgtgcttcttctgcactgccttcaatcaatttcacctgactttttaattcgtcggtgtgttttttcatagtatccagacgttctttgtcagcatcgacaatcttctgatttctttcctgataatcagtaggagctactttgtagatcgaaccgttagggatctggctaggagtaatcgtcaacgcctgacgtgctgcaatggctttatcttctttttccaatgcttcctgttgttctgccagttcttgtttcttaatcatgataatatcgtctttggtcaactcaagaccaaatttctgtttatcacgtaaagcggtgatctgcattccacgtccggcattggtaatgctgtctatgccagttgattcacccaatgattgaataagacgaccgataccctcagtgattgccgtttgtacagtttgtcccaacaacttcataggctcaacgaacaagtcacgaagtgattcgcctaagttgttcatattgaagttgttcaaaccttcttcgatctttgttacgatagcctttacgttacccagatatgtaccaaatagtttttttgaggattccccttctttcaggatatcttcgaaccatttgcgtattgtgacgcgcaacacatcgaatgtaaagattaacgaaccaataaggagcgtccatttagcaaactttgccattgcttccagagagtaaccaatgaaacggctaaggatctgcgatgtaaaccctttaatagaaaccaggcttttagcaatgctatccagagttttgcttcttttgtcttcatcatcaatgatgcgttttttcttagtgtctacatacggatcaggttcttccactggttcaggaagcggcttatgcttatcagtattttcatataaatcaacaagtttgttaatagcatgaaaaatagattcggtgttttcttccagcttaccgaactgaccattttggttaacgtttactgtattgtcaacagtttttgagttatcatcggttaaggatataggacggatcgggccgacgaaatcaggtagttgttcggctaatgattcctttttatcctcttcgtattgttctttgaaccccgcgaatttgtcacggaatttttcttcgaacgatttcaacccttctttgatatcaagagtattgattgcactttcaagggtgttatcgttgatttcctttaggtcacgggcgctttcagcatcaagggaggctgttactttggtgaccgctggttgtttgttgctgtttctgttcagaaactttttcttttgttcttcgttgaaataagagttagccattatcattcaccaatgatgttaagccctttgatggttttcccctcatgaataatgtatacttcctggaggacaccacgcgatacctgatcatattcgaatcggtacaggcaattaattaattcgtctcgtttatcctcagttaattctactggcttaccgtcaacatatgcctctttgatgaggaacggaaggtgagcatttaacaggctgggtttgtcaaagactaaccgcacattgtcaaacgtaaaatcatagcaaggttcggagattttgaggtcatcaagatttagcccaatttctttaagcgtattggcataatcagcgttattgtgtgcatacatatggatcaacacaaattcaatttccgctgctgttagttcacgcggtttgatgtcatcaatgatgaatcgcatgatcgcaactgggtcatctttcagagtcttaatctttacaaaatgacgatacgacatcttagggatctcaatggctgttccatccggaagatgaacggttttaacgttagtcttcttgatttcaagccgtgtagtcataaatttatcaagagttttatttttcattattgcctcaaattgaacctgggtcattatttactatttagtaaataggatatattaggagggatttttatggctgaaaaaatcgtcaatcgagtcacatcgattaaattatatacatcatacgaaaaatacattgataacgcatatactgaattgctacccgctcttgtctcgtttagtgaaaagacgatgattaacggctcatcggaaacgctgatgcagatatacgacgcacagttaatctatcagcaacttatccagccgatcatacaggtatctttccagtataacggtacacaggaacaacattattacggattgctttactctaacgtagatactgacgataaaaaccgctctgtgctgcgtatgaacctctctccgctgcataaaacgttcagacgtaagtttgcccgttcatttagtaacaacgccgtacagacgattacagagtgtatgacggcactgtatagcaaaatgaaactacttacccccgaagttgacggcggtaacatacgtatccctcctggatgtctaaatggtacatatcaggatatattcgattatatcagggacaacgggcaaagtgtagtttcttctgatttctgttatctgtgggaagatggttccggtattttccttaaaagttcaactgacattctggcccagacaccgatcccagcatacaaatttaacgttgataacgtgtttgttggcgatactgtcatattcacagaagcccagtacattacccataaggataacacaacgctgtttaaagacgccagtttctttagtctgtcattgactgataaaaagatgtacggtgatatactggctgatacagacacagagaatacatggatcttcacaaaccgtaatgcaatctatgataccaactttcagaacccagattcagaaggtaaacctttccaggcgtctaaaatgcaattgttatccagctatgaacgccggatccgattcgatataaagcagggtcgtttagatgttaaggtaggggcaatcattgaggtatttggggaagagtatgcaggaaaatatctgatcgttgaatgtgttcgagacgtatcaaaagatttccacctgcaaacacttgaatgtatacaggtgggggaacctaccagcgccgctactacgaacacaactagcagtacttaatcctcaaacaatccgaggtggagatcgaaaacattgttattgacctttttacgggcctttatgatgttttcgtaatgttcgcgtggtaactcaaccaaaaaacactgtctgtcttctggagcattctcaacttgtgcttccagaagcggatagttcttaggatcatcataatcaatgttgttatcgagatccagaataacacaacgccaaatttccggctctgctgatgttttaacagtttgaaccaatgacgcgtttttcaatcccagacgatgcgaaagaatttcatgggcgaattcggggtcatcataacggatctcttcaccattccaacgaataaggcgaacggttgcactcaatttaaatttgctcatatttcattttccttgtcatcaattcacgtaatttcttagttggcgctggagggtttttaatgatttcctggatctgatcccatgtttcgggggatacttgttccttttccatcacaactatatttggattatcgcagcatttaccaacaagaacagaacgcccacaattaaggcaaatcgtatcagggcattttccaagtttatcagggtcgatagattcaaggaatcttcttgctaccgataaccgctctttaacttcttcttcgctaacttccatttgtaattttccgctattcataataatacccttatgcgatttcgtaacacttcatgacttcttcgaataccaacggcatttccagatcccatgaatcagcaactgggtcatatgttgcttgatctacaagggaaaccggaattgcagaaacccaaccagaaccaccctgaacatcaacgcgcttgaccgtcatcaacgataaattgttatagaattcttcactgaatttttcgccaccgttaccaagactctctaacatttcacggttaacgagtttgatgtttttaccttccaaatctttgttgatatcgatgaagttcatgtgatgttccttttgtctgtttcgtttcgatgaacacactataccaaacaagaacaagataattttagcaaaaagtgctattaatggagaatttcagcagtcatcacgatccatatagaaagaggaaacccgtgaatgaatacccacaacccaaaatcatcacgtttattgtaaatcaaagcagttatgaatatcgaagccgcccaaagagcagtaaacagaagataatcactgagtgtgatcatttcttcacctcaaacaaaataccgtcttttgttgccagatcgatttcggtttccaacactgccgcaagtgtccactcatcggaaccaggtaagcgcctttccacttgtccgttatccagcttccgccactgtgcgccattaacgcgagattcataagaaacgttaactttcataatcagcccatccatttacggtatttgattgattggttcattgcagagataatgccagattcttgcatgttagaagcgcaatagacttcggcaacctggatttcgcggtcatagaggtaaacactaccacgaaaagttttcaagtgagcgaatccgcaatctttaaccaggttaaggaattctgctttcttcatcatatgagccattttgtttatctccgtgtttcgtttcaatgaacacaatataccaaataagccccctgcattgcaagaggctttttaacaaaaagtgctattaaacggcttctgttttcacttctaaaccaagtttagcaagcgcttcaactgccatgaaatggttttcaaacggaacttcaacagaaattcgaattgttgacggtgttggatctgtcagatattttgtcatttggcgatctttctggtttttgcaaaggatatccgccagcgcttctaccgcgtcagaattgaaatcgtatgcataatcaagtcgggattgcacataacgcatgttgcgttgaacataatccggatattcttcaacgatcggggttgcaacagccgcttcgctcatgcattcaaagttaggttttcggaaaataccaacacacttatcatcggattcgttatatacgaaaataaatgcgttgctgttcatgatatgaacgcactgatacaccggatgtcggtaaatcactttcagtactttcttcacagaaggtttgataatgtgatttgtttcgaatcgggaaccttcggtcactgtcagcagagattttacttcgtcgatatgtttaccggacaggtttgccataagggttttgtgtttctgataactactagtcataatatattctcttagtgatttacgtttcgataggcccaatataacaaagcccccgaccggagtcaagggctttttattaaaatagatctgcaaagacaacatgaatatcgtcgggttcggtcttatcgcgtcttatcttcttgataataggaaggaagaaactgtattccggttcccctttcttacgcgttttcgacttctggaggccgtcaacttccatttctacaatggccccaatgtattcatctttatgcgccatgatgtattcgcgatccagttcaccacgttcatctaatggaatgtatacacgggtaataccatcatcatcgtaacgataatcggtatcagttaacccagatccggtattcgttcgagccattccggataaatcttccaccacaaacccgccgaccttatggtcttctttagtgtgcgcgtagatatcaatgatccgtagttcaatcggggttttgtttttcagcttaacctgatcggctactcgcgaatctttccatttgaagtttctgtttttgagaatagaaccttctttaccgtcattgcggtaattgttatagtcctgcttcgcttctgcaatgttattaaccagcttagactgaatcaaacgaacagaaggcagagaaagatccaggaggatatcacgcaacaggctaaaccgctcatcataagtctgaacactttcagcttcgccgtaatacacctcatatggaataatatcccaaacaacataaacaatgtttcgctgttcttcttcggtgatcgtccctttcagagatttgtttacgatcccgttcccttcttcgcgttttgcttcggcctgttcttcttctggggtcgatactttgcgaacttcttccgcaaataacgcaatgtcgttatcatcatcgtccatgaaagcagataaagaaaaaggcatgtctgtttcaggttcaggtaatgttggtacggttccggaaggaacataaatcaattctccatccagaactacatcatatcccagataatcgcgaatctttttcagatcgatatcaagctgagttaacccttcgtactcgttacccgctctcgataccttacggtttaatgcttccagcaaatcagccatgcaacgcgcaccatcggctttaagctgcgagtaagcagggaaaatgatgcgacgtaaagccttttcactaaacggcgtagcgaggcattgaggctgttcaggaatgagtttcttccataccctgtttggtaaggttgtaccagcaccacattccagatcgcggttaatgatacggcgtagcacttcacgatcgttaatgttcactgatgatacaatatccagtaaacgatcacgcgctgcattgcctgtatatttccggcttgctaaatcttctagcaatgctttgattgcatcggaaagcggtgttgttcctggtttcccttctactaaagggaactggcgcacataaaacataatttgttttgtatacgtaatgcggaaaacttctttcaacaattcattatctgcattacgttttaaaattgcttctttctctttagttttcagagtagaagcaagttcattaaggattgacaagatcatttagtttctcttcaatttcaaaccacgattttactaactggtgaggtgcatttgtttcttcacgttcaccacgtaacatatggaataacggcaactgactaatgacgttatgacattcgtttaagtttatcgcgagatcatcgacaaagcaaaccagacgattaccatactttgctttcgcttccaggtaacgatgagtttttgtttcaccgtggcccacgaccatcacctctttaaacgcagaaggaaaaagagtattcaggttagcaattcggttaaggcttgctgttggtgttgttcccagagcggtaacggcaacgaaatcatattgcgttttcagacggttgatcacaatcaatgcatcatcatacgcattcagataacgaatgaaagaactgttattgtattcttccataaggattttagccaactgctgatcacatccgaagatttcggtcatatcacgaaatttttcatctgtaaccatttctaatgcaatatcagtaggcatgttgtgcttagacaaaaagaacggcaatcccgactgccattttacggcgatcccgtcaatatcagtcagaattacaggctttgcgtttgtgctcattataaaagtttccaaatagttctttttctttgttaattcgggcagtaacagcgtcatcataagacgcaaaccgacctatatagacattctttccatcctttttaatagtggaaagccatttgtttctttgtgtatcccatgatacaccagggcaaccagatttattcaacgaattgatattttgtttcatcatattctgttggtgagttgctgcctgaatattacctacaccgtcaccattgtcaacctcttttatgtggtcaacaacgtcaggaagaaacctattccgtgcataaaagatgactcgatgacggtagtaatattttcctttgaaccggattctacaataaccatcgggacggacggaacccgcttcttctccaacaacagtctttttggttatcttcttagcccagaaacacttaccagtttcgaaatctattcgtaaactgtcaacgagttcatcaagttctgtcaagatataacctcataacgatcaaagaaaagggtacttttgaatgcattcaattcacccaggaattgttcacgctcaaatgtccgataatattcaaattcgatgcacaacatatcatcatttgttacaccaatgccaacgacatcctgatgatatttctttgcctgttgaagaacaaacggatcgagatccgaacaatcgaaataaactacgtaactcatatcaacccttatacatataaacagcatctaccccagcatcaaaatcgactttatcaaagacaacgccgtttgatgcacattccttaacataggattcaataacaaccatgttatttgcgccgatggtaacataatacacacctgctttatagataacactctgaatcaacgttgaacgtaatgcatgttgtgcatacagtaacgctaatggattaatcgcgcctttgaacaggaacacgcattctactctttctttttcactcataacagatctctcaatcgggttaaatttcggacaaactcacgttcagtgagcaccgtttcattcatcttattctttcccattgaatgtgtcaaggtactttttccggttgctgccagcgcacggcgaaacccttcattaaggaataacgcattatatgcgttttcaatcaggatttgatacgcctcagaggaacgatgaatagggatacctttccagtataaggtctggttagtccaccattttttctttttgcctttgaactttgcggccttacctaccagagtacatacatgggcttgcatatctggattgctgaatttaaggctttgcaaaaagccctccattgatgcacattctaccccgtcaaacgtgaatggatgaggggcgaagttgctcaacgcgcatgatgggtattggctacccgaaccaatgtccataatgaacccccgccgaaaagattaaatcatacaaaccgcgaccgatgataacaccaacaataattgatatccacgttttccaattatccacgatcttcaccttctttcttcccttcctggcgagcgcgtttgcgtcccgctcgtactaaagaatcatagtacggacgtttgcgatcgatgttttctgtacgatacgctttaccaaaatgactcgttttgaatccgtagtatttcatgatgcggcccagtatcccaacataaaagatactatgacaagaatcacgttatttgtttcgatatcaatcacacttccacctcatgggggttattgtgcaaaccacgggccggatcataacgatcataagttgtttcgtactctgatttaatggatacatcacagcgagtgttccattgttccagagcgcttttaatttctttcactgagtcggtgaaaaattttacaatactcgccatacactaccaccttcataaaatgcatttagtttatgtaacatttctacacgggctgattcttttgcggggctgcaagataatgtcagaaccaacccaacaggacaatcaaaagcagtatcaatcgttactctttccagacgttgcccgtgatcacgaatcatcttcaaaaaggtatcagataactcggtattttcatattccactttatatatgaatcgtgccatagttaaccccttgcacatgaaagataagaacgcttcttgaacactttaacttcgtggcccctaccgcttgcagcagtgttaagagtttcggcgtgacgcgcaccaagtaccagagttttaaccggagtaaccggagcagcgataacgataacagcggcccaacgagcaccaacagctttatcagtacccatatcgatagcagcagaagtatttttaccagccgccagaacgtaagcacgtgcttcacgacgagttttgaagaaaaccagttcattcatgttgtaagagcgtttcataatgtcatcctcataaaagtgttttcttgtctacgggattaactataatgaaatgtgcgaagggagtcaacaactttttatgtaaaaaacgaaaaaagccgctacctttcggcaacggcttgatttttaatatttttcgtcaggctgaaacaccgcacgacacgcccacatagaggcttctttcagtcggtctttcgctagttgaatttgatggatacgttcaagcacctcatctaattcttcctctatcagtgaatcaatatctgaatttgatagtcgctgttcgatatcttccaggattgcacctaatgcattttcagcatctttgatacggtttactgtttctacttttttatcagtatggggtttataacccgtaatatcagaaattgccattatagactctctgtaaaagtacgggcaataacatcgcgttgctgttccggcgtcagggagttaaaacgcactgcataaccagatacacggatcgtcaactgcggatatttttcaggatgttcaaccgcatccaggagagtttcgcggcgcaacacgttaacgtttagatgttgtccaccttccactttaacagttggctgatattcgatctcgatctctcgctttgcaaacggagtaacgcgagctttaccgattacagaatccatagttaatgtttttgatactacgatccgaacgtcgttaccttcttccagatagattgtgcccgtatgcaaaccttctaaaatttgaaatgctttcattgtattacctttacttgattacataatacctgaatggattgaaatgaaacgccagcattgcgcgatccaggttaacagggtcgctaacttcttgtttcagcttccatccagcataaacgcgcaaacagaattgcaccttgtggatccgtagccacggtttatagacatacaacccccatgctgattcattccacatgagcagatatccatgatttacggggtttggcccaccttctgtttttgggttgcctttccagttgaatttgcttgtcgcttcacgtcctaaaacgtgatatgcgaagttataagccttgtttctccacaaccagccaacacgctgcatgtataccccaaaatcccccagatgatagcgtatagacgcccaacggcggatatgtccaccatcaccatcaatagggttatcgaaggtttccatccaccggaagcctttaggaagatgccctgttttctcgttgtagaacggtacaacaaacggggcaaacagaattgctaatactccagtaataatgtcaagagggacgagtacgatccaacttgcatactttaaaaagcgcatagacaccccaaaaataaggctatccgaagatagccatttgattatttgtttgtgttgatgtatacaaatgattcatcaaattcactgctaaccgcttcatttgtaaacggaatttcaggatttttgaaaccaccactgataagatactggataaagaataccgaagtatcaagagaaatcaattggtgattgctcggagatatatttgttctacgaacgagattgacaatctcccaatcaaagaatcgttcgctatactctttcttgctatttacttgcggcgatgcaaagaacccttgtttggaatatgcctcaagcgctttatgaagttcagaatcaaaatcatcgaactcttttacaaaaagttccatcaattttttattgcgattcgttgggttgctattttctccgatgatttttctaattgccggagacatttcaaacagtttttgtaaatttttcatgatatctctttaaatttcgtatgcggaatcaatacaagattcgtaaagctgttctggcgaattctcaatgagaggtgttgttttaccgaaaatatcctgatcgtaaggatcgtcatctacataacattcactgaatttgaagttttttcgataatccccatcgggtaatccatttttccattcattaaatgtcataccatagcgttctttgaattttgcaggagacatatcaacaaaaatctgcgtatgttcgaccgcattatggtatttcacagtttcacgaaatttcatataaacctcattaaattagtgggctggaagtttctttacttcaccccgcattccggggaacctattaccggataccaacagagcctttcccgtggataaggttgcatattccgaaccatttaacggcattgcgctcgcacccaaatttggtggcaagggtaggatttgcacctacaaccaacagaatcagattctgttcctcccgcttctctaagtgccttgccttgtttggtggcccctcccgtgacttgaaccgggaacctaaccattatgagtgattagctctacctattgagctaaggggccgatatttttagaactgtttgcggtagatttcgcgaacagccggatcaacagctttggcgtatttgcatacatcctcgaactgtacgatgtattccattacttccgaagcacgggaattcagttttccctggtgagcatcaatgatcattgaagtcattacatcgatgcgggtcggtgcttcgaggatgtcgcctttgtcgaaaagttttttggattttgcgacggtatcggcgatgattgcttgaatttgtttagccatgttggatctcttattcgtaaattgcttgaatcgctttatagtgtgcggttacatatttaaccggatacttgcgagcttcttcttttgttgcctttcctgcaatcagttcaggatccggcacgtttgccatttgtgcatgaggaagcggtacacgcttacccataagcagggttttatattcttccggtacatccggcccacatgataacactgtgccgtagatcggttcctcgccgtgttgacgaacaccagtcacaataccagaaggtgatacaatttcagttccagccgctttagcgttggtttcaatcagaacatattcaaaggatgcttttacactcagttcagacatacatttactcattggttatttgatccggaaatgtttattcatttcttcggggtcaagttgtactacttcggcaccgtattgctgtagacgccatatccactcgatgccaccacgatcgtatttatgtagatatactacacgcttaatcatacctgttgcaacacaaaattcgatatttttcgcacattgtgagcaaggggaatgagttgtatacaaagttgcgtctttgatttgttcatgagacgccgccagcataataacgcgcatttctgcgtgtacttcgttgcgatctgaccattgtgaatgttcagggcgcttttcttcactcagtttcccattatcatctaataagtgattgcactgatctgtacaacgatgactaggatcaaccgtattatttgcgcctacaaacacacgcccgttaccatttctcaatacagcaccaacattaacagagacacattgagagaacttagaagcacttattgctctaagcataaacataatatcatcaatcttcatgatacaccacgtgataaagaactttccagtaaacttgaatctttccatcatctaacactcgatgatgtgcagaaacagaactgattactactttttctggactcggtcgaaaacaacttgtgaattttcgaacaagacaagcaatgaaagtatttgggttgtcgatttcgtcaatgatagtattaacagttacttcaccgaaatgacaagggatatcatatgcttttaatgcttccaggagcgccatactcatagagccaggatgatcaagcatctttcatcacctttagtagctgtttgataaaatcaggagtcgcttcaacgatatattctgaaccgttgattgtagtaacgcgaacttctgtctgatttttgttgatatcgtattcggcgatcggacttgttactacatcaatatcagttcctttgatgtatccgaaaacaccgccataataacgaggatctgggtatacagattcatccgtgatcatcgctctatcaattacttttactttcataatacagccgcccatgtaacgtagccagtaataggatttaacaccagcccgaaagattgggtgctgttagtatccacgtcatgaatatacacaatataggagtactgagaaaccggagtggcgctaacttcaaacccgcccggagctttaccctgttcctgaattttgttagcaattttttggcacaacaaacgaactttttggttaaaatcgcccagattttctacgcgaatgcgatcgccaagttcaaccatgatgtgtttatcttcacgaataacgttcataatataatcctcttttgtgtgggtactttaacatacccacattatatgtcaatcagaaatcaccataatcgacttgtaagcacggaatcccgtttgctcgccacattccgaccggagtgtctctatcgtccactgcaataacaggataatacttatctaaaatcttgtcaaacaaaatttcttcttttacttcaaaatctgtcctggtatcaccttcttgacgcataaaaatttcatccggttcaacgccataactcaacaggctaacccatgtatcatgtgcgcattgcggattaccttcacgcccagacacaacaacacacttataccctgcatttttgtacaggtgaaacagttgctggatcgggatgtttggcggatcattgatcactttggtaaagtcatacgggctacgttgccctacttttgttagcgtaccgtcaacatcaaagatcacgcatttctgattgtggggattgacaatttccattgctggtacgaacccacggatcttacgatactggttaaacatttcccaaacacgcgaaacgggtaatgcatcacagccgcgtttgtggttacggcgaagcagttcaacaatggacacatcaaagtattcgatatgaaaatctgctttgtgttccaatgcaatttcacgccagtgatttttatcactttctttcagatgcgtgttgtgtatgatcacgtttttaccatctttcagagtggagataacaacgtgatcctgcatttccgcaatcatttcttctttagctttggtgtatttgtatccgccagcacccttaccagcattatacaaagagctacgcagatcatcgcgagatatcgtaacagtattacccaattcacgggctttctcatgcgcccaggtagtttttccactaccaggaacgccaatagtcataaacagattcatttcactatctcatattcaattagttctttgttatactcattcgtcagattgagccacatatcacgattccaatcgttttctatccatagaccttctttatcctttttcgcagtataaacttttccttctgttatgtcacgaaaaaacgttttggttattttgatttgcatttctcagggtatcccaacgtacacagaacattatcggtttgatccttttgtcttttaacgtcattcatccagctacgtaaaatcaatgaatctggatatgtcaatgcaacataaggattaccgtcatatggcattacaaggtattgtttcccgtcgatttctctaacgtctgcaattactttccattttaccttcactgggttaacctttgcgggtaacgtaggaagtaccttaacaggtggctgttcagcacaaccaacgagaaaaacaccaagtaatactatcattgctaatttcatttttcaaattcctgcatgtattcgtcgaaggatttgttgattttgatttcaatcaatccaggtttctcaaacaaaaggtgtttgcgccctgcatccttgactaactgctgatctttggatttttgttccacgtagataacagtattgcttgtatttgtctcttttactttcttcacatcatcttgcaaagatttgatatccttgcgtaaggatgcgttttcgattttggtatcgactgcaatgtaaaaaagggctatcaaagatagccccacgattacaggccatacccaagatgatatcttaggcattatgaacctcatttatattgttcaggaatgaactgatcgtaatttttaaccatcatttcaatgatgcgatcgaccagtttttgtggatcggtttcttcgaagtacttcataagaggcccgaagatgatccgaccgtcgtttgacaaatccgcgcttagactgatagcaaaatctttacgcgatttccctttattatcttcaatggctttgaacgcttttgcactcaaacgattgagactatcaaggaaaagtttttcgaaatcgtcaatctttttcagagagaccagatccgaactgaatagctgtttcaggtcatcgaccgtattctcaacaatatttaggaaaagatccttattgttggtaatgctatcttttgtgcgatgcagattgacataccagtttgttttgatttttacaaaacctttcgttgtcagaacaacatagccttcgaatccttcattctgatatgcttcttttgcgaatgcatccagatccagtacttcgatattctcacgcttaaccagatacgcacgtaacagcgcgtcagcaaagagttcatcataagggatgtattcacccgtgatgttgtgacgaacgttcaggatacgcagatcaggagaatcataaccaacgacaatacggtttttcggggaaacgtattccatgttcaccgtatagttttctttagcgatctcagttaagcgggtcagcaattcacgatttgccattaacacgctgtgcgcatccatagcttgttctgatttaaccgaacctttagacttgaccgccagaaatccaccgtcaaggaaagttgagatcaaggaaccatcttctttaatcatcacgtctaaaacttcgcctaattcaataggagactcgttaagcgcttcccatgcctttacctcggcatagttaaaaaacttctccatagggcggctgatgattgatacgggggtatctccatccatttcaaacatgataccgcgacattccagagcaccaggctttagccagtctgtatatgaggccatgcgatagttaaagattcgaacaggtgtacccatcacggttacttgatcaacgaagaaaaatgtttcggattcaccacacaactgcatgagttgtttgtaaagggtattgataattttagtttgtgcctttgtcatagtgctgtttattccattcagggttgtattttcgtatcatgttgatttcataatcatgatatgtattttcatcgtgagtagtcacgataagtttcacagtttttcgttttttgatagccatttccaatcgacacgtttttaagatgttactggggttggcttctctccaatactttgcattgcgatatgtgtctaaacgcttccacatatccctacacttaccaacatatactatttcatcgttaattgcaataaaataaacacaatgcctaagttcaccacacttaacaaaacttcgatcgatgcgaccacatttatcaagggttaagttgaattcagatttcatacattatatatccaaaaagtcaagtgatcttttcttaccacacaaaacattaaccacatgcgcgatgtaatcaccgtgacagggaagaggcgcacaggtacaaccaagcctctttccatcaagttctttcaattcttcaatcgtgatcgccccagtacgaacctgattctggaaccaggggataaacgctaaaatgttttctcccctggttcctgtgtgataagggttgccgaacttcgtacctctttgaatatcgacatcccaatcagttttgtacttgtttactacccgacaatcacgcgtatttgctggcccattttgcatacgcttcatcactgatttcagtattcaggtttccgacgaggtaagaacttacttcaacctcttgcggggcaacctgtacgttatcacttttgagccatttattcatccacggatacgggttagggatcggggtgaatggtgaatcaagccctaccgctcgcatacgctgatctgtaaggtgttcaatataagcgatagtgcttttcagcgatacaccttctacatcaccaacagagaataaatgttcagcccattctttttcctgttcatatacttccaggaagatagccgttgcttcttttttcagcctacgggagatttcaaccatttctggatcatctttacccatttgccacaaacggattttactctgagtacctttctgatgcaatgcttcatcacgcgcaatcaagcgcataattttcgcgttgccttccatcttgccttgttcggcaaagttaaaggtgaaactaaacgacacatagaaacggatcgcttccagagcgttcacagcgtgcatacaaaggtacagcgcttctttgcacttagtggcctgtttagtgtattgctcgttataatacacgacagccggatcatttggtttatagccgctaacctgttcctgtagcatcatgatggttttcagcttatgacattcatcaatcagagtatcataataccgtgtcattgatgcggaacgtttcataatcgcttcattgcgaaggatttggtcgaactgtacagaaggatcaatgtgcaagttacgttgaatatgcgtgtaactacggctgtggatggtttcactaaacgcccacgtttcgatccaggtttccatgctcacatcggatgcaattggcaaaaatgcgaggttaggcccacgtccctgaatggtatctaacagggtttgatactgtaggttagaatcgaaaatgattttttcatgttcaggaagttttgcatactgcatacggtcagtagatagatcgacttcttccggacgccagaagaaagaaagttgtttttgcgtcaggctttcgaaaactttgtgtttctgcgattcataacgtgcaacaccagtatcttcaccaaaaaacataggttgatctaagtggttatgatctgggtttgtattcattactgttaacatgtctttacctttaaaaagcccccttcggggcattaatcaaatcttacaacccgcgcaatcgtcggcggcttcatcttcatcaccagcaccatcacgcgtattatgatagtacagagttttaacaccgtagtagttagcatacagcagatcatcaatgatgtcttctgttttaactttcccgtcttcatagtttgccgggtcataattggtgtttgcagaaatagactgatcgacaaacttctgcataactgctacatgagacagataccctttgttaccgcgtttagccatatcccagagcagatcatagaaatcaatctggttattctggttaggcacaacctggttatagtgtccttctttcgaagatttgatactcactaaaccgcgcggaggttcgatcccgttggtagagttactaacctgtgaactactttcacaaggcattaaagcagaaagagtagagttgcgcaagccgtatttcttaatctgactacgtaaccattcccaatcgcaattataaacaggtgctaccagttcatcaacggttttgcaataccaatcgataggcagtaacccgcgagcgtatttggtatcgttgtacaatccacatgcaccacgttctttcgccagttccatagaagcaacgagaaggttaaactgaaacgcttccattaactcatgaactttgtctgtatacgcttctgagtagtcgcaatagttgctcgctaaccatgatgcatagttggtgataccaacacccagagaacggcgctgtttagctttcagagcggcttttacagggtagttctggtaatccagcaggttatcaagcgcacgtactgcaatacgcgtgagtttcgggaattcgctgatatcagcgttatccagaacgatagccattagcgtacacaatccgatttcaccagccattttatcatcgtcatccagcggcgacgttgggatcgcaatctcacaacacaggttagacatacgaacaggaaccgtaaaactaccctgttggttgacgtgatgagtgttgaaaatgtatttgcgtcctgtctgtgcgcgttcctgtgctaacagttggaacaggtcaaccgctttgatgcgtttcttacgaacagttggatctttttccaggctttcatacagttcttcaaatgcagtctgatcagcttcatagaacagatcatacagacgatcgttagcaacatccggactaaacagcgtaatgtaatcacgattcattaagcgtttatacatcaactggttaagctgtacaccataatcaagatgacgaacgcggttttcttctacgcctttgttgttcttcaacaccagaaggttttcaacttccagatgccagaaaggataatacagtgttgcagcaccaccacgaacgccaccctgtgaacaggatttaacagcggtttgaatatgtttccagaaaggaatcacaccagtatgaacagcttcaccaccacggattttagaacccattgcgcgaatatgtcccgcgttaaccccaataccagcacgttgtgaaatatacttcacgatcgcagaggttacagcgttaagagaaccaagagaatcacccgattcaattactacacaactggagaactggcgcgtaggagtacgtacacccgccataattggagttggtagagacagtttgcgatcggaaattgcgttataaaaatcaacgatatgcgtaacctgtgctaatccagtttcttcctgatgcagacacatcgcaataagcataaacgcatactgaggggtttcaaagatttcgccagtatcgcgatcctgaaccagatatttcccgattaactgttgggaaccagcatacgaaaattcaaaatctttatcatggtcaattgcacgttcgaaaacttgaatatcttgcttgctgtatttttccaggatctctttatcgtatttccccgcttcaaccattttaacgatgtgatcgtagaacgggataggatcgaactgaccgtaaacgtctttacgcaatgcaaacatttcaagattcgatgctacgtattgccaatctggttctttaacagaaatatgatctgctgcatacttgatagcgatacgttgaatttgtttggtagtcataccatcgcggatcagttctaatacattttcaaggaatgcacgaacatcgatattatgaccatcacaggcccacttgagcactttgtatattttttctttgtcaaacggctggcgtacaccagaggattttactactactttaatgtcattcattctcttaccttgttaagaaaggggccgaagccccatttttcatactgccatttcagcttttagagagccgtgattatgatacccttctaaggttatcgagtcaaagaattcttgatctaaatcaagtaagctatttaccttcggcatttttagaatcggtaatggcattggtgaacggttaggctgtaaaagttcttttgcctgttcaaccgcatttttatagatatggacatcaccaccagtccaaaccagatcgcccacttcgtacccgcaaatatcagcgataatatgcgtcaggagagcataggaggcgatattgaacggcaaccctaagaagacatcaactgaacgctgataccactgtagagacagtttaccgttgattacaacgaactggaagaaacagtgacacggacgcaatgccatatcatcaagatcaacagggttccaggcagaaacgatgatcccgcgatcgtctggagttgatttcagttgttcgatgacttttgcgatctggtcaacaccactaccgccataataactatcatcatccccataaagagaaccaaacgaacgccattgatgaccgtagattggcccaagataaccagaatcgtatcctaaatcaatagcttgtttctcatagttatcatcccatattgtgcgcttatcactattttcaccccaggtcatccggcgaagttcttcgacattagtcgaaccggacaggaaccattgcaattcatgcttgcacggcttgaagaatagttttttacaggtagttgcggggaaacctctgtttagatcccatcgggcttgtgcgccgaaaatacgaatagtacctacaccagtgcgatcggttgattcaacaccgttatcaagtacaagtttaataatatccagatactgtttcattttatacctttttatatcgatctactacaattttttcaatgcgttcatgttctttgatgtactgagttttgaaatcagtaaattcatattttaacaatacatcacccaattcagaagcagtaaacgaaacatcgcgtttaaatgatggggcattatatacatgatgtccataaatgtgagtcaaaactacttcatcaaccattttattattgattgaatctaaaagcaaccccttaccaccgatgacacacacatttttatctgggtgtgttgcttgcattgtaccaatagcagcagacaacccgccaccgtggatcacgtaatcagcaacgtcgccttttttggttttcaaaaaactactggaaccagacaaaacacaatggatcctaccaggtagtttacccggaagagaggtaaacgtatttgcacccatgatcaaaacgctatcggcggtttcttctttgaagttttgtaaatcttctttacagtggccccacggcaagccttgctgatatccaaaagcgaaatcatcgtggtagatatcatgccccagtgcaaacaccgcttttactatgctcatattgcgatccacattttgttgtcttcaacagttacaatatagcctaatgcttcaatcataactttcagtttttctttgtacttctcatcatatccgcgaatcttctcgaattcaacagagaaaatactacacccctgatattttgcattgatcacgcgagattcaatatcaaaaatcatgatatccagaggacaccaatcaacagagtgaagtttttcgcgggttagtagtgttgtgttcttagggagtttcattccgtttcctgttcattcagccatgattcgatacgagatagttcttcatctcgcggggtaaatccatatgatgcgtcgatcatcccaatctgatcccaaacatcaatttccaggatctcagtcactggaggattttgtgagatatggtcacgacatacagcaagagcggtattgatggattcggtgacagtcagagtgtcaccctgtacagatacttgaataatcattcagaactccatgcatttttcaaagtaaatctttgttgggaattaataatcgtagcgcgaataacagcaagtttcatttcttcaaatttatttcgcgtcatatacaaaccaatcaaaggaaaatagagcctttcccattcgtaagtgtcgcttacttctttaacagcattgattaaaatctcagccatttgaaaatcggtaggaggaacccaaccaagattaatataaatccgtttttgtgtaccttctttcagattttccaaacgtaaccatgttggacaactcataatattttcctcaaataaaaagggaactgcgttaacagttcccattatagttcatttgattagtaagtcaagcgccacaattgaattgctgcatcaacttccttcttgatatcttccggagtgtctttgcgctgtgctttgactaacatagtcatcattttacgaatagtgttgttcatattcgctttctcacgtgctgcatgaacagcctgcgatttttccacttccggtgtatctttcttagccgtctgtggtttggtaggctgtgcgccgatttcgtctttctgtttcggtgctttttgctctgcttccttcttcacatgaggtgcggagaatttacccgccttgaagttagaattcatttgatctaaagcgctcttaacagtgttccagtcagagatcccacgtaaagatttcagagtatcagtgagtaggctaatgcttgcgcctttggtatcttctgcgatatcgattcctttcaaccactcaatgtgtttctgaccagagtacgtgaaatcaaagctactgaatgagtagtatgctttacggtttacaacaatacgcttgaagttgatagtaacaccagcgccgttatcaaattcaacataaccgctggtaggcattacacgagcaccaatatcttttagtgctgcgaagtattcctctttaccgatacgattaacagtgcgttttggcttctcttctggcttcggcgcggcttcctgagcagctacacgtttaacaaaagatgctgaacgatgtcccgctgcaaactctgcgttcatcttatcgatcgcgttcacaacgccttgaacactcggtttcagtttctgcaactctttgaacgtatcaacgatcatatccaggcaagcgccgtcctcgtcttctaacatagttccgcgaagttgtgcagccggacgatacttagatacagcaggatcatacaccgcgctaaacacatacgcacctttacgcatcattacatgacgatagaaacgaactttcagtgtaccaacttcaacaaagatatcgtttccgctaatgtcagcgcctaacagcttacggaatgatgcaaggtaatcagcacgtttgtatttgatatttttctgtacagggctgaaaatgctttccagttttttagacgggaacaggctttccggagtgatcttatctgggtttttgccccattgataatcacggcttgccattttatgttttttagttccaaccagtacaaaggtactaacagaaacgttacccagtgcagatgaatccggagcggctaacccttgtccattcggaggggtgcagttgaaaccgaaatcaaagtaagcatcaccagaagtgaaacggaacgaagcataaacaccgtgactaccttttgttacttcctgtttgaaagtggtaggcaatccagtgtatttggtgaagtattccgcaaattcctgtgcgttaaatttggtgctgaaatagtttttcgccactacaaagtaagcatcaactttttcttcccattctttcttttgacgtgcataacgtgcgcgaacatcaccagcagtctcagaacgtgcgccactaggcccagtttttgtaactacgtcgtaagcctggttaattttctgcattaattcattgctaccaccacggtcggggtgattgcgtaaggatgcacgtttgaagagtctggacatttcagcgctggtttcgctaccagttgcgcccaaaactttcagtgcttcctgataagtcattttggattcagtgatcatttattgttcctcaaataaaaacaaagcccacgtttcgttacatgggctactttactgtatttatggatttcggtcaatagattttttcgaggaaccaaacagaacttttgttgttcttgattcgcgtcaactctatagggttatctttgaatgcttcctcaacatctttcatagtaactatatgtttttcttcaagaaaattgttgtggagataaaaccgctctatttccagagcggtttctaattcaaattctctttctaacattatgcacctcgatcattgatagtacactttgtgaaccgtccaactttctgcatggtgatatgtcgatcgaaatcttgcggatccagatcctgatgactgataatgatagtgttgccttcgatactatcaagtaaagttttgattgcatatgaaccttctcggtcaagtggcccgtcaaaaacttcatccaggatcagaagggataaatcaacaccagaaattttactggttacatcgcgccaggtgaacaataaagcaaggttaatacgtgctctttcgccttgactgaacgatgcgtaactaaaatcattacgacccagcgatttaatcgattcgttaaattcgtcatccagagtgaactgataatcagcacccaacagatccagatagtacgcaatctgtttattgaagtaaggaatataacgtttaacgatgctcgctttaacgccggaatctttcagcagatccgtaacaatacctctgaaatatttttccttgacaaatccagaacgtttggaatcaagttccttttcatcttcacggagtttttcaactggggattcgtcgatcaccacgtcttcctgtgctttatccatgacagcccgaacacgtttagccgctgcaacttcattttgaagtgtaccgcgtagtgattcgtatttggatttcagcccatttagtgtacgttgttgtgttagtaaatcatccatgattttctgtagctgatcttgtttgttcttaatcagcgtaagtttctgagtaccgtttttaatattctcggcaatctcttccatgcgttcaggagtggggctaattggctgtttacaggccggacattcaccacccttgcgatacatcacctcaagacgctgcaactgttctacgttcattgagaggcgtgtatagccatcacgcagtttttgaatatttgctgtttggtcttcaccattgatcacacattctgcgatctggctttgtagttcgaccaattgtgctttgatttgttttgctgtttctacgtgggaatcgtagatatcctggtaacgcgccgtattctgatttgcttttgcccgttgttcgtcaatgaacttttgatgtgttgcgatctgctgttgtacgtgtccaatctgcattgaaagcgtatccagttcacggttaacaccacggatgtatgatttgttcagtttgtccatttcactgatgatagacaaagacaacaaatcttcaaccagtttacggcgatctggtgttttcagttccatgaaaggtacataaccagcagtacccagaacgataacctgtttaaagcccaccaggttaatattcaacattgattcaagctgtgactgataatcaccagcggctgaatcttccggcagtttttcgccattcttccagatctcaaatactttcggcttttgtccacggatgattttatattcatcattgccgtattcgatcaacagttcaaccagacattttttcttgttgatactgttcaccagttgtccgactttcagatcgcgaaatgacttaccaaagagagcatatgtaagcgcttcgatcatggtggatttaccaccgccgtttttacccgtaatgagggttttctttgctgaatcaaaatcaatgacgatcggtacgttaccaaccgacaagatattttgataagtcaatgttttaaatttgagtttcatcaattatcctttgggatatatcactaatcatgtttgtaatcgtgctatcaaagcagtatatcacggaatcttcatccatgctattcaggacagtaaatgtccaaacctttgtttcgtgatagttgtctttaatcagagtgaaccccaatgacacatactcgttataggaatcctgctgtactgcaacaatcacatcaaatccaaacattttataaagggctttatatcgcccttcttcgtttaaaatattaacgtaatcaactatttccattgctcgtaacctctgcatacaatgcactcattattgcagatacttcggtcttttcttctggagtgatctgcatgttgttgatgtactcactaatcaatccagatacgcttttgatttcaaagtcagtatcaacttctgaatcagtgatcacacgatcgacaatgttcaactcataaactgtttcttccagttttgtttgaaacttaggcaaatcgttatcaacttcgcgtacaatcaagcgaacagagcaatttttgtaatctgcaacatcaacatctttttgatccggataggtgatccggcgatggtggcatactgggttagcaatgaaagttaattcacgtttaccgtcgccataagatagctcatagaagcccctggtttcgtcctcatcgttcgcgctcatggtaagaggtgtaccgatatagaaaacgttagcgccttcgttagcgtgatgatagtggcctgaatacacgatatcatatttctttaagaaatcaggttcaagcccatgttcagctttactgttcttatagaaatagtatccggacagttcaaagtgtcctaagcagtattgagattttgactttttgatgaaatcaaaaatctgctgtgtgttttcttgacaaatccacgggatcaaatcgattgattgcagcggagaagtatcaagatttactgtcatcggttcatcaacaaccgtgaagcaatcatactgatcaagaatctctcgcggtgagttagggcggatcttgtctttaaactggcaatcgtggttcccaaccagaacatagatatgtaatccggcttcttccagtagtggcacaatacgttcacgaatgaatttcatcgtggtttgtgtggtggccttgcgcacatcaaagaaatcaccagcatggaaagcctcggtaatgccgtttgctttgcagtgttctacgatttgtacgaatacattgtataggttttcttcattccaggggttgtcctgacgcaagccagcgtgagtatccccgatcattaagtactttctcataagaccctcatagcccctttcggggctacttgtttgttagtgcttctgttgtgaagctacgatatttcgaattgatgctagtgaagtgttccacatcgtatcaatgaaatcctctgtatacggctgtttgagcatatcacgaagtttcttaaccgcatacacatactgaactttattacccctgaatagggcttcctctgcatgtctacggaggcgtttgatctcagtccggttcttcttaatgaatttttgtgctcgcttcaatgcgtcggcttctacacgttcctggatcttttgttgaatttcctcttctggatccacttcttccacactggttagtacttctttctcttcatcaatcataagtgatctccatgatcatagtttcggcgtttatcatataagacaaaaccccttcttctacttcgaaatcggggtttcttacgtcagttggatcgatgataaccgggattcccacgttttgcaactctaattttacgaagtagggtagcaagtcaatttcgtaatcgatatcagttaatattttgtttaagtcaattattgctttcatagaaaatcttccaatgttgggaatacttccgcttccttgtctttggttttggtggcggaagcctcgtactgagatagtttgtcatgtagatcttgaatgaaaccttcgtctgcaatactaaccatatctgaatcttcacagtcgtaaacgtgctcaaggaagaatttatatttcttcgcgttctcttttttctcgtacagaatacgtgttacgaatgcttgccaacatgctttgttaatgtaaccgtaaacgttggtataacgagtttcatcgaagttatgcagtcctgagattgcagcggaaattccgtcatcgatcatatccattttccaatcttcggaataacggttgaagttgtaacgacgtgatagcccgtttgcaatatccataatagcagcccccaactcattaggcattttgcgatcacctgtttcggcgatttgctttttccatgcacagaggatagggtataatttttcattgtctgcgtagatattggttgtttctttagtcatagtattcatatttcctctttgaagttaagaatattatataataactgtagacaaaatcaaatttcattctatattatttaaggttaaagtagatctaatgatctatagatcagatctaaattatataaaatttattgattttagtacttgacctacaatgatcattgtagtaaaataattattaattaataaattatagatcataaatttgatcagatcaagtattattgatcaaaatttttatggtcttttgtattgacttcatttcgtaagttactacaataaccccgttctttgaaaaattgaggtatgtatgagcagttttgcaagcatgtttaacttgaacaagctgatgcaagatgaaggggaacccgatgatactatggtcatcgatatctctaacatttccatcgctacactgatgaacaacttcaaaccaaaggaacaagcatccatcacgatcgaaatgattcgtcatctggtgcttgacactttacggtttaacgttgtaaaatttaaaggtgagtatccagaaatcgtgattgccttcgatgacagaaattactggcgtaggcaaaaagcctggtactacaaaaaacgtcgtcagatcgaacacgaagaatcagaatgggattgggatcgtctgaacaacttccttaatcctgtgttcgaagaaatccgtcagaatatgccttatctcggattaaaggttgaattcgcggaagctgatgatataattgctgttgttacgaaaaaagctgttggtgaaggtagacgagtattagtggtttctgctgatagcgactttacacaactacagaaatataacggtgttcgtcaatggtcgcctccccagaaaaaatgggtaacgcctaagtacggttcgccacgtaacgatctgcgatacaaaaatatcaaaggcgataaaaaagatagtatcgcttgcattaaaattagaaatgattatattgtgacgaaggttgaaggtgaacgcgccccagcggtaaaatcctctgagttagaggcatggctggaggcagacgatccgacaacattgatgacccctgaatgggccgcacgttacaaagaaaatgaggaactacgcgatttcgaatttataccaaaagatattgaaaattcgattattgaagcgtataatactccaaaatccggaagtaaagccaaaatggaacgttacttcatggataacaaactttcccgtatgttcgaaaaactgagtgatttttgaggtaacaaaatgagtgtagaatttttacaaacaaaccctgatgtagcaaaacaggtaaaagaactgatcaaagaagcatccaacgtgaaaactcaagttgagatcttcaacggcacgttcaaggatatcaaatccaaagcgaaaaccgatttcggtatcgatggaaaaaccttcgggaaactgttcaaactgtatcacgaacaggcccgtaccgctttcgaagaagaaaacaacgaactgatcgaactgtatgatatgatcgataaggcgtaaagcatgatcggaaataagaccgaagtcggtttgtatatcgaaaatctggttgcctctgagggggcaacctacatggaagcaacgctacaatggatggatgaaaattctattgattatgcgatgctgaataaaacggttcctcgcgcgatccttgataagattagcgacgaagcgatcaaaggaaacatgcttcgcccatcggttgcgcttgaacatagttcatcaaccactctggacggcttcatgtgagattcaaagctccgtttgctgatagcgaggcgaattcacggcttgtgcctttgtctgtatacaagttatatctggcgatgaaaactcatttccaggggcgttttgatgtccttcaatacaactggcagatcaaagttagtgaaaacgcctttaacaagcgaaaggatagatatttctttgtaaaattagctcaacgctttacattcaaagaaatctattttatattcctctccaacttcgtagccaatccggatttctgggtaggcgatgttgatgaagatagtattgtcttttacaggcagtacataggaaagttacaaagactagataacgtgtttgtggatgacgttaaaaacgtgtacgaattcgccaaaatgaaagagatccccgtgtctctggtgttcaagtacagcgaaaaatcatcaacgtcctacataagcaaacttgtcctgtcaaatgtgatatcttacgaatcgtttttgatttttgactcatttttaggtatcataaataaacacgatcaagtagctgatgatattatttggtctgactttagcattaagttaaaggcatacagaaaaatatttgaccttactgaaaaagatatcataaaatatcgaaacttaatgaaacaaacgttaatcaaactaaactaaacgagaaaacagaatatgagcagcatttttaaacgtcaagatcccgctaaactccaggcacaggtagcaaatctgaaaggtggttccggcttccagaaagatgagaaagaatggaaactgaccctggacgcacagaaaaacggttccgccgttattcgattcctcccagcacgttccgatgatgaactggcgttcgtccgtatcgtgagccactctttcaagaaaaacaaccagtggtacattgagaactgttcctctacccacggcgattatgacggctgtcctgcatgtaagtacatttccgaaaacgatctgtatgagaaggctaaagccaacaaaaacgggccagaagataagctactgagccagatcggtcgtaaacaaagtttctgggctaacgtcctgatcgttaaagacccaggcgctccagaaaacgaaggtaaggtgttcaaataccgcttcggtaagaaaatcatggacaagatcaccgccgcaattaacggtaatccagaacttgatgaaccgggtattgctgtaacctgtccgtttgatggtgctaacttcaccctgaaagcgaaaaaagttggtgattggcctaactatgacgatagctcgtttggtgttccggctaagatcaaaaacatcgacgatgaagaagttcagaaagcaattttcgaaggtatgagcgatctccgcccgattaccgctgaaagcgaatttaaaccgctggctgacctgaccactcgcttcaataaagttatgggtagttcgatcggttctgctggttccagcgcttccgctgaccttgatagcgaactgagcaacttcgataacgaaatggctaagtttgacaatcagacatctgatgtgaaatcatctggtggtgttgcatcggttccggtaggcgaagatgacggcgtaccgttcgatctggatgattctgatagctccggtgatgatgacctggataaactgttagacatgtaatacaagcgggggcttcggcccccactcaaagaattctaagttagagaagaaatatatgaatgaaagtaatgtttttgttgactacatgaaccgcgtccgtaaatcctgggttgctaaactctcggacgaaacaaaagaactgtttaaagctatgcctcaagaggaacgttttaaacactatcgtgacattgatgaaaaagtggttgcggaacatcgtaaacttaccagcgaacgacgcgaagatccgaagcgtacaaccgttaaagaaatggctgatatgcttgacacagcagcggaaaccgttgtaaaatcacttattaagtaacacttattgaaaactaaaggctgaatatgaaattctctaaacaaactattgatatcctgaaaaacttttctcaaatcaactcttcgatcatgctgaccaaaggttcattcatcatgacgaaatcaatcaacagcgttgtatacgcagaagctgaaattgctgatgtgattgatgaagatgttggtatctacgatctcaactcattcctgaacatgctgaacatcgtcggcactgacgcggaaatcactcatgatatttcaactggtgaaattgtgattcgcggcgacaagatgaagatcatcgaacgttcagcagacgcaacaacgatcccgaaaccgaaaaaacgtctggtgatgccagtagcagatctgattttccagattacctctaacgatttcgaaaaactgatcaaagcgtctcgcatgatgaaactgaccgacctgtccgttgaaccgattgatggtaaactggtcatcaccgcgaaaagcaaagaaagtcaatcaactttctccgttgaagtcggtgagtatgaaggcgacaatgttttcaattttgatatgaagattgataacatgcagttcatcaacagcgattacaaagtagagatttcctccaaaggggccgcaaaattctcttctgataacggcgttgcttacgtcgtcgtacttgaagcaagtagcacattcaagtaagatagttttaaggggctacggcccctttcttttacaccatttattttgaaggtatattatggaacttagtgaaaatattgaaatcatcgaaaccaaatacggtaaaatctctcgatctcctgatgaatttgcatgggatcagcgctatcgcccaacaacgattgaagagtgtattttaccttctggtgacaaagccgctatgcggggcataatcaaatctgggcgtgttgagaacatgacccttgtatctgattcccctggcactggtaaaacgaccctcgcgcttgtgttggcccgtgaggttgatgctgaggtgttctttgtcaacggttcgaactgtggtgtaaacttcattcgtaatgaactggatcgttttgcttcatcaatgacgcagaaaccaggcggaaagattatcatcattgatgaattcgatcgttctggtatggcggaagcacagaaacacttgcgtagctttatcgaagcatacagtaaaaacgtttctgttattgtaacagcgaacaacattaacggtgtgcatagtgctctgctttctcgttgtcctcctgttaaattcggtgttccgtctgatgctgaacgtatcgaactgatgaaacagttaatcaagcgttgtttcggtatccttgaaatcgagaatatcaagtatgatcctaaagtcattgcagcgtttgttaaagagcattatccggatgcgcgttctattatcaaagcgattgggttctactcgaaacgtggtgaaattgatgcggggatcctaaatgagatagttggttctgatgtgtctcatatcattaccctgttgaaagaaaagaactataaagggttgcgctctgaggttattaaatatgcgtcagaatacgatacctttatcggaaaattgactgatacgatttaccctatcgtgaatcaggattcgaaaatcgcactgatccagattgtaggcgaaaacaacgcgcaatacgggctggcgatgaataaagaaattcatctgcaatatctgttgatgaacctgatgctttctatggtctgggaggcgtaatcatgagcctggcggaatttctggatgaagaagagttatccccgcatgaatccgcttggctttctaaagattgggataaggttgaagaactggtcaaagagtacggcaaggataaagaaaacaccttgtttaacatcatagacgaaatcaacaacggcaaaacgccgttggttatcgatgaagtgtatgataagtactttgtagacaacgcaatgagccagcacatagacacgatatacaacgcgtatgtgatgaatctggtaggcggtagtatctctgaccaaatgcactataactattatctcaactctgttaggaaggctaaacgcttcggtgcatgggctaaactatcggaagattttgaagagaaaattattatcgaaatccttcgcgaaaaatacagtgtaaatacacgtacagcgatggaatatttgcaggaacttaaagacctcggaatgttcgaggattggaaaagaaaacacgcaaaggtcgctctgtctttgttgggtattgtgaaaaacaaagctgaacaaaagaaattggaaaaattgattaaacaatggtgatgtatgttagaaattcaactaatcagcgacgattcttttttaaagatccgtgaaacgctaacccgtattggtattgcaaacaacaaaaagaaaatgctctggcaatcgtgccacattctgaaaaagcaaggtaagtattttatcgtgcattttaaagaactgttgaaactcgatggtcgtcaagtcgatatgacggaagaagacgaactacgccggaacaacattgcgcgacttctcgaagagtggggcatggttaagatcgtaacccctgggttgaagtttgcagaagaaaacaacttccgcgtactgactcactcgcaaaaagcagattggatcctcaagtacaagtaccggatcggtcactaatcaaaaagcccttgcattcgtgcaggggctttgttatattgggtgtacaccattgagagatatattatgactattaacgaaatcatggattcaatcaaatccaacgaaactttgatcatcccgattgtaaaagatgacatcttgttatcgttaacttgcaatctgtcagatacccgcacttacagctatgcacaacactactttcctggattttacgatcgtaacatttcagagtacacattgttatgcaatcaagttgaaaccactcatttctatgagcgtattaaaaaatctctggacttgatccaacaagcaaaagaagtctttatgaaaagaatggaggacgcgcaatgatccgcacttacatgaataaaattttcgcggcccgtatggataacgttattgatcaacgtgcttatgatgatctggtttcccttgcaacctgtcaactggatgaacatacagtaacggaaaggaaactactggttaacaaagctatcatgatggttaatcagggcattgcagaagcaaaatatcatagtatcaattccagtatttttagcatgttattcgacgggtttaaacttgaacgccagcttgttcaactgagaaagatccgtgacttgttagcagaagggttgttggttttagaacatcgagtaaacttgaatttgctgtaggtggtgttacaatggaacattatattaatggagaagacaagatccaatgaatgaattttacctatcagttgaacaaatgggagataccatttacgagcgcttcgttgactctaacggcaccgaacaggtacgtaagacgaaatatgcgcccgtaatgtatcaacacgctatgaatggcgtagaaaccccatacaaagacatttacggcaagccttgcctcaaaaaacagtttgacagcatcaaagaagctaaaaactggatgcagcgtatgcgcgatgttgggatggaagcgctaggtatggacgattaccgactggcttacatttctgacatgtaccggaatgaaatcgaatacaaccgcgaacacattcgcattgcttctatcgatatcgaggtgaccgctccagaatttccggatccgcgtgaagcaaaatatccaatcgatgcgatcacccattacgatagcattgaagataaattctatgtatacgatctggttgagggtggccttgcggaatggtgcgcggaaaacgttgatcgcaaagacattagcgaagaagatttaaacaaaattgtttatcggtctttccagaccgagaagtcgttattgtctgcgtatatcaaagattggaaagagcgaacccctgttattgtaaccggatggaactctgacaaattcgatattgcatatatcatcacgcgatacctgaacattttcggtcaaaacgtggtaaggcattttagcccgtttggtaaagtaaccgccagaaccactactgacgcttacggcaacgaacaattaggatatgatattttcggcgttgctcaaatggatggtatggcgctgtataagaaattcagctttaccccgcaaccgtcttaccgtctggacgcgatcgcggaatacgaaactggtaaaaataaagttgagtatgaaggttccctgtctgaactacgccagcgcgatcaccaactgtacatcacgtacaacattgttgacgttatccgcgtacttgatatcgacggtaaacgaaactttattgaactggttctgtctgtagcgtactatgcaaaaattaacttcccaggggttatgtctccgctgaaaacgtgggacgcgatcatttataactctctgcgtgaagataaggttgttattccggaaaacagacgccatactaaaaccccttaccctggggcatttgtgaaggatcccgttcctgggccttacaaatacatggtatcgtttgacttaacaagcctgtacccttccatcatccgacaggtgaatatcagccctgaaacgattatgggaagttttgcggtacgtgctcttgaagagtatattaataagaccgcgccgcgccctagcgatgaatttagctgttctcctaacgggtggatgttccgccgtgatatcaaaggcgtgatcccagtagagatcaagaaagtatttgaccagcgtaagatgtggaaaaaacgaatgatggcgggtgagcgaaatcttgaactcatcaagcatgaactcgaacacttaacagacgcgcataaccaaatggttgatcctgactttgatttctatacagatttcagtgatgaatcgaaagcagttctgaaaactcttacaaaacaaatgcttaaagcagttaagcgcgtgtgtgagaagaagatcgcacaagctaacaccgcacagcttaaccgtaagatttctatcaactccctttatggtgcgttgggtaatgaacacttccgatacttcgatctacgaaacgccagcgcgatcaccatgttcgggcagttggctatccagtggattgaacgtaaggtaaacgaataccttaacgacctgtgcggtactacggatcatgcatatgttcggtactgtgacactgactccatttatgtttgcatggataacgtgattgcaaaagttggtggtgaggctaaatttaaggataataaccattgggttgacttcctggatcgctttgctaaagaaagaatggaaccgatgatcgataaagggtatcgtgaactttgcgaatacatgaacaacgtggaacacctgatgtttatggatcgtgaaatcatttctgggcctccgttgggttccgaagggttgggaagtttctggactgctaaaaaacgatatgcggctaacgtgtgggactccgaaggaacccgctatgaaaaaccgaaactgaaaatcatgggtatggaaacacagcgatcgagtactccgacctctgtgaaagtattcctgaaagaagcgatccgccgtatcctgcaagaaggtgaattatctttgcacgaacattataaaaagttcgaagaagaatataaggaacttgactacagggaaattgctggtgtatcatctgctaacaacatttcgaaatatcgtgatggggctggctatccaatcaagggaacaccaaaccatattaaaggggtgctgttctttaaccgtttcactgctggtattgatggtgttacgccaatcatggaaggtgaaaaggtaatggttctaccactaagggataaaaacccgtggcaagccgattgcatcgcgtggcaatccggaaataaactaccgtcagagatcgaaagtgatattctggcatgggtagattatccgggtatgtttgaaaaacatgttattagtccattgactaatatcacggaagtatgtaaaattgattatgaaaaacgtgccagtttaaacgacctgttcggtgactggtaaactctaggggcttcggcccctttcattaactagtgagatatatagaatgagaatgaataaatcggaaaaattaaatgtcaaacaaagcactactaaaaaaactgatcaaaaactcgaatagccaaactgcatctgtactttctgaaagcgacgtattcaacaatattaccatcacgcgaacccgtgtgccgattctgaatctggcgttgtccggtgcgtttaacggtggcctaacttctggtcttacccttttcgctggcccgtccaaacacttcaaatccaacttaggtttgctgactgtagcggcttatctcaaaacgtatgaagatgctgtgtgcctgttctacgattcagaaaaaggtgttactaaatcctatctgaaatcaatgggtgttgatccggatcgtgttgtgtatactcgtatcacgacggtcgagcagttgcgtaatgacgttgtaagccagcttaacgcgcttgaacgcggtgataaggtgattgtattcgttgattcagtaggcaacacggcaagtaaaaaagaacttgctgacgcgctgtctgataacgataaacaggatatgacgcgagcaaaagcattaaaaggtatgttccgtatggttacgccttatctggctgacctggatatcccgatggtttgtatctgtcatacctatgacacacaagaaatgtacagcaagaaagttatttccggtggtactggtttaatgtattccgctgatactgcgatcatcctgggtaaacaacaggtgaaagaaggtactgaggtagtgggttatgatttcatcatgaacatcgaaaaatctcgattcgtgaaagagaaatcaaaattcccgctgcatgttacctatgaaggcggtattagtatgtattctggccttctggatctggcaatggaaatgaactttgtacagaccgtaaccaaaggctggcgcaaccgtgctttcctgaataccgagactggcgaactcgaagttgaagaaaagaaatggcgtgagtcagaaacaaatagcgttgaattctggcgtcctctgtttactcatcaaccattcttgaaagctatcgaagaaaagtataagatccctgatcgtgaaatcagtgatggttccgcgctggaagatttatacagcactgatagcatcccagatcctgatctggatgatgacgatatcccagaatcatttgatgatatcgaagaagacaacgaaattttataaaaactatggggcttcggccccataaccgaggcaatgtatggatatcgagagcaaagcaaagaattatattgatgaagcgatgaaagatgttattcaggaacttctgattaacgatgaaaaaggtgttgcgcatctggtttatattcataaggtgttttgggatcatggtctgaaagtagaattcagtaccccagacgaagacaaagaagcgttgatcccgctggtgcatgatgcaatttatgcacagattaaagagcttgaaaagggttcagttgtcccaaagcctaagctgacattatgggatgtattcaaacaaaaggtttacaactttttcatgatgttcagcaacctggtataaggcaatacaatgatcgttgatacaatattttctaacctgatttataacgggacgtattttgtccaagcatggcctcatctgaaaaaggaatattttgaaggcaatgcacaagttttgtttgacctcattgataaacatgtacaggaattcaacggtattccgtcaaaaactgctttagaggttgcgcttgacaaacgaaatctaagtgatgtagtctacgaagacacgaaaaaggcgattcagtcgctgaaaaatgcgccagaagatttagattggctaatgaaggaaacggaaacatattgcaaagacaaagcaatgtatcgtgctctttctcgcgcaatcgagatccaggctaacgcagaaaaaccactggcagaacagaacaagaaacttcctggtgttggggctatccctgaaatcatggaggaagcattagcaatttcattcgatagttcagtaggtcatgactatttcgaagattatgaaaaacggtggatgctttaccaatcgaaggcgatgaaaattccgtttggtatcccgatcctgaacgcaatcaccaaaggcggcgcggaacgtggtacactgaatatcatcatggctggtgttaacgttggtaaatcactgggcttatgttctcttgcggctgattatctgcaacagggtaaaaacgttctttacatttctatggaaatggcagagcatgtttgctctaagcgtatcgatgctaaccttcttgatgtgactatggatgacatcgacgaagggaacattacatacgcagactataagaacaaaatggagcgccttaaagcgggtaaggttgggcgtttggtggttaagcagtaccctacatcgggtgcaggtgcaaaccactttagagcgcttgtgaaagagcttaaattgaagaaacagtttgttccggatgtgatcattgtcgattacctggggatctgtacttcaacccgtgttaaaggtgctgaaaatacctatattctggttaaagcaattgccgaagaactacgcggtcttgctgttgaaactaataccgtgatgtggacaggcgcacaggttgggcgttctgcatgggatagttcggatgtgagtatgggtgatgttgcggaatccgctggtttacctgctacggctgattttatgttagctgtaatcgagacggaagagttagctgatcagggtatgcaactgttcaagcaaatcaaatcccgttatggtgataagaacactttcaacaagttcaagttggaagttcgcaagggtaatcagcgctggatggataccgacaacagcgaatacgggtttaaatctgactaccacggcaatactatgcctaaaacagtagaacagacacaaggcccgatgattaaacaggctgaatctacccgacgtgaaaaaatggcacagattgcaaaatctgacattcaattttaattgactggggcgaatagccccataaagaatgtaaggtaatgaaatgactaagactataacgattccgattccggctatcaaacttctgactggactgacactgatttttgcagcggctaaagtatttggcttctcgcatatgtcatggttctgggttctcttcccagttctattacccgtctacattgtagtaggcgttgtgttggtgggtgttgcgatctatctgctgttctcactgattgccagtgacaaggccgaagatatgtatcgctgggtaaaagccaaatacgaaaaatttttcaaaaaatcgtaaaaaggtattgacctgaatctccattgtggtaatataactcacgtagacaagatactgagttaaacaaaggagattcaaaatgaacgtattcaacaacccttacaacgaaatgctgaacccgaatgttgatttcagcgatggttattttgacgcaatcgtaaacagcatcaaaaacaaaggtttactgttagcgatgctggaaaaaggcaaagatgacgttgaaggaagtgttgatttcctctggaacttcctccctatcgaacctggtttcaaagttggttgtaatgaggaacaagcgaaaaacgttcttcggtatctcatcaataacgcataaaaattaagccccgaaaggggcttttttgtatctgtaggtattgcattctttcgcaaaagatgataccttaatcataacaaaggaggacattatgaaaatcgcattcgttatcactttcttacttgcagcactcaacatcgtaactggtaattcttttagttggtgggtggtggcaatgccttacattttcgtgtatagcaaaatcatggtgattgctggtgtgaatcttgtccttgctatcttactatttgtattcgccgccctgaatggtgaagcaggttctacctggaaagccatgaaagagggtgttaaagagggtttgaaatgataaatttagatttttgtaaggcagaaatgcaagctgacgcagacgaagaagaaccgaagttcgatagtcctcacagttcgcgctggatcgtagctgttgacgatgaaggttatgttacggtattatctcgaccattcattcatgatgcattctttgaatgtggacgcagcgcggaagatatcgggcttcctgattctgtcgaaatgcctcctggtgtatatgaatggatctgtggttttgaacaaactactgactgggaaaccggatatgtagacggatgggaattctaccctaacgaatcaacattattgtatagctgggaaaatggcaaagttaacgaaagcggaaaccaagaaacacaatcagataatggatctggttcactctgacaaagcgctaacttacgaagagaagttgttcattattgaaaactttcatgaaggcgcgtttacaaacaattctgaattaggggcgttctttacccctattggacttgctcgcgatttcacaatcgatgcttgcacaggtggaagtgttattgacctgtgtgctggtatcggtgggttatctttcgctatggttcattacatgatgtacaatacgccgcgtgaaatcgtctgtgttgagttaaatcacacatactatgagttaggtaagcgtatcgtaccagaagcctcctgggtgcatggagacgccttaacaactgaatttaatcaggtgtttgatatggcgatcagtaatccgccttttggtaaaatcaaaacatctgattttaagggtaagtatacaggggcagaatttgagtataaagtaatcgaacgtgcatcacagatcgcgcgtcagggaactttcataatccctcaaatgtctgcaaatttccggtattcgaaaacacactgtttccgacaagatgacagcaccacatcaagtaaatgcaaaaagtttcttgatgaaactggcctcgttatgaatcctggatgcggtatagatactgggtattacctggaggattggaaaggggttaaaccactatgcgaggttgtttgtatggagtttgaacctgaaaccaaatctgatttattcactttcacaatagagtaataatcatgagtgatcaattagttaaaaatatggatttaacatatagcgtccggatgatccggctactcaaaaagccctggactgaatggactgcttataaactggggatccttgatggacaaggcgaagtaattcgtaaccccaaaacaaaagaagagttagaagcgtattctccttttcatcgttcagtacgccatatcaagcgtagaatgaattctgttccgtatatgactgggtttatgaacttaacaagttcatatgataccctacgcaatcgctacaatctgacagaacaagagcatgaagaaatcatgatgaacgttccgcgcctcaaagaatattatgataaggggcgtatgttagaggatatggtcgctggtgattctggcggcgatatagaaaagattgcttctggtgtgactactggagcagtaaccaacatcgggccgaaagtattaggcgttacccgtgcagggaaaaggaaaaagaaatgataattcctccgctgaatatcactatctgggctactgctaacgattatacatggtttccaatttgtatcatgtatatgagtgacaacgcgaccgtttatcagaatcgtcgaaaaggttctgataaaattgatattgcaataaattattcgtttaaacaggcatttcgtggttggaagttaatgcttgacggaacagaaaagcaagtaagttcttgacagaaaaatcctcttagtctatgatattgaaatcatttgattaggaggatttacaatggcggttggatttggccctgctgacggtgttcaagataccattcaggcaacaatagacaatgcgatagattttgcacgttctcaaatcagaaacggagaatcattaacgcattgttttgattgtggggatccgatacccgaaaaacgtagggctatcgtgaagggttgccgttattgtattgaatgccaaaaagaacatgacgaaatgatcagcgcggggtataatcgacgaggatctaaagatagtcaactgaggtaagaaatgtatcttgatatagaatttgcaacccgaatcatgggatcactgcctcaaagcgaaatcgttcgtaaatcgggggcattaagcatcaatgcgcgttgtcctatttgcggcgactcaatgaaagacaagtacaaaaaacgattttggatctacccttctaaaaagggtgatcatatgaattgtggttgttttaactgtggttatggtgtaccgtttagcgtattcctgaaagaatattatccagacgattaccgtgattatctcatggaatcgtttaaggatcgcaattcgttaaagccaacgcatacagaacaaccgaaggaagagaagaaatttattcctactcttcaattctgcgaaaggttagataccttgccggatgaacatccgatcataaaatatgtgcagaatcgttgtatcccccgtgacaagtgggatcggttgtggtttactcgcgaatggcaacaactggttaatacggtgaatccggatatctatccgatcgcaaaaccagaaccgagattagtgatccctatcttcgataagaaagggaaaattgaatctttccagggtcgtgctttacgcgacggggcaaagtcgaaatatatcacaatcaaagcctgtgaagaatcaaccaagatttacggacaggatacgatagatccgctaaaaacggtttatcttcttgaggggccattagatagcctgtttgttgataatgctggcgctatcactggtggacagcttgcactttctgaggttccgtataaaaatatgcgtgtctgggttcttgacaatgaagcacgtcatccggatactactcaccgcctctttaaattgattgaggctggagaaaaggttgtaatgtgggacaaatgtccgtggccttccaaagatatcaacgaaatgataaaaacggacggcgcaactaaacttgaaattatgcagtatttgaaagataatactgtttctggactcacggcaaaacttcgatttaagtcgtgggacaaatcaccgaaaaaatgagattgatatgactactgataaaactcctgtatttaattcatgtgcgcacctggttaacccggaagatctggaatttgtagattccgaatatcaaaagattctggcccgtaatggtgatcctttacaatccatgctggatttacaaaaccatgcacagcaaagcctgtctgataccctgcattgggttccgcgtccggataatctggaaacttgcggagaaatccttgattggctgaaactgcaagacgacgcgatcgccgacgaaacccgcgaattgtataccgctctgggtggaatgtctcgcggtgttaaacctgcatccggtgtttggaaaccgtggaaagcaaatcaccaggaattgcgcaatactaaatttgcggatctgagtgaagaggatcgtttagaagttctgtttgaacttatcgatcagtggcatttctttatgtgtaaattcctggcgctgggtatggatgcggaaaccatctacaaactgtatgcactgaaacaagccgaaaacctccgccgttgggctaacaactactaatggatccgatcatcgcgctagtagctgttggggttctttcttatggtgtttgcgcgatgatcacatatcttttcggttggtgtgtgtttcacgtaaatggcgttgaaagaaaacttttactgattatactatcagtgttttggtttgttggaatattctacgtttgttatgaggggcgagaatgattacaaaatattatatcgtcgttagtaaggataaagacgggtttaaaattcccttcattaaggaaggagagttaacacctttgttgtttctatctccggacgatgctaacgagtataaaaattcgattatcaaagaatatcatgataagatgaatccagttaaacaaagtggtcttagccgattctttcgaaaggaagaagttgaaaccgtaaccgaaaagaaaaagaaagatatgcgttggtttattgaacacgcaagtattcaaggggtattgattaaagtatgagcgaattaacttttgacgatctgagcgaagaccagaaaaatgcacatgatcgagtgattaaaaatatcagaaacaaaatccatactactatcacaggtgggccgggtgttggtaaaactactctggtaaaatttgtgtttgaaacattgaaaaaactgggtattagtgggatctggttgacagcaccgacgcaccaggctaaaaacgttctctctgaggcggtgggtatggatgcaacgaccattcactcagcactgaaaatcagccccgtaaccaacgaagagttacgagtatttgaacagcaaaaaggcaaaaaagccgctgatctgtctgaatgtcgtgtgtttgtggttgaagaagtatcgatggttgacaaagaactattccgtatcatcaagcgtactattccgagttgtgcggtgatcctgggattgggtgataaggatcagatccgtcctgttaataccgaagggatcaccgagctttcaccgttctttgatgaggaaatttttgatgtcattcgcatggataagattatgcgtcaggcagaaggaaacccaatcatccaggtatcacgcgctatacgcgacggtaagccgttaatgcccctcatgaatggtgaactgggggtaatgaagcacgaaaacgctggcgacttcctgagacgttattttagccgtgttaagactccggatgacctgaacaataaccgtatgtttgcttacactaacgcgaacgtagacaagttaaacacagtgatccgtaaacacttgtacaaaactgatcagccgttcattgttggtgaagtggttgtgatgcaagaaccgttagtgacagaaggccgtgtgaatggggtttcgtttgttgaagttatctataacaacaacgagcaaattaaaatccttgaaatcataccgcgttctgatactatcaaagctgaccgatgcgatccggtacaaatcgattatttcttgatgaaaacagaatcgatgttcgaggatacgaaagcggatattcaggttatcgcggatccggttatgcaggaacgtttaggcgattatttgaactacgtcgcgtttcagtataaaaagatgaaacaggaaaccggatacaaagccccctggtattcgttctggcaaatcaaaaacaagttccagacggttaaggcgcttccggtttgtacgtatcacaaaggtcagggaagcacgtatgatcattcatacatgtatacgcgcgatgcatacgcatacgccgattatgaattgtgtaagcagttgctttatgtaggaactacccgcgcacgattcactgttgattatgtctaagggcttcggccctttgaggttattatgaaaattattgttaaagtcaaagatgtagaaaagattttgcgagaagttgaccgtattggtagagaggggcttgattatctcgaagggttcaattctatcgatatcaatttgttgtttgcaaaattgcgctgcgttgtcaacgcaaacaaagaagttgggttatactgtcctaacgggccgacctacacgtggggaaacatttcacaagatatcgaattcacttttgaagagtatgcagtgatcattgatactttgaaaatgggtcgtaacattcgtgaaaacaaaaacatgcttgaggggttttaaatgaatattcaccttccgcgcctttatgctgaattggttgccgatctgattttgaaaagtgatcgttctacaatggaagattaccacgattgggaacatctggacaatttcgcagaggctgtagaaaacatgatccgactggaaaaatcgattgctcgttgtgggcttcgtcagttcggtatgatggcggtaactccaggcatgatcgaatccgttgatgttactccggaagtcgcgctatcattggcctatttcatggaatcgtataagcggggtcgcgaatgagtcatttacccgtagatttcgtatttgattatgaaagtattggcccgtttccaaaaggaaaactagctgaacttagctatgttccgtttgttgatgatccttatgatccgcctacctttcaggaactgattgctaaaggaagaaagtacaaatttgacatccggaaacaaccagaacgcatcaaagatgaaaaaacgatcgaatggtggaaacagcaatctaaagaagcgcaaagggttttgttcccttccgatattgacatggatttgtacgaaggtcatcgacaattctttgctgatttagcggctgacggtgtgagtcgttggcagtcatacgattatacgcgcggccctgaattcgatcgttctatgctaaccgatgttgtacgaactatgacagggaaacttgatacgtttgaagatatgccgaccgtgttctggaatagccgtgatgtgcgtacagctattgaaaaccgtttactgactcgcggagtgaccacgtgtccactacgtaaaggcatgttagatggattcattcagcatgattcgattcatgattgcgctaaagatgcattgatgctaatctatgctaaacgttatgctctggggctggaagaacctccatccttagaagagacagacgaaaacagcataggaaagaaacgatgatcacattaactattatggatcgccattactacgggaatacgattaacgaagcgaaagcaaaagcctttgatgatatcattaaccaggatctggttaagattgaatctgatcgctatgtcgtgcaaccaggcgatagcctatattctatagcaaagaaactgtatggtgttggtgaactttggcctgatatcgctaaaatcaaccgtgattctattccggatgcacgtctgatccatcctggtatagttcttcgattgccaaaactggtaaaaatttaaaacaaagcccttgacttcggttgagggcttttgttatattgggttctcagaaaggagattgatatgaattttactaaatttgaaatccggctgttgattacgctggctatttgcggagcggtatcattgattagtttgttaacgtatatcgctgtaagaacaacgatatggcttcatgactggtttactgtacttgacacaattaaggggtgatttatgcgtatagcgattattggggcggctttgggtgtaatcggcgaccgtttagtaaactgtatgatcgaagagttaaagtcatcaccctatccattttcgatggaatggaacaaccaatttcctaatttggttggggaagaacccacgatccataaagtcaaaccataccgaaatccggttgtgcctaaatcattgcaccgtcaatcagtaaacaggggtaaatgatgtcagaattcgcgttagctatccttgtcgtggttgttgtaatgggttcgatcctgttttgtcgcatgtatcagttatatgatacacaggaatggttggacattaacgaaaaacagttccgtaagcactttgcaggtgaatttgtttttgtgaaatttcgtagtgactacaaggtcgagtttgagtttgacggaaaagggaacaactaccacataatcacttctgttattgatgcaaagaaaatctttgataagacacagggcggcgggatccgtgaattgctcaaagaaataaaatagcactttttgttaaagaagcctcttgcattgcgggaggctttttggtatcttgtattcatcgaaacgaaacagagaaaggaatacgaaaatggttaaagtaaaatatgcagcacacgttaaagcaggtgagattgttggtttgactttcggtgctgaaattggttctcagtgggcgctggttgaaaaggtagaagacctgggcgataaagtagcaatcactgtgaaaatgcaaaaacgttttactaaccgtcctgtaatcactaagaaagtgaagaaggaaaaacgtgttaatactcagactttcgaagaattcatgaactggtgcaaaatgtataaactggatacctactaatagcactttttgttaaaacattctggggtagctttggtatagttaccccatcgaaacaagggaggaaattattatgatggttaacggttctctttatcaacaagcagttgcacaatggaaacagaaagttcaggatgcagaacgcgggatcgcttattgtgatgaagcgttggcaagcaatcttgaaaactgggaacgcaaagagtacgagaaagttaagcaacgccatttgaacgaactccctgcattaaaagaacacttaaaatatttgatggataacgaaaaaagccttgcatagaataaccatctttgatatagtacttacatcgaaacgaaacacactttaggagatataccatgaacactttcgaaatcctcgcagaaaaagcagcccctttcatggaagcaatgtacaaagcgcgtaacgctcgtttccaagattctcctttcgaaactgttttcgttctggagaaaggccgcaaatatcatcgcgttgttcaggatactcgcaacaaagaaactggtgaaatgttcaatcagcgttctgttgccgctttcatcgataatgatggtaatatcctgaaacctgcaagctggaaagcaccagcaaaaggcattcgtggtaatatcttcaatgacgcagaccgcgcgattgaccaaagcggttatgtggtttatcttcgttaacaaaggggcttcggccctttttcttaaaaggaatatagcatgagtaacaaaaacgaagacgctaaaatctggaaagctgtaggggttatggctgtaatcgctgttgtgggttactatgcgtataattcctggcaagaaacgattgatgcgcaagtacaggaacaacaaaaagccgacgcaatcgaacagcataaccagcttatgcaattgcgctcgctgggatataccacgaaggaagattttaaaaattcctttggtgactataccggatccctttataccgcgtggggaatgactgacggcgattacatgtacattgaaacagatcgttataatgtcccacaaagtgtatgtttctatagtacgccgagagacaacggcaaaatcacgtcatacgcaccagaattcaaaacgatttctgttgatatgaagattgacgggggagaaaccctatcatttgccgctaaaggaaacaacggatccgagcggttgtgtcttctttctcctactcgtttcttacgcaacattcaagacgcgagtaatttaaaaattgctttaccatacatcaaccattatgatattgttgatgtagtaaaagaatggaacgtatcgcaaatcggggtgaaattcaaatgagaaaagcacgtaaaactaatgcagtgttgatgattaacggtgaagtaggaaaaccttgcaccaattctaaattcatgcacattgcagggcttccgggcatgacgcttaaaacgtcgtatgatacccattacaacgaagaaactacttcggtatacatgggagaagatctaatggctgaacgcatcatgcaatgcattcacttccctggtgaacgtccttcaattgattgttatatttttggctaccataaaggtattgtaaatgaatctgtataaagaaaatgatctctatgtttctgcatttggcctactcacgtatcacagtatgtcggctggatacgggaaagagttcgattttgtagcaagcgttaaacgacatttggaacgcagcggcgggttgtctattccgcgccaaatccattatgtttgtaaagaaggggtgtttttgaatggtgttcctcatgtgatccctttcaacgtgtttgaaaactattttacaaaatacgttgttcaacaaacggagacgacatccgagaatactgcaacgcgagaagaaacggcgatcgtacttgataagttttttgaaatagctcataaagtgaagaaacgcacgaagagtgatgtggttcatcacctatcagcggaagttggcgagatcagcgaatgtctcattcagcctcaacgcggcggtaatatcgttgaagaaagtattgatgcgattgtgtgcgcacttgatgtgatttacctggaactgggtactactcacggacggtacgaaattgcaaaaattatcaatgaaatgcttgcagaaaaattagataagtggtatcgtacttgtaaaccttgagtttacttgtgaggattatatcatgttcgtatatcgtgtggaattttcttgttctttctggaatgattgtacagaaaaatggcaaacaaaaagcggcccatatgtcaatcgttatgtgtcaatggatactgctgaatggttggatcaattctgtatgaatcctgatatctatattgatatggatgataaccgacatccagcgccggatgacgataatcgattgatgcgcaaccttgaaaaagataacatagactttcaagcggctgggttatactttggttttcagtcaatacagcgcctttctcgttggttcaatgcatatgaacgcgagtacatgcacaatgttggtttcgtctgcatggtatacgaagttgaaaagttgtatccgggcgcacgtcaatgtgtttttgacatagacaaagcccgtttagttaagatgttaagtttaaaagagatttattaatgcctacctatacctataaatgcaccaagtgtaataaagaatttccaaaaatggcaagcattgctacccgtgatgcaccgaaagattgcgattgcggaggcgaagcaaaacgaacggttgataaacctcaaatggttcgtgatggtttcccttataacaagtaaaccccgaaaggggttttctttttcatagaaccctatataatgtcagtgattaaacaaagaggtgaatatgagtttagattttcttctggcagatgatgaaccagaacagaaaccacaaccagccaaaaaaggcgcaaaggttgacgaatcattttgtatgagcgatcgcgatcatattcggttgcgtccaaatatgtacgtcggatcggttaacaaagaagcgcatgaacgtttcataatgggccaatatcgcaaggttgagtacgtggaagggttggttaaaatcatcaacgaaatccttgataactcgattgatgaagcgatccgaactgaattcaaacatgctaataagattgatgtaaccattgatcataatctggttaaaatctctgataacgggcgcggtattccccaggatgatgtaaaaaccccagatgggaaaatagttcctaaaccagttgcggcatggactatggcaaaatcgggttctaacttcgatgataaaaaccgcgtaacgatgggtatgaatggtgttggttctttcctgacaaactgttatagctcgatttttattggcgagactgcaaacgggaaacgcaaagtaaccattaactgtacggacggcgcacagaacatcgattaccgaaccagccccagtaaagaacagggtactactgttaagtttactccagacttctctatgtttggtgtaactggtatcgatgaagaaaccaaagaagtgattaaggatcgcttaatggcccttgccgttgctttcccgtctgtgaaattcacatataacggcgaaacgctctctaatcgcttcccgctgtacgcttccatgtatggggataaaaccattgtccagacaaataatcgcctcagcttcattctggcgagcactgaggacgggtttaaacagaaatcctttgttaacggtctggatacgaaaaacggcggtgttcatgttgagtgtatgattgatggtatctattctgaacttgaaccgatgatcaagaaaaagcatagtatcgagatcccgaaagcacgtgtaaaagaatgcttaactcttgtggtattcctgcataactttaatgcacctgcattcgatagccaaacaaaagagcgattagcaaatacagcaggtgagtttaacaatcatgcgaatttgaactacaaaaagatcgcaaaaatgattatggataccccagaaatcattactccgatcattgaatccgcattgattcgtaaacaagcagcagaagccgccgcgatcaccaaagcgaaaaagaaagcgaaaaaggcaaaaattgctaaacacgttccggcttccggtattgatacccctggggtagaaacaacattgtttctgacagaaggcgattccgctgttggtcagttcatcgaatgccgtaatgaagaaacacaaggcgctttcccgctacgtggtaagcctctgaatacatggggtatgagttttacagacattatcaaaaacaaagaactgtttgaactaatggctatcctcaatattcatcctggcgatacttccggaatgacttatgataatatcggtatcatggtcgatgctgacgttgacggcggtgatatcttaaccctgttgcttgcattctttagccgttggccttctttgttcacagagaaacggatccgatatattcgaaccccgatcgttatcgctaaagttgggagcgaggaaaaatggttctattctcttgatgagtttgcaccgttccgcgataaagcaaaagatgtacgatatatcaaggggctgggttctttacgcaaagaagattacgatcgtgttctgggtgatcagttgaagtatgatgtcatcgtacttgacgacgaatacaaagaagtgttagaactatgcttcggcgacgaatctgatccgcgtaaagattgggttaatggaaaacacaaattttctaaggttgactaatggaaagaagtattaaagatgttgtacaggtggaagggctaacgtttgccctttacacgatttattcacgtgcgatcccgcacctggtagacgggtttaaacccgttcaccgtttctttattcactctgctatgcagggcggaacgggatttcagaaagtagcttctatcgctggcggtgttgctatgtatgggtatcaccacggggaaacctctgtagaagaagcgttatcccttatggcggcgcactggtgcaataacattccgttattcgaccgtgatgggttctttggttcccgtttggttaagaaacctggcgcacctcgttacatcaagtgcaaactatcgccaatattcaaagcaatttatatggatggtgatttaacgccagttcatgaagatccggaacatgtgccgccagcttactatctcccgatcatcccgatggtactggttaacgggtttagcgggattgcaaaagcatatgcaacaaacattccgcctcatgatcctaaatcggttgttaacgggtgcattgcatatctgaatgataaagatttcacactggatctgaaatacccttactttaaaggtgaaatcacagacgggacaatttacggcacgtatgaattgcaaggtaaaaccaaattggtgatcaccgagatcccagtgaagtatgaccgtgtgaaatacattgcaatccttgacaagctggaagaaaaaggcgttatcgttagctacaaggatctatcgaaagaagattttcgttatgaagtaacgctcaagcgagagtatgccaatgggttaacccgcgaaaagatcctgaaagatttcgggttgattgaaaattcaaacccaaacattaacgttatctttgagggcaaactatactcatatgaacgccctgaaacgcttctaaaggatttcgttgatattcgtatgaatgtatatcaacagcgtatcaataagcgtatccaggaaactaaggaagcgttagataaagcactggcaaaggttgcgtttattgctcaaatggtagaatctcctgattctctgcgtggccttagtcgcagcgaagcggttaaattcgtgtctacgtggataggttgcgagaatcatgccgaaatgttagtggctatgaacatctaccatctaaccacggacgaaagcaaaaagctggaagacgaagccgaagaattgcggaaacagttgaaatactgggaagaaacaacccctaaaattgagtatctcaatgatttaaaagaactttctaagaagttgaaataataacaaagcctcttgcaatgcagggggctttttgctatattggttttgtaccaagcaaaggagattctaaaatgttgaaaactcgtagtgcaatggaagtaacccactgggcgcgtaccatgatggaaaaacacggtttgatcagtaatggttggacattccggatcaatggacgcattacaaaaactctgggccgttgcagttataccaaaaaactgatcgaactatctggtcgtcatgttgcggaagatatctacgaggatattttagacactcttttacacgaaatcgctcatgctcttgtcgggcgcggttatggacatggtaaagtgtggcaagctatggccttgcgcctgggtgctaaaccttcaccgagtaaaacaactacaaaggatgctaatctggttgataagaatgagatcctttactgtttgttcatgaaagattatcaaggccgtgaagtctatcaggctaaagctgataagaagttttacaacgatgtgatgaacggtgttaaggatatgaaaaacatttggatcagtgggcgcaaggcatatacaaaaggccgtctgtatatccgtccagtaacccatgaagaacttgcatacattcgcaaagaggggtaaggtatgacacgttgtaatgcgcctaagttgggaaaatatctgaccatattcggattttgtgcgttcttttctatcattatcggggctatcgtgtggggtatacttgatatgaagaaacagcaggtcgaggaagaaaaattagtaaaattccttgacacatattgcgaagtagtagaatatggcctgaacaaaaagccaacgaagtactcttgtgaccaagttatttttaatgttaagtgagaaataaacaatgaaattacgcgaagatacaccgcaaacaatctaccgagttggtacagataccagcaagggacgaaacaaactatctctacgcgcaaacaagaaagcgtataagatcctttcttcgacagtatacaaatacaagatccgcgcaatcattcgcgaactgtcttgtaatgcgatcgatggacacaaagaagcgggaaatcagaacccgtttgatgtccagttgccaactgctgttgatcctcgttttgttattcgtgactacgggatcggtatgtctcctgatttcgttagtgatgcgtttaccgtttacttcgaatcaactaaaaatgattcaaacgacctgatcggttctatgggtctgggttgcaaatctccgctttgctatgccgatgcgttcacagttgaatctgtaaaagacggtatcaaatgcggttacacaatctatatggatgatggggaaccgttctgcgatcctctgtatgagattgaaagtgatgaacctaacggggttactatcactgttccggttaaagttgaagatatcaaagaatgggaaaacgaagcagcaagggtatacgaatcatttactgatattcgtcctaactttgttggtgcttctattctcaaaatcaactatcagccgaaagaagcaaccaacgatagcggggtgatccgtcataaatcagcatacactagcggtgtatatgctcgcatgggtaacatcatttatcctctggataaagatttgtatgatacctcgatgttctattgctatacagaaagccagtatacgtatattattgacttcccaatcggtgaacttgatttcatgccttctcgcgaagagttgagtatggataaaatgacagtagggattgttaaagaacgtctgaaacaaatcagccgggtgtatttcaatcgagttaaatcagaattcgataagttacaaaccgttcgtgataaactgacgtggttccattctctgccttcaatggtacaaaactttgttggtaaagatgctaattttcgcatcaacggtgattctattggctggatccatagcgaactagtcaaacccaacaaatataatgatgattatattgctgggtattgggcgaacgaatacgacggtaaagatgcatggtatcaggtaacgggtagcggaggccgctggagcaagtataagccagaaacaaccaaacgccaggacatcacacgcatttattatccgtggaaacagaagaaactcattctgttaaaagtggataccaacacggttaaaccgtatatcgtcgggtatgctaaaatgcataacctaagccgtgttagctttgttgcatattacgatagtgattcaaagcgtgagattgttaatgatatcgttcggaaaggtcattttgatgaatcggaaattgtgtatctccgtaccagtgaaatgacaaaagaaaaagagatctatgatgcagatcgcgaaaaatcaaaagcgctatatgcaccgaaaaattcagaaccgcgcccaaaaaccccgaccgtatatcgttatgagttggatagtaacggcaatctggcaaaaacttctctgtttatgacaaaatcagagtttttatcactggataaagccccaggtgttcggttgtatggtattgatgaatatagccgcttagatggtgaaaattccaggttgtctatggattcagcaatgaaagaatctactttatcgcgtatcatgcgccatactgggatccctgttgtgtttgctatccgtaacagcctctggaagtggatcccggattcaaatctggtatgctttgatgatatgctgtgcaagcagtatgttaaatccgaaaaggcattgaaagataattgcttgcctggatggattggcaaggaacactcaacagaaacaaacgcattgcatagccgttttggtgtatcgcttgatcggattgtgaaaaaccgatataatgaaaaactgtataagattgttgataccctcgaacttatagtgtgtctggaagggtatgagaaagatggtaaaaatctttccagggcgcgttgtccgattctgcgtgaatctgtagcatcaatgcgcgttaaacgcagcaatatgaaaaaacgtgttgatcaggcatgggaaatctttaaatcactaaacccgttactggcttcacttgttgaacatagcgattcttattcaattcgtccgatttacaacaacgaaaagaatctcagtgagtttaagaaattaatacggtggaaataatggtcaaaattcttgacgaagtacaacagaaagctatctataatggatggttgacgggggcaagtaaaacagcactggcccaacagttcaacgtaagcgcccgaaccattgggcgcgttatcaaccgcaagttagcggaattccctaagaaaagggatgtaaaacaaaagcctaaagtatcagacactgtaccgcgtatgatcggatctgaatcgttcattacggttgtatacgaagggcgcgttttcatggcgggtgaaacacatccgaactttaagaaagcgcatgaaatgctgaaagctggtgatgtcaaaggtgctgtaacttgtttggatactcaagaagcgatccgaacctatagcaaaggcaacattaaaatcattggtcatcagcttctatataaagatgtagtgtttgattctgatatcactcaacgaatcattcgcgaaatgtataacgatcgtccgtatgaacacctggtaaacttctttgaacggttgatgcgaaacccttcacgcgatgcggtataccagctttacgggttccttgtacataatgacattgaactgaccgatgatggttgttttcttgcctggaaacgtgtacgcgataactataaagatctcgctactggcaaatttgataatagtcctggtgtgactgtctccatgcctcgaaacatggtagacgaagataaaacgcgcacctgttctactggcctacacgttgcggctaaatcataccttccacactacgggggcggtgttggtagagtcattcaggtaaaggtggatcctgctgacgtggtagcgatcccagtggattacaataacgcaaagatgcgtgtatgccgttataaagtcatgattgatgttacatatggttttagccattactaactaaacaaccgcgcctggagagttctgggcgcataggagactatcatgaaatttaaaaacatgccttcggctaacgaaacccgcgctagtggtgaatctattctcaaaaccgcccgtgaaatgtgggccgacgaccgggtagaatccgggaaaggttacgtatttcgtaaaggatttggtgcattttatgttgcaaccacctttatagtagggtatagttgtttaggaatcgcgtggatgcaacgatatcttgaacgtgctgttctttttgtgatacgttttctgtttacattgatcagcgtagtgattagcatcccatttctgagcatcgccttgtttgttaacgtaaaaacaggcgaaattacaaaattaggcaaactggtatctaaaaaatatgaaaagaattctgacaagacttgacattcacaaatacgcaattaaaattggtgacatgaaacgcggaaccttcaagaaattcgaaggtgtggatctgaaagaaaacgggttttacctggtagttgatgataaaacagggcgcgtagtattccgtttctacgtagcaccaaatcaacgccgtaaaactggtgctagtcgtactctgttacgtatcaagcgccgcgaacacgaaccgtctgcgatggttgcgatgctggaaagtgcttctctgtactatgtagcacatgacaaaatcaaaaacctgttcggtttcccgaacctcaacggatcaacgttcgaaagtgctattcaaatgcgttatggtgctggtgaaaactacaccgagtggaaccgcgcactgaatgacatttatgattttgaattccagccgtattgatgtatactgattaaaactaaccaattgagataaattatgaaactgtttaataaaattcgttctgtagatgaaatcgtagcaactttcgacaaaaccctgtctgaactggaagcgcgtattgctcacgataatgagcaggttgcacaggttgcagcagatcgccaagcagcagaagaagaacatcagcgtaagctggctgaactggctaccaaagaaagcaatcataccgaaagcgcaacccgtgccggacgtatcgcagacaagatccgcaaattgctggattaattctctaaaatggggctgaaaagccccaataaggaaaataatatatgtttgtaatttcttcgtactatgattcgcgtcaacgagtatcgctgtcttctatttccaaagcaccaaaagatatagatgacttcggattgcttaacttcgtcaaaaaagaaatcgaccgcgttgttccagaaaaatacagaattgttaaaggatctgatagcttaactatcgtaaaactgtatggtgaagtcagtattcaacatcatgtgccattatatcctcgatgaacaatctggtagcgaaacatgcatggattaaccgcgcttctactcaccgcgatcgcaagcgagcacttaaagaagcaaaacgtaaacagaaacataaaggtaagtgtgatgaaaaccgctttgattattcttgaggaaatcccagaaaacacggggctgtatctcgttgaagccgacgaagatatcattgaaatcctcaaaaccgctcacgggcattatgtgaacggatgcaacaacaccccagaacaggatcgcgctgtcgatatcgttaacctcatgttagggccgcgtacagacgacaacctggcatgggcgagtgaatccaacattcctcatgagtatgtcgggatgtattatcagtgcaacgttgatgcagatgtgccactgataccggaaaaacagatcgatttagtagttagaacagggttcttcttatgagtatacaaattctgttcagtaaagaagatccattaggtacggaatcatcggttcagcgcttattctggcatacagattatataaaaaatcgatgtcgtggcccaaacaacacatggggaagcaacaacgatattgacaaagcaaaaatttatcctcgcggaaaggcgtactggaaaatttttgatattcatcttcataaaacaatgaaagattcgaatgaatgatgaaaaagcccttgacttcggtcaggggcttttgctatattagccatatcgaaacgagataccctttaaggagaaataccatgactaacgcaaccgtagttactaccacttacttcatttcttctggtcgtaaaaatgcaatgtacaccttgcgtgttgagcgtagaggtggcggttatacttctgataactatatctgcaacttatctaccgatccggagaaagcggaagcgaaagcgcgtgagtatttcgaccgtgtttcagcccgtttaactgaaactgatactttcaaaatggtattccagggctttgcagatttcgatctgttcgaacgtcgcggtaaactgtcagtgttcgatactgaaaaactggaactgctggaaaaagggatcatgccgattggcaagcgtaaaggcgaagtaattgcagaaatgccaatgtttactgttctttggtgggctgaccagtctaaagaagacaacaaaaacagccctgtatttgacgccgtgtgcgcttactgcatgggtgttgcactggagaaggattatatcgccaaacgcgaagaaatccgcgaacagtgggaacaagagcgccaggaacgcatttctaaagctaaccacatcggtgaaatcaaacaacgtctggaaatgaccggaaccgttgagaaagtgatttcactgggatatactcaagtttcttactacacttctgtagaaaggttcatgaccaaaattaatgttgatggtaatgttgttgtttacttcggtaataacattgcaaacgaaggtgatgaaatcacgttcaaagcaaccgttaaagagcacggagaatacaaagacgttaaacaaaccatcgttcaacgtgtaaaggttttataatgacatacgaagatatgcttaatgaagtgtgcgcgggtaaaaccgcgtaccgcactaccaaccctgatatgattgtgtttcgtgaaggggatacaatcatcagacgtacacaccgcaagtgtgaagtaaaccaggtattcattgccacggtagaagaacaaaaggctactgattgggatatcgtcattgacgaagaaaaccacgatgagctagatcatccgatattcattttgagtgaaactatcggaattcgaccattcatgcatagaaatttttgggggaatctatgacgttcgatgaggctatgagagccgctaagagaggttgtaaagttgcgccaataggtaggccattcttcgtgtattatcacgacagcgctggatacaggcgggttacgttgggggtttcggcaaggaatgaagattatgttccggatccgtgggacaaattgaaagtctgggatatttacgagaaaaatagcccggtgatgaacttctttaaagcaatcaaacgggctattggaagaacacacaatttaacaccagcattacgttaatcacctcactcgacctaaaatacgcgcggcctgtccacatatgatgtttagcttcatatctggtatattaggccgctttgcgtaccattccatcaaaaccgatccagaatagtagttatcaagattaaaataagggcaactaaaagtataagctactggcacaaaaccacgtgtcggtaggtaggaacttgctttagtggatgaataatacaagccatttatatgattcgtgtattcttcggatgttttatcgatcggataaccgccgaggtttttaggatcgatctgggatggtagttttccctgatattctacaatgtcaacaaaatagtttatattctttggtctgaatgccaataccgctgaaaaatccgcgttggaagtaagatgaactatgctcaactgttccaacgcggattgattaaacttttcagttctttccatttcgatagcccttgtatcgactacaagggcaccttttatcatcgggaatatatcagtccatttgtaccaagttactaccataagaaacataaccattattagaattatttttatcagcaattgtttccatgttttcacacccatcacaaacgagattacccgatcaaataaggctagtttatctacgggatttctctcagccatttttataagactcttcttaggttactatacgtatatttaggatacaacaaaaaggctacctgtatggtagccttttaatctatttaatattatgaggtgaatttgttggtttacctatcaaacatattctaataaagcaccaaactggttattcattctagcctcaaaatacccattgagacctccagcatcttcacacctatatcttctccaaccatcactcatagtagttccgctgaaataaacatcatactggtctccacctgctgcattaaatatagacactttaactcgcctatcttgaccattccaaatagaaaggcaataagggtcgcctttgatatttgtaatagctactagtgaacccacatctccgccagggaacgcattcagcgtcggttggttagccgagtctcctatgtttactgctaaccctcttttaaagaatcctctatatctagatggatcgccagaagaaccttgcgcatagttaattctgaaaattaaatggaatacgctttgtccaatcatattagacatccaaaacggtgtccctattcttaatttggccccagcttgagccatccacgactcaccagtttcagcctttgctgaacttccgacccacggccctgttactgccatagttatttctcctaaaagatggggccgaagccccatgcattatttagatttaagttcttcaatttctgctttaagatttttaacttcggcagaaagctctttaacagattcaacaagaagtgcaattactgagttataattcagacgaagcataccgccatcttcttcattatcttgagtaactgcttccggtaagatttcttgaacttcctgagcaatcaacccagcagaacgagtagtaccgccagaagtgttatgaagttcataagtattaccagataatgtttcaaccttttctaaagcattttcaataactttgatatccgatttggctctacggtcagaacgaatctcaacgttatcaaaagaaccgttacgagtacagaagaagtcaccgccggccctgaaatagaaattgtcatctcgaccatatccgttaacattaagaatagcctggtgataatttcctacatattcttggaagtataaggaaacataagcaccattactaaatctacttgttaagccagcggtatttaaatacgcgccacttccgccgccagggtaattagtagtactattaacaccattaaagttactaatagcacctgggaattggcaagaaccactgttccagaaattccacgttggcccagagacaccacctgctcttatactaacgctaccaggctcatcagcccaaataagtcctttttctgtaccatcagctttacggaagaccaaatgactgttaccagtgttctggacgttaaccgaagttgatacaatgaactcttgattaaatctagcccttccatcaacagttaaaacaccattaacagcagcgtctcccgtaacccaaagtgatgtagtttttaactggtttccagtgatatctacttttcctgatacagtcaagtctccgttaacagcaccaccagtacaagttaatgtaccgttggcgttaatattaccgttaaccgtgatactaccgtttgcatcaatacgggtttcgtttgtgctggatgcatcaccttgcggtcgcagatagattgattgacctgctttagcagaaataatcaaatcaccgccgttattagcacgaattttagcgccttgttcatactcgatcgcagtatcaccaccacttccagaggtagcagttactttgatcctgttgttggtttgagttgggccaccaggacgcaattcaacagcattaccaccaccagaactaccaataatcacacgaccatcagtagtttctaacagagcactacctttgccaatcacaacacctttatcagcgtatttcgtggaagaagcaccacctaaccctaagttaccacctacgcgagcgttgttagcaacaatcagatcatttccgctgttcaggtttcctgtagtcgtggtaacagatttaaatgatacatcatcatcgtttccgctaacgacgttcattctccacggtgtccaggttttagtagtaccgctaacatttaaccaacgttcccaactgagtttactatcagatgtgcgtaatacttgacggttagtgtaatcggtatcgtttattttgcggagacattcaacaataacaataaagttaccaccgacgccagaaggtttattggtgatgttattaccgccacccatactagggcatgaataaactttaacatggcctggggtagcgccagttagcgttaaatcattaagatctagtttaacatcagccaaatcatacgctgcgacagggccagcaaatccaccagtcgaattaaccacaccagcaacgttaatatcacgaccaaagttaacaatccatctgtttactgtatccgaagtcaacagccatgcgttgtttgtctggttttctgcttcaccgtaacgaatatcaccgtttacatcaatacccaaacgtttcatgttcattccggaaagtttgaatccgatagacaagttcgagtcagtcgatctattcagtaacagcggagtgtgctgcgaaccactaatagtaacggtttgttcggttgtggttgaacttgtgttattaaagttcgcatactgagtgttgatacttttaccgttgaaagcaccgctggtgatatttacatcacctggtgatgtaaatgtaccgtcagatttaaatttgaactcgccgcctgtgaccccagcagtcgttctagcacgaattcgaacctcacccgaagactcggtgttaggtattgcccatacagcacctgtctcaactcctttgtttctaaaccaaattacagagtttccggtatcattagtggcattcaaaaataacccaggtgactctttactgataagcaaatcaccagacattgtatcaccggcttttttaacctgagcgtcatttgtcagattaccaagccctacgtcggccttagacggtttatttgctgtaccgtaaagttcgttgtatttgacatctcctgcggcaagagccgcgttgttagccgcgtatacacgaactttagcactagcatagtcgatattaatggctgacatggtatcaccagcattcataaaaataccagagccatgactataaagaccattttgaacgctaacaccagatttagtaacaccacgccagaaagtaccgccgtatgattttaagcgggtcaacatatccgcattagagataatgtcgttgatggatttaccaccattaccgcctaagccataagcgccattttctaaaacattaccagcaccttcgccgacatcacgggttgcagcagtacccaaccctaagtttgtacgagcagcatccgctgtacttgcacctgtaccacctttagcaatagacagaataccatcagtaccattgtcaaggttaggtttattaatttcgtcatagatacgaatagccacactctcaactaaaccttcgggcgcagttgaagtagtcgtgtaaccgttaggcagataatattcagtaccgccagcaatagacagcagagcaactttaacactactaatgaatgcgcgttgcataaaccacagttctaaaccctcagaggtacgaaccagactataacgcatttggttagtgttatcaattccaggatcaccgattcgacgaacctgtagatgattacgaatattagcgcttgttaaagtggatggaaagtttctagcgctacaatcgataaagtcgatagatccacgcgtagaaccatagttaccgccgttagtcaccattaattgcaggcgactctggtttgatccaggatcttttaaaagagcaactttagtccaccgagcttcggtgcctgaagatatagggaaattatcttgctcaagctgacgcgcgttttctacattagtcagaagagtaccatctttaccagggccttttccactcatggcataataaacctggtaatttctgaacgacagattaccatcattagttaattgaagaacacccgagcctctcaagtttttaatatagacatcgttagctcctacacccatttctaacgtaagagtgcttccattactaattttaacggttttattagtggataatcttaaatccccaggaagagtagtattaccagagctatcaagtaagactaattttctggcttctacgttaccagcaccgcgttgtacaaactggattgtttcagtaccatcgtcaatagtaccgatttcaagaatgccgttattgcttgtaccaccggaaccgatgtaccatccatcattgctggcacatttaccgacgatatgacgagttatttcaccacttaaattctcgttggtgaaagtaatagttttaccttccgctacggtaacggtatcattaagagcactaggcccatcaactgttaattttttggtatttgtttctgggatacctttacccgctaactgaacgatcgaagaaccatttttcgtgtaaatggcataatcagccatgttgatcgccagttcaccatctgcaagctgacttgtagtaggtgttttccccgcaactgtgctacgtaggaattgaattttttctaaatcagccatgtttcaccttaataagatccaaaatctatgatagtccctttagtaattacctggtcgagccgtggtacgtgttcgggacgggaagccgcgcctgtgctcgcgaattgcggggcagttaacagccctgtcattgtatcgccagcgcgtaataccctgctattagcatttgttgtgacattatttatctgtccatcaacataactttttcgtgttgcatgacttgcgtcagtagggttagcggttgtaatactgatttgcttttcaaccgtaatattaccctgagtgtttaaatcaccatttcgagcgttgatgactaatacgcgaccattagtaccggaagatgaacgaataccaataccataccatgatacaagatcaatgttggcttttgataatgtcgcgccatcaccatcaccagaatataaaccgttctggtcacttccgcctgtgaaagtagcgttaatttgtagcccctgtttaaaggcaactacacccaaatattgaccaccgcttgctttagaaacgaagtcgttatttgatgcttgcggtttatcgttttcagtataaaccttatatccgcgataggttagagtattaccaaccggaaccagcggaaatgtgccggagtgccaaataggtaaacccccgactgtagaaccagcttttaaatctgccataataacccctttttacatatttataaggcccgatgatccgggcctttgtttatgcatcaacttcacggaattcggaagcagaataatcgccaccaggataaaccttagtattcggcaattcaaatatatacggtgttccaccatcgatcatgttgttcattctgataccgttaaccccaaactgtgcagcaaagttttgatcggcttcggcagcagatacctgaaccatcacgaagttacggatcgcagataaactatccgtagcgggtttaggataacgagatacagcaacgttaaatccatcacaaccactagggatcgtatagaactgttcaaatcgtaaccactcatcaggtttatttgcaggaacttcaatcaccgatgatgaagtttgagcagtacccgtaaaccatcgaacagtaacccttgttgttgatccagcatccaatagttctttacttgcgtaaaaatcaccagtaatcatcatagccaatccaggagccataccgtaatcagctagtttagagatcactgggtttgcaacaggatatactttatattcagatccattggttgaattgtattcttccgtatcttcaacagatctgaaaggtacaccagttcgaccaacatcaccaacgttatcatagacaaggtcgattgatgcgcgtgaatcttcttttaaaattccatcgttagcgtaaaacgattcaatcagtatacgagattttgcggccccatacaatgcaacatatgcagaatttgggaatctctgagcgaaatcagcgccttgccacataacggatctgtttttagcaaaccaatcatcaacgatttggcttgttttgtattcaccgttagtcattatcaaatacagcccagaaggttgagcatccatatattcaacaaacgctttgtttgcagttgctgaattatcattcgataatgtgaaggttttaattggatcaactacagcattgttaattctccatacgttgatcccgacactaggcggtgtccctaccgccttttgatttagtgtaaactcatactgattaggaaccgcattgggatgtgttgcctttgcggttattctgtaagttacgctgtttgtttccgatagaatttgcgtttctacaaaatcggggccgaaccccgccattaagtttgacattatgccacccactcaaatttaactgtctgagtaactggatctgggtaaatcttaacgttaccaactttgatccaatcggtaacagtcatgtttttaaccgtagtaccaacagcagacgttgcaccaatctcaccagcagtaggcgggttgttgctagtatacatgcggccccaaccatcaaatttacccgtgattgggttcatttgacggatccagaaggattgcgccagcgcatcaacaccagtaccagaggtcggacgaggtgcccaaatctgataagtgaatgcagttccgttaccaaactgcgttaaagtacccggtgctttaacataggtataacgggtcacaatcatgatttctggattaatcggatctggttcaagaaccggaaccgcataaccaggaagcaagttgtattgtgccgatgctgtgatctcagccgtccagttgcccctagatgcttctgttactgcatccagcgttgaccaagccgcttgacctgcgatgataattgaactgttgtttactgtcaaccgtccagacatcgtatcacctgctttgcgtacatacgtagggttaagcaaggtttgcgcgttcttctcagtaaagactttataagagttcgcagattcttccgctacgatgttgccagcatcagaggtcaggatcttagttgtcttgttgttcgtacccatagatagaacagaaccagcagcagtgatcacggtatcattacccagagtcactttgctaatcgcctgaatttcaggagcctggaatttaacgttagctacaacgccgcgagtatcattatacacagaaagatgaactgtgctagtgttacccgttgagatcattgcaatacgcccagaggctgaacttgcttgaattgaccagtcgttagatgaaccaccattcaaacgaagtttacccattgacgaaccatcaccaacgttcagatctccattaacattcattacgcggaatgttgcatcagcgcttgaatcaatgttggcctgtacagtggttgttctcgttagagtcaacgccccgttgaccgtctgatcaacatcacgacgaatgaactgggaagaatccaggttatccagcttatcagcatcaaccgctttagccccgatcggcagataatgtttcagcgtcaggttcaattcataaggagaaacagcaacacctacagcggcataaccatcatccggaagagtagaaccagccacatcattaccagaccaagtaccaagccccttagacagtttcacagtaccgcgtaccagatcggtagcttgccatgaagtatcaacctgaattgtatttttcaagttcttaggagaaacagccttgtttgtgacggtgccagcagtagtttcagcagccgtagccacctgaatgataccttctgcgctctcagtcgctttcttagcgtgtaacttcttaggggtaacaaatactgtatctaatgtccctgcgttcgtctcagactgcgtagcaacgcgtaaagtaccacgttgagtttcagttgctgattgaataccgatgttaaccgtagtccaaatagtcccagattgagttaacccgtcagcagtagcaacagtaatatggcttgtatcgtccagataacctttcagtttagacggtacgatcgctttattcgttacagtacctgctgatacttcggcagcggttgcaattgcaataatacccgtcagcgtttccgttgcagcacgatcattaagcgttttaggcgttaccgctcgcgtgtaatcagtaccagcgtttgtttctgtctgagttgcaatctcgatcaaaccaatacgaccatcagtagaggttttcttgtgcagcatttccggagtaacaacggtcggaacgtttgaacttgcaacagtaccgttaataacttcggtttcagaagccagccatacaacaccagattgtaactgagtcgctttatactcacgaagagttttaggcgttaccgctttctgataatctgaatggtcataaaccccagtaccagcctgagaacgatccgtgttggtgttaggagcaccaccagtagcaacaagggcaaggataccagtcaaggtcggcgatgcaatacggttatgcaactttttaggggttacaatagtaatatcatcggtgcttccgttggtttctgcctgagttgcgatttctgccagcccacgacgggtttcagttgctgttctttcgttcagcttcttaggagtaacaatcacatcatccagataggtatcggttgaaagtttgttaacctcagcagttgtcgctaaacgcgcaataccacgacgggtttcagtagcagttttatttgctaacgtcatcggagtaatagcggtttcgtcgttagggttatcttccaagtttttgtttacttctgcctgtgcagccagagcaataacaccagtacgcgatctgttagttgcatcaacacgttcaacgattggacgataattagcaacaacccattctttcgtagctttcagataagaaaactcgatatacgggaggtaatcactgccagcattaaaagctaatgaagttacactaaaccaatcattaggcggataatctttgcgctgcgggaactgcatcatatttttgttggtgcggatcttgtccgttgtaccatctttaactttgattgtacagttctggtttttacccatcatataaagggatacgtaaacgcgatcaccatcagcaacatcagttggaagggtaacagtaacgtttggtatagtcccagaagggtttgcagtaacaaaaacgtaatcattaggaaccgcgtttaaatcactgtagatacgacgcagacgaacacggttatcagcatcatatactttccattggctattctgtgcatcaaagatgaacataccaaagccggatttctggctacttaccgaagtaacaccagtacttgcaccatcagtaatagtgtgtccactacctggataaatctgcaaaacggctacgttgatagagttcattttatcagcgtcataggttgtgatcacatcaccatcatttgcatatttcggcaactggagagtgattttacctgtagcactgttacggaaaactgtcatgccagattgtaactggaatgaacctgttccggttgcgttcacgatctcagaatcgcggttatccagagtttcagcaacacgccatacgttaccgttatagataaacgttgcgatcatgtacgggtgagtcagtctatactgtgctgattgtacagtacgtaaacggatctgacgggtgttagacttaacaaggatactgttcacacctactaaaccaccgcaatctttaaacgtgattacgtcgccctctgtcgggttgtccggcaacaggtacagaagttcagtaaagcgtccatcagccataatgtaactaccagattcaataatgctaccgtctggagtggttacgttactataaacccatttcgggtcattacgagttgcgatccatttggattcgtcgaaagccccagcaggggaagcaatattctgttttgcgtaccagatacgacgcgcataaatgatcgccatgtcttgagaataaccacgagtcgggtcatactgctggattccgttaaattcattgaaaaagtcaacgttaacgccgtcactcagcgtattacgatcagccttcccaacgttgataactttttcaccagcagcatcaaggccacttcgtgcgcggaatgatttagctaccattatcttttttcctatattgtattcaataccaatatttatatacaaaaaatggcccgaaggccatttaactgattatttattacttccgaaccatctttttatatttcttgattgtttcgtctgtaatctggtttcgtttatatagaggggttacaccgaacgcctcaacaccacgttcattaaggatcgttgctacgatttcctgtctgataaaccagcgcttaaccttttccggaaactgttcattgatacttttaaacagtttggcttcccaactatccagcgtttcagggtggataatatgatcaaacccttccagaaaatcaatcgttgttgcgtgaatagcgtttgctactttgcgaatgtattctttattcatgcttcacccaaatactctttcaattgcatataaccgccaataaaattaccatctacaaagatccgagggtaagtaaatgccatgcttcgactacgaacacgtttcgctaactcttcaatgcggggtcgatcgtaatcaaaccccacactgttatttgctggctttagaacagaataaaattcgtattctaatccatgctcatcaagtaatttccgagcttcaatacagccgtaacatttatgaagcgattcgggaataccgtaaatctcgattttcatcaattgctttccttcgtgccggagtgattttgctaatgatatctttctttgtatcagaaagcatacgctcaatcaattccaccgcttcaagttgttgatgcagagaaagaaggttgatgatttcctttttctgttcatcaatagcagcttccttgtcaatcgcgtacagcttattatcaccgaaaacatgctgtaatgcaaattcaagtgcctgtgaatcagtcggcgctggtagtacagaaatcgaagtgatccgcttgacaaaaggataatcaaatcgcagatcattgatatcttgttgaacaggttttacagtcatccacagtttaggatcagaagatacgaaatttaaatcaggcgcggcgatttcttctttagtagcaatcttcggttcttcttccggtaaatcatatggtttgaagtatttccagatatggctagggatctcgtattcgaaatcatcttgcagaacataagcaatgtcctcagtatccccaatcgcaatacgatcgattgtgatatagccgttgtttttgatcaattcagctaaagcatttcgccaggttttttctgcaaattctttagcgtcgatgttcagggtataagatttaccttctaataattccatgtgtcacctcataaaaaagggtgccggagcacccagtttaatttacttgcttacttctgctacttttcgagcagctttgcgaaccaggtcggaagcagtacgcagattttgaagcgcgtcatcatgggctttaaccgcttcttcaagctgtgccattgcttttgcgatttcttctttcttagccgcttcgtctacattgatagcgatagcgctattaccggaaacgctaacaggttcatcaacaattcctgtcgccagttcacggaagaacgaacgttcagaatcaagcagatagtaaccaacttttccggtctgggaatcaatggtttctaccgttttgctcaattgatgatgaccgagcgaagtcgtatggtaaacggtgtatacaccattactgtgttcatcggtatatgatttgatcccgtggttagcgccacaacgatttttaaattgctgcggtttaaccagaacatacgaacggccttcaacaaatttagtcggatccagttcaaccgacattgccgaaccgccatcaagcatttgatcaagatctgcggttgctggtgcaacaggcgcaaccggagccgtaacgttggcttttttcggtttggctttctttttcttagctggagccgcgccaacttcgacgaaataacgagcttcccacgaacgcagagagctaaaagtcatttccggagtatgatcaattttgaaagtatctgaattgattttcgagataatttttacctcgttattcaggaatttttcgatctgcatcgcctggatagtgtttgcggtgttagatccgccgtgtgaattggtagtaaacccttcacggtcaaccagtttgtaagttttaccaaccacgaacgttttcagttcatttgcttgaactgtccacgggcaagaaccgcgccctgtattacggatggttttcaggggaatgttccacttccagcagtagttacgcgcttctttacgggttttgaaattcaggatcatgatattatctctcaattaaagttaatcgtcatttacgatgtggtaagattaccatagttacacattaggtcaagcaatatttttaatttctatcgaatttttagcgaattcgatcatacgttgattatctgaaccgcgaaacggctttttcgttggcaaatctttctcatacttaccatcaatcagaacatcaatgtaaggaagtagcttagaacgttctgggtcggcctgtaaagcctccagggtatatcctgtccataaccatacgtttttctttggaagttccttagaaacgcgctcaagcagttttaggatagtaggatagttgtcacggtaaagcggatcgccgccagttaatgtaagtccatcaacatgcggattactcaacagagaaatcagatggttttctgtctcttccgtgtacggtgttccgttgcaagggttccacgtcgatttgttataacaaccttcgcatttatgattgcatccagtcacaaacaaaacaacacggatcccttttccgttgaccacatccatattatagatgcggtcgtaattcatgctttttcaccaaacagacgttctctgatcgcttcgtcaataatgtctgggaactgagtgttaacccgttgcattactgctttgcgtacagtaacttccaggttattcgagacgcgagcgataaacgcggcttcgtctgcaataatgttttctgttgcatgagcaatcgcctctttctcgatatctttaagaatggtttggcattgctgttttaccgattctttgattttaccagacagttcgcgaatattgccatagttgacatcgaaaacattcgaataaccataacgtttttcgacgtaatccgagaattcagatttgatgatctgtgtaatttcggatgagttcggcattagaacagctaactgttcctggatccgtttgttgatttcttcgctaacacgcttaccaactacgctattcaccacgtttttgatgatagcagattggagatctacgcgggcggttgaaccttccggaaacaggcttaacaccgcatttgtgtctaatttcagttgaatcatttcatgttacctttcttcacgaggatcagttctttgatccgttcaacaataacgatgtattcccatttagctaacttttgggtatcacaccacttttgaaactctttcatagcctctaagtgacctttactccagtacatttctgcaatttcgttgcaaagagtttcagtagcagtgtttttgattttcataacatcctccttagttgacaagaaggatgttactacattcatatatacaggtcaatacttttatggataatattgaatgaaaaatgaaggatgtccttcgtagttcacatcaatagcaccaattttaacgattgcattgcggcgggtagcctcttcgacaatctgatcggttaggcttacaatctcacctgatacccaatgcaatttatgttccggatctgtagccccacagaaaaacagttcaatttcgttagcttccagttcacagcgtagatagttcaaattacgtgaatttgttttgttgaaaatcataatttatacctatttcaatagtttaccgcgtagataatcaggagcttttaaaattttcccgtcgtctacatacccaacttcaattaaatcatcaattagattgatagattccccagatgctgcatagaattgcaaccttcttttctttacgatagccatataaacatgattatacgtaggagtcattctcttaacaacaccaatcatacagagtctgttaaggcatccagtataagatcggcccgttgcttttgagtaatcttccaggcttccgcgtggtatagcagaaacaagatccttgtagtcttttcgtttccacgtccgaccaaccgcacattttgttacaccgtcagccattttagaatttgggtgcttctcatcttcacgcatctttttatcttcaagaaatttctgaaatcgaatttcttcgagatagtcaatagcgttctgaaaacgattttgtctcttctcgcgttcaacaatacgggaaggaaataacttatcaaggatcttgctaatcattttatatcatcccgaatcgaatcaagaacaatgtaatctatcccattcactcgtttaccactgggtttacgatagcgaatgttacggcctttcatatcagttgcttttgaaatgtagaatgactttgtttcacgtagccattcactccattcctgatatgaattcccgacatttcgacgcactttagcgtataacggaaacatcacaaagcctttaatttagcaagggttgatttatgaaaatcaacttgtttttctgaatttttcagattgcgttcagcttcccggatcaggtaattccggcgagagcgcaacaagttgagaacatctttcgctttacgggcgcgtttaccgaacagatgacaagtaccgagattgtcaagcatgttcaggagatcatagatttcctttgcttcgtcctcttttggtaataacggtttctctttaacaacaacgtgttttttgaataattcacgatcgctattagtaaaaatgtaagattctgattcaaactttgtaccaaagtaatcagtaaaccctttaacaccgaatacgtcatactcagtaactttaataggaaatactaccttagacaaatcattagccgagaacgaaccgccacgaatagctaagtttcggtatgcagtcccaaagcacgtatcatcacgaaaaacaaatttatcttttgtccaatacatcataaagccctcaattttgcgccgctaatgagaacatctttcatttgttttgcggtgcggatagtagttgccagttctaaagagacatcattacgatatgctgtgccgtcttcacacagaaccaaaccaggacggcccttgatagggttgatgacttcaacgcgagttggatgattttcaactttgtagcctaatgcaaacgcacatgctactacatcggtcattttcttagtcagtttcataatctgtctcctttttcgataggcccaatataacaaaagccctcaaccgaagtcaagggctttttgattaattttgatgcttaatgcgatgcatcatttctttgttcttaccttcgttgaacccacggacagcaggagcacccaaatagccgcatgtacggcgcgtgacgctcattttttccggatcctgattcccacaatgggtacaatgaaaaccgtcttctgttggcttaaattcatcatcagagccacattcaaagcatttatcgaccggaaggttagttccgaagtagtccagtttatccattgcataatcccagactttttcaagggcttccaggttgtttttcatatcagggaattctacatagctgatatgtccagcagttgcaatgtaatgataatcggcttcatagtcgattttctcgaacggtgttaccttgcgatcaacgtccagatgaaaactgttagtgtaccagcctttatctgtgatccctttgatacttccgaatttctcatagtctagtttgcagaaacgatgacatagagattcagcaggggttgaatacagactaaacccaaatccggttttctttttccatgcttcggtcgcagcgcgtagatattccagaatcagtctacccatgttctgagaaccaatccggtcgaatgggtgttgtccagatccgaaaagcatcagagtttcatgcaatccgatgtatcccagactgatagaactacgcccatttttgaacagttccagaatttcatcatcgggtttcaaccgtacaccaaacgcaccttctgtataaaggatcggggctacactagctttaacacctctgagactatcaatacgagtcatcagggcttcaaaacacagttccagacgttcatcaaggatacgccaaaatgcatcatgcgcgtcttcatcttcctgtgcttcggcttcaatcgcaatacgaggaaggttgatcgtcacaacgcccaggttattacgtccatcaagaatttcattaccgtgctcatcattccacacgctaaggaaactacgacaacccataggagatacaggaacgctagaaccagtgataaggcggttattagccgaactaatgatatccggatacatacgtttcgaagcgcattccagagccaattgtttgacgtcatagttacgatccccaggattcatgtttacacctttttccataaacatgaccagtttagggaacacaggggtaataccttgtttacccagaccacgaatacggtttttcagaatcgctttctggatcattcgttcaaacattcccgtaccagtaccgaaagtaatagtaacgaaaggtgtttgtccgttggcagtatgcagcgtgttaacttcgtattcatacgattggaaagcatcaaacacatctttttcagtcttttccatcgcatatgtacgatctaacgaaattttatactttttagcatccttaacatgcttttcatatgtcatttctgcatacggagccagcactttatcaacgtttgcaaaggttgtcccgccgtactggtgagaagcaatctgtgcggtgatctgtgccatgagagccgtcgcaacaccgattgatttcgggggttcaatgtctgcgttacccatcttgaaaccattagccagcatacctttcaaatctaccagacagcagttagtgtatggggtgaaagggctgtaatccagatcgtgataatgaatatcaccggaatcatgcgccgcaacaatatgtttcggtagaatatggttacgcgccatatgtttagaaacgataccagccagaagatcgcgtttagtcgggaatacgcgagaatctttgtttgcgttttcgttggttaattctttgttactaagagtcatcaaacccttgatatcacggaataattttccgttttgttcacgggcgatatcacgatcatgacgatattcgatatatgcacgggcaacagtcggatttgtcttcattaaagattcttcaacaagttcttgaatttgtgaaatcttcattgctttaccgttgcggatctgactacgcaacacaagcataatcgcactgtcttcatccgtcatcgtaccgccagctttatacacagcattacgaattttttctttatcgaaatcgacgattgttccgtcgcgtttttctactttcatttggttgccttcattaattgtcttctatagctctttgctaaagccttgcgatcctcagtttctgagtactcaaagcccatagaaatcatttcggctatcatatccgatttagtaaggcgtgtaaaccatttaaccttatcgggtataaatttgtcgtgcatacggttttgtgaatagtcgcgtttgaggtatgctaccaggctttctagccattcgatgtaatcaacatcacgggaaaccagaccagaacgattaaatttgtgctttacaataccttctgtaccgttgcataggttacataggaggccgcgcacacgtccggcattagagccagatagagcatgatcatggtcaaggtgatgtttttcaaggtcaccctctaaagggcgaccacataacgcgcacaagccgttttgctgttcaaaaagagcttgtttaatggatggataatctttcttagtaatacgtttagtgagcataataacaccaatcaaataaaggtgttaatatttatcccaacgtgcgaacgtactcacgcagttggtcaaagccgccgatgtgcttaccatcgtggaaaatttgaggcatggtcagtctacgagtacccaacaggctttcgagttcagaaatgaccgtttcattcaggatcggtttgccgtctgcgtctttttcatcggctacagaaacaaactcatattcttttcgttttgcgtccaggagacgtttagaattcaggcatggagcgcaattgtaaacagaagggatataaccaaaaatcttaaacatatgttaccttacattaagtcatccagtgtttcagggtatgtatttacgtcgcgtttctgatagttgcacacgtagacttcttgcgttttattttgttcgtaagaatcagtatgctggcctaacagatactttttatcgaggttatgcacattatatttttgcatccactcgatcaggatatcattttgctttcctgcatgatgtgtcacgtttgataaaccaaacttgataccatcagagtttaaattatcgagaaaatcatataattcatgctcgcgttcttcgttccagaacttgttataaactgcatcagtgatcaggtacggcggatcgcagtacacaaaatcattcaaacagatatcaagatccttaaacgatgcgctagagaattcaattccccgaacattatttttgaagtgttcaaaccgtttaacggtagaatcattcaacgttctacaaccaaaattggcgttaaaatcgcctttatcgttggttcgattaacattactaaacgaatgcaggatcagaacatagagccatagcggatccttgttcttattatatgcatcacgaaatgtgagatacgcttctttctcgttcttacccaatccatgttgtttaatcaattctcgcacaggagagaggtcaggaagcatttgaaggcgcttatacatatcaatcaacgtccgatcgtaatcgttgcttagaacgggtttagggacgtttagtgacacactcaaaccaccacaaaaacagtcgatgaatcgcatatagctgtttctgtccggaaataatttgaacagttcaggaagtagcttttgcttgtttcctgtgtatgggatcacaccataataactcataattcacaaagccctttttcaaattttgcaatggtatcgtacttgtaaccacgattcactatgaagcattgagtttcacccaatttattgatcatgtcaatagctctttgttcgtctttcttacctcttaactgtaaggcaattcttacgatctcttttagtgtttcgtcgttgacttcttccagtttaaaggaatacccagcgattttagcaaaaagccccttgcgagctacaaggggcatgttgtcatagaaaatcacggttcctttgtcgtttttgcggatactaaatcccggcacggttcctaatttcctctaaagtgtcacgggcagtaatctttccgttgacatagtatgtgatcatagcatctttccagccttccggcactttctgttccagagtatcaatggttttaaagttaacaccatcagtgatagtcatcaacaacccttttttactctttttccattcagcgccttttggacatttatacacaccagtccacacaccgttaattttgattgcgcacattttcatcgcatatttttgagtgtcgcgggtaacttcttgaagcaatccgccgcccataccaaacgcgatgttttcagacgcccaacggttagactccatccagttcaacacccgattgattgtttcagggccatgaatttcatcgccttgaatgatccttactgctgggtgtagtactttatacccttttgagttcactgtatagccaaagatacggcccagttcttcaagagcgtacatgatattgtctaccatatcaccagaatcaggacgaactaccagagtaccgcccttagaaagaatagaatctttatattctgcgatacggcgaaccgccgctttaaaatcccaggaatcatacacacatgcatacatcccttcaccgaagatctcaatactgtttttgtacgcaaggtcttcgttttctttgccgtaagaaacggtagtggaatgttcgcgagcaggaattgaaataccagccgccattgcaccatcatcaaacgctttctgacaatcttcaaacagagagatagccataatcagcgcttctacggtatcagtaccgaggaagttatacaggtgcgcgaggccaccaataccagcggattcagcagaagaggttccacgtgcgccgaagtcatgcaaacgggtacgtaacaccatatcaaatgcttcaccttcgagatcggaggttttcttgagatatttcttcaacacttttttacattcgcgggatagagttgctacggttgaagggaaccatactcccctgatcgccagggtttctacgtgtcctgctaaccacagcgcatttttcccagcgtggaaagttgcaaccggatttttaaccgctactggggttccttccggaatcgctctgaattcaagagggatgtaacccagttctgcaatttctttccaacctttgtagttgaagatttcgcgcccaaagtgcattttgtacaaccgattagcaaaatccacgttttccatagtcaccggacgtgataggatttgcgcaaggcggttacagccagccgtaactacttgatcaaatttaccaccacgagattcaatataaaacagcgcctcttcggagccagttggatattgcgaccagtgagaaaccttataggaatctacggaagtgatgatgctgttcagttcttcgaaagttttgttgttcataaacgtactccacgttttaggtttattttaaaatacccgatccagtcgttcgggatggattgtattgtgatatttagacttacaatccttactggtttttctgccattagaacagaaaactttgtgatacgttgtctttgtgtgtttttctttgcacacaggacaaacaatcacagaacctattttagcagccttagccacttcatacaagttctttacatcaatttgtctttcttttgtgataacccgaccacggaattcagcaacaacagtttcatcacgtacagaaccatcactatactgaactttttgtttactactttttcgtttggatcctgatatttgagaggaacccgataaaagtttacggagttctaaacggtctttataagcaccacgattaacgcagaaatattcaccgtcttcttcgtcatcaaaatcagcccaatcttctaaagcctcagcttcatcgctcatagtggttccttagaaataatctttgttgctcaacaggtaaacccggttatcgttgtagtcaatgtaagcatcccaccaaccagcacaatcaacaccatcaacttccaacgcctggataagaacgctacccgctacgttgtcgtattcgtacattgcatgtaattcatccagcattgcttcaacattggcccgtaagcctttaccgttgttagcaacaccttttgcttccaggcaatatccagcataagttgctttcattacgatttccatgatgtttatccttctgagttagtgtcttgtctacgggagttagaatactactataaccaacccccgtcaacacctttttaccaactaatgtaaaaagtgaattcacttacacggcgatctgttttcctttcaggaatgttgaaaccgaaaacttcgcgttcttcctggtttcgatacgtttgattgtacttactagccagagaatttgtgatcttagcggcgttgcgtttttcttctgtatcgaattttagcccttcttcttccaaccattcagaaactcgttggaatgcatagcgagtacattcaatacccagacaagagccgatatcgtgcttcatatcatagataaggttttgttttgtcgcgtgtttcagaacaccttttgtgattgtatcccgcgcatgttcgatcatcttagtattctgatcgttgataatttctcttgctcgttctgcgagagtgggtgatcggccttctaccggagtttcgccgtcagtaccgatactacgtacatgaatcatattttcacctattgcgttattaacagcccatctttcgtatgtttcacgaagtaagggcgcatgttcaattaccataaaaaatccaacgttgggggtttgatattgatccctaacgtatcacacacatcgttcaatacactttctttgaagagattgaaacatggaaccctgtacaacctagccaatcttacagcgatcgcggttccacctttaacacatccttcacgttcttccgcccaaaataaaacaaaatcagttggattgtcaagattttcacgaagaacttgaatcgtgtttcgtgcataccttctttgaacgtattcattctgtgtatcgaagttacctgctacctttctggcttcgtcagcggctttctgtgtgtttaaatcttgaaagtcgatgatatcctttccgtttgcgaaaaggccgttaaaaccgttctcaggaaggattatacatctgttatccggattatagtcaaacagaaaatgactatccataccaggagcgccgccagaataagccctgatcccgcgttcgttcaaagcacgtccgattttaacagcaatgtttgcgatatgttcaggaggtttacggctaccgatcagggtagccgcttttgcatcaaccagaatctgattaaaattcatggttcaggattttgccccatacagggcgaatcatgttttgggcttcggttacaaacagcttcttagccattgctgggtcttcgaactgttcgaggaaaggcccgtgattacggctgatttcttcgatagcatcctgaacagttaagcccataatgcgaccgaaatctttagcagtgatcgaagccagatccagtttcgaaagaacgtttttcacacggttctctgtaaggtaacaaacaaactcatcgagttggtttttgtctttttctgacaatgaaaccggagcattaaagcgggttgctttcttcgctttcttctcagtgaatttggttgttttgcatttgattgcaacgcgttcaccgtttggcataaaagcaggtgaaacaggtttcattacaaaaccttctgcaatgttgccctcttcaacgtccatgataggatatacgaattcgccatatactgtgttatcgctaccaatgccgctatttgctttattcaccacagattcaaacgtgatcggcagttctttgatctcttcaaaagtaccgtatcccaacagcggggccattttcaggccatgagatcgagagataagcgagcacaggttatccggaaggaattcaccatttacacggatatcgaatacgtagaaatctttttcgccgtaatcaacatctttctgtacaccgcgccccgcaaattcaccgtagacttgaataaccaaatcatcataagttccggtctttttgagggtttcccacatcttacggatccctggtgaatactttgcaactactgctgaacagccataaaaatcttcggctggcttcacaacatcagtacgctttgcgggggtaacggtaattccgtcatcggtgataaaactaaagttagcaccgtggatcttttcacgcgcaacccacacaccgccagtaagcccgttcataattacaccattgatgaacttaccttcataatggttagtaagagaagaatatttcttaaacataatttaacctttcattttcacacgtttttcgacttgataaagtgctttacgcagcaacttcacttttacttcatccagaatgacatcacccttaacgaatgcatctagatttgatttttcagcattagcagcattgataaccgctattgtattttcttgtgtatatcccagacgtggattaatacgttccattgtacgggcatacgggctaccgggtttattgctaaacatcttgcctgaatactgacaacgttcagttgtcatcaatactttccaatcttccagagtaaggtcaaaagaatggttgttctttgcggcgtgttcatgcttgagattgtatgaacgcgcaatacgcagatccagttcaatagcagacgcacggcggcgatgctcaatgagttcggggctaagggccacaatctcaggttcttttgctttacgaaccgcttctacatcaggagcggcttgatttggttttacgtttgaagtagcaatactagcccaacgatccatcgcagatttacgcatcagataatccccgcatcttgaaacgccagcgccatagaggtgttaagatgttcgcgtttaaacgggcgaggtttcttttctttcttcatcggacgtttagcacgttctaaattgtacacacgcttacgatggatttcgatcgcttcgcggcgcattgcatttttaacagggagatttgcagaacggaacgcgcggatacgttcaatttcctgtactacctggtaaatatcgccgttatctaacccatgttcacgggcaatttcggcataacctttacgcaaatcattgaatttgaaatgaatttgcactttttcggcttgagacagttcggaaatgctacggtgtacaattttcatattattttcctttggtagaatcgatttttgcaactacattcaacacgctatcgtttcggatgtcaacattttttagaacaaaagttactaccgtatacactccagcgctcatgttgaaattgtcaacaaacgggatctgctgatcatcaagagtattgaccatttcttccatgtcatttggatggtcaacgttgatgaaaacactttccgatacatgatttttgtatctggttccaattcgttcatcgagttttttacacattacatcaactaacatttgtttgtcaatgcctaaaacaccagagtagatcacatgatatagtttcatacaatatccttttccgattcattaacaattgcaaaggaaaggaatgtaaaagcaacccctaacccgaccatccagatagccgttaaatcaccatacattgatgaatacgcgcccatcacttctaagcgatatcccagcaagaaaacgagatacgccaacactttatcattcataattcctcacaaaacgcccatgctgcatggtaaacgctcgcgcctttgtcttcgttcatgcatacaacatcaaccggacacacaaccctgtacagaacaggatccccacctatagaacgtgcggcccttccagcatatatacgagctaacccgatatcagcggtaaagaaaacacggtctaaatttttctttctgcccttttcagacagagtatcagaatcacagggaggcaataacatgctttcaataccagcagcagtacacgaaccgtgataataaacaacgttttcatttctgcaatgtatcgttttcatgtatcctcccttaaaaagatgcttacattatatcaaatggataaatccatgcaagaaatttctcggtctacatcttcttttgttttgttgacatacgccaggtattcatcggtatacattttccgctttctggctattctttcagcagccgcgcacatttgagcttctgacggtttataaggcaacctttctccaaatccttcaacagttagacgaacgaaaggaaccgcagaagttataatgtcattaccatacgcataaccatttttagtaaatacggctttgttgaatcgttcatggtgtacgccttcaacctcaacctgatcaccatagtaagcaatagtatcaatgcgatggttaagaatgatagcaccagactcaatgattttcagtgcagcggcctttccttgttcgcgagcataagccacgatttcataagaaccgatatctatagcggaaccatgattaccaacgatgtaaaacatggaattaattaggtgcttagagatatatgcatacgttttatacatctgatactgttcattacgcagacacatacccgctttgtattcacgtcgtaactgcataaggttttgaatcacttcatcaatacgccatccgttagggaattcggcccttttctcacgtgcgatatggatcaacgcgtttccatacatcgcgttaaacgtcatgatccggatcccttcaacgtaaccatcgataggggcttgccatgtaatagggctatatatcggatcgtggtcaggacgcattttaggggtatggtggcgaaggaatccaacgtgagccgcaaaaagatcttcaatctcacgggagtaatagttgtaagagtccatgtcacggttgcgggaaaattctacaatgaagcgatgtaaattgattttcatatcatataccttatggtttaaagttcttccggcctatccgtcgaacaccataaccatacaccactgtcagaaagcatgtcaataaataatagaaaataaactggagaattttacatgaagtcatttaaacaattcacagaaagcaccttaaccgaagcgctgatcaccttcggaggccgtgcttatcctaagttcggtcaggttgttattcttgctggcggtgctggttcaggtaaagggttcacactggaaaaactgctaggcatcgaaggtattaccctggacgttgacgccctgaaaaaacttgtaatgggtagcgataaactcgcagcagagatcaagaaacaaacgggtcatgatgtcaaaac

(The sequence listing continues in the following parts.)

1. A composition comprising at least two different strains of isolated bacteriophages, each capable of infecting a bacteria of the species Klebsiella pneumoniae, wherein at least one of said at least two different strains of isolated bacteriophages has a genomic nucleic acid sequence at least 90% identical to one of the nucleic acid sequence as set forth in SEQ ID NOs: 1-30 and/or comprises the essential genes as set forth in Example 6.

2. The composition of claim 1, wherein a first of said at least two different strains of isolated bacteriophages has a genomic nucleic acid sequence at least 90% identical to the nucleic acid sequence as set forth in SEQ ID NO: 1 and/or comprises the essential genes of phage KP10-11 as set forth in Example 6, and a second of said at least two different strains of isolated bacteriophages has a genomic nucleic acid sequence at least 90% identical to the nucleic acid sequence as set forth in SEQ ID NO: 2 and/or comprises the essential genes of phage KP10-48 as set forth in Example 6.

3. The composition of claim 2, comprising at least three different strains of isolated bacteriophages, wherein a third of said at least three different strains of isolated bacteriophages has a genomic nucleic acid sequence at least 90% identical to the nucleic acid sequence as set forth in SEQ ID NO: 3 and/or comprises the essential genes of phage 395D2-3-2 as set forth in Example 6.

4. The composition of claim 1, comprising:
(i) a bacteriophage having a genomic nucleic acid sequence at least 90% identical to SEQ ID NO: 1 and/or comprising the essential genes of phage KP10-11 as set forth in Example 6;
(ii) a bacteriophage having a genomic nucleic acid sequence at least 90% identical to SEQ ID NO: 2 and/or comprising the essential genes of phage KP10-48 as set forth in Example 6;
(iii) a bacteriophage having a genomic nucleic acid sequence at least 90% identical to SEQ ID NO: 3 and/or comprising the essential genes of phage 395D2-3-2 as set forth in Example 6;
(iv) a bacteriophage having a genomic nucleic acid sequence at least 90% identical to SEQ ID NO: 4 and/or comprising the essential genes of phage 395D2-3-1 as set forth in Example 6;
(v) a bacteriophage having a genomic nucleic acid sequence at least 90% identical to SEQ ID NO: 22 and/or comprising the essential genes of phage KP10-85 as set forth in Example 6; and
(vi) a bacteriophage having a genomic nucleic acid sequence at least 90% identical to SEQ ID NO: 25 and/or comprising the essential genes of phage KP10-91 as set forth in Example 6.

5. The composition of claim 1, wherein said at least two different strains of isolated bacteriophages in combination target at least 100 different strains of Klebsiella pneumoniae.

6. The composition of claim 1, wherein at least 100 different strains of Klebsiella pneumonia are targeted by each of said at least two different strains.

7-8. (canceled)

9. The composition of claim 1, wherein said at least one bacteriophage is genetically modified such that the genome thereof comprises a heterologous sequence.

10. The composition of claim 9, wherein said heterologous sequence encodes a therapeutic agent or a diagnostic agent.

11. The composition of claim 1, comprising no more than 10 different bacteriophage strains.

12. A recombinant bacteriophage capable of infecting bacteria of the species Klebsiella pneumoniae, wherein said bacteriophage (i) has a genomic nucleic acid sequence at least 90% identical to one of the nucleic acid sequences as set forth in SEQ ID NOs: 1-30 and/or (ii) comprises the essential genes of a bacteriophage as set forth in Example 6, and wherein said bacteriophage is genetically modified such that the genome thereof comprises a heterologous sequence.

13. The recombinant bacteriophage of claim 12, wherein said heterologous sequence encodes a therapeutic agent or a diagnostic agent.

14-16. (canceled)

17. The composition of claim 1, being formulated for oral delivery or rectal delivery.

18-19. (canceled)

20. A method of treating a disease associated with a Klebsiella pneumoniae infection in a subject in need thereof, comprising administering to the subject a therapeutically effective amount of a composition comprising at least one isolated bacteriophage strain capable of infecting bacteria of the species Klebsiella pneumonia causing the infection, wherein said at least one bacteriophage strain (i) has a genomic nucleic acid sequence at least 95% identical to one of the nucleic acid sequences set forth in SEQ ID NOs: 1-30 and/or (ii) comprises the essential genes of a bacteriophage as set forth in Example 6, thereby treating the disease associated with a Klebsiella pneumoniae infection.

21. A method of treating a disease associated with a Klebsiella pneumoniae infection in a subject in need thereof, comprising administering to the subject a therapeutically effective amount of the composition of claim 1, thereby treating the disease associated with a Klebsiella pneumoniae infection.

22. The method of claim 20, wherein the disease is an inflammatory bowel disease (IBD).

23. The method of claim 22, wherein said inflammatory bowel disease is ulcerative colitis (UC) or Crohn's disease.

24. (canceled)

25. The method of claim 20, wherein said administering comprises orally administering or rectally administering.

26. The method of claim 20, wherein said composition comprises no more than 10 different bacteriophage strains.

27. The method of claim 20, further comprising identifying the strain of Klebsiella pneumoniae colonizing the subject prior to the administering.

28. The method of claim 20, wherein said at least one bacteriophage strain is genetically modified such that the genome thereof comprises a heterologous sequence which encodes a therapeutic or diagnostic agent.

29-30. (canceled)
